(19) United States
(12) Patent Application Publication
(10) Pub. No.: US 2005/0085436 A1
(43) Pub. Date: Apr. 21, 2005

(54) Method to treat conditions associated with insulin signalling dysregulation

(76) Inventors: Hao Li, Carlisle, MA (US); Jing Ma, Scotch Plains, NJ (US)

Correspondence Address: NOVARTIS;CORPORATE INTELLECTUAL PROPERTY, ONE HEALTH PLAZA 104/3, EAST HANOVER, NJ, 07936-1080, US

(21) Appl. No.: 10/887,553

(22) Filed: Jul. 8, 2004

Related U.S. Application Data
(60) Provisional application No. 60/485,883, filed on Jul. 8, 2003.

(51) Int. Cl. A61K 48/00

(52) U.S. Cl. 514/44

(57) ABSTRACT

The invention discloses a method to identify proteins involved in the ISP. The invention also discloses suitable targets for the development of new therapeutics to treat, prevent or ameliorate pathological conditions associated with dysregulation of the ISP. The invention also relates to methods to treat, prevent or ameliorate said conditions and pharmaceutical compositions therefor, as well as to a method to identify compounds with therapeutic usefulness to treat pathological conditions associated with dysregulation of the ISP.

### BACKGROUND OF INVENTION

[0001] This invention relates to newly identified proteins involved in the insulin signaling npathway, methods for identifying compounds useful to treat pathological conditions associated with dysregulation of the insulin signaling pathway (ISP), as well as to methods and pharmaceutical compositions to treat, prevent or ameliorate conditions associated with dysregulation of the ISP.

### FIELD OF INVENTION

[0002] Using Drosophila as a model system, Applicants herein disclose a method to identify proteins involved in the ISP. Employing said method, Applicants have discovered and describe herein several new proteins involved in the ISP. It is contemplated herein that these proteins and the genes encoding said proteins may serve as drug targets for the development of therapeutics to treat, prevent or ameliorate diabetes and other pathological conditions associated with dysregulation of the ISP.

### SUMMARY OF THE INVENTION

[0003] The instant application discloses a method to employ transgenic Drosophila to identify proteins involved in the ISP. Human homologs of the Drosophila genes identified according to this method are suitable targets for the development of new therapeutics to treat, prevent or ameliorate pathological conditions associated with the dysregulation of the ISP. Thus, in one aspect the invention relates to a method to identify modulators useful to treat, prevent or ameliorate said conditions:
[0004] (a) assaying for the ability of a candidate modulator to modulate the biochemical function of a protein selected from the group consisting of those disclosed in Table 13 or 25 and/or modulate expression of said protein and which can further include;
[0005] (b) assaying for the ability of an identified modulator to reverse the pathological effects observed in animal models of pathological conditions associated with the dysregulation of the ISP and/or in clinical studies with subjects with said conditions.

[0006] In another aspect, the invention relates to a method to treat, prevent or ameliorate pathological conditions associated with the dysregulation of the ISP, comprising administering to a subject in need thereof an effective amount of a modulator of a protein selected from the group consisting of those disclosed in Table 13 or 25, wherein said modulator, e.g., inhibits or enhances the biochemical function of said protein. In a further embodiment, the modulator comprises antibodies and/or peptide mimetics to said protein or fragments thereof, wherein said antibodies and peptide mimetics can inhibit the biochemical function of said protein in said subject.

[0007] In another embodiment the modulator inhibits or enhances the expression of a protein selected from the group consisting of those disclosed in Table 13 or 25. In a further embodiment, the modulator comprises any one or more substances selected from the group consisting of antisense oligonucleotides, triple-helix DNA, ribozymes, ribonucleic acid (RNA) aptamers, siRNA and double- or single-stranded RNA wherein said substances are designed to inhibit expression of said protein.

[0008] In another aspect, the invention relates to a method to treat, prevent or ameliorate pathological conditions associated with dysregulation of the ISP comprising administering to a subject in need thereof a pharmaceutical composition comprising an effective amount of a modulator of a protein selected from the group consisting of those disclosed in Table 13 or 25. In various embodiments, said pharmaceutical composition comprises antibodies and/or peptide mimetics to said protein or fragments thereof, wherein said antibodies and peptide mimetics can inhibit the biochemical function of said protein in said subject and/or any one or more substances selected from the group consisting of antisense oligonucleotides, triple-helix DNA, ribozymes, RNA aptamers, siRNA and double- or single-stranded RNA wherein said substances are designed to inhibit expression of said protein.

[0009] In another aspect, the invention relates to a pharmaceutical composition comprising a modulator of a protein selected from the group consisting of those disclosed in Table 13 or 25 in an amount effective to treat, prevent or ameliorate a pathological condition associated with dysregulation of the ISP, including Type II diabetes and the Type A syndrome of insulin resistance, in a subject in need thereof. In one embodiment, said modulator may, e.g., inhibit or enhance the biochemical functions of said protein. In a further embodiment said modulator comprises antibodies and/or peptide mimetics to said protein or fragments thereof, wherein said antibodies or peptide mimetics can, e.g., inhibit the biochemical functions of said protein.

[0010] In a further embodiment, said pharmaceutical composition comprises a modulator which may, e.g., inhibit or enhance expression of said protein. In a further embodiment, said modulator comprises any one or more substances selected from the group consisting of antisense oligonucleotides, triple helix DNA, ribozymes, RNA aptamers, siRNA or double or single-stranded RNA directed to a nucleic acid sequence of said protein wherein said substances are designed to inhibit expression of said protein.

[0011] In another aspect, the invention relates to a method to diagnose subjects suffering from pathological conditions associated with dysregulation of the ISP who may be suitable candidates for treatment with modulators to a protein selected from the group consisting of those disclosed in Table 13 or 25 comprising detecting levels of any one or more of said proteins in a biological sample from said subject wherein subjects with altered levels compared to controls would be suitable candidates for modulator treatment.

[0012] In another aspect, the invention relates to a method to diagnose subjects suffering from pathological conditions associated with dysregulation of the ISP who may be suitable candidates for treatment with modulators to a protein selected from the group consisting of those disclosed in Table 13 or 25 comprising assaying messenger RNA (mRNA) levels of any one or more of said proteins in a biological sample from said subject wherein subjects with altered levels compared to controls would be suitable candidates for modulator treatment.

[0013] In yet another aspect, there is provided a method to treat, prevent or ameliorate pathological conditions associated with dysregulation of the ISP comprising:
[0014] (a) assaying for mRNA and/or protein levels of a protein selected from the group consisting of those disclosed in Table 13 or 25 in a subject; and
[0015] (b) administering to a subject with altered levels of mRNA and/or protein levels compared to controls a modulator to said protein in an amount sufficient to treat, prevent or ameliorate the pathological effects of said condition.

[0016] In particular apects, said modulator inhibits or enhances the biochemical function of said protein or expression of said protein.

[0017] In yet another aspect of the present invention, there are provided assay methods and diagnostic kits comprising the components necessary to detect mRNA levels or protein levels of any one or more proteins selected from the group consisting of:
[0018] (a) those disclosed in Table 13 or 25 in a biological sample, said kit comprising, e.g., polynucleotides encoding any one or more proteins selected from the group consisting of those disclosed in Table 13 or 25;
[0019] (b) nucleotide sequences complementary to said protein; and
[0020] (c) any one or more of said proteins, or fragments thereof or antibodies or peptide mimetics that bind to any one or more of said proteins, or to fragments thereof.

[0021] In a preferred embodiment, such kits also comprise instructions detailing the procedures by which the kit components are to be used.

[0022] The present invention also pertains to the use of a modulator to a protein selected from the group consisting of those disclosed in Table 13 or 25 in the manufacture of a medicament for the treatment, prevention or amelioration of pathological conditions associated with dysregulation of the ISP. In one embodiment, said modulator comprises any one or more substances selected from the group consisting of antisense oligonucleotides, triple-helix DNA, ribozymes, RNA aptamer, siRNA and double- or single-stranded RNA wherein said substances are designed to inhibit expression of said protein. In yet a further embodiment, said modulator comprises one or more antibodies and/or peptide mimetics to said protein or fragments thereof, wherein said antibodies and peptide mimetics or fragments thereof can, e.g., inhibit the biochemical function of said protein.

[0023] The invention also pertains to a modulator to a protein selected from the group consisting of those disclosed in Table 13 or 25 for use as a pharmaceutical. In one embodiment, said modulator comprises any one or more substances selected from the group consisting of antisense oligonucleotides, triple-helix DNA, ribozymes, RNA aptamer, siRNA and double- or single-stranded RNA wherein said substances are designed to inhibit expression of said protein. In yet a further embodiment, said modulator comprises one or more antibodies and/or peptide mimetics to said protein or fragments thereof, wherein said antibodies and mimetics or fragments thereof can, e.g., inhibit the biochemical functions of said protein.

[0024] In another aspect, the invention also pertains to a method to identify Drosophila proteins involved in the ISP, said method comprising:
[0025] (a) providing a transgenic fly whose genome comprises a DNA sequence encoding a polypeptide comprising the dominant negative PI3K catalytic subunit Dp110^{D954A}, said DNA sequence operably linked to a tissue specific expression control sequence and expressing said DNA sequence, wherein expression of said DNA sequence results in said fly displaying a transgenic phenotype compared to controls;
[0026] (b) crossing said transgenic fly with a fly containing a mutation in a known or predicted gene; and
[0027] (c) screening progeny of said crosses for flies that carry said DNA sequence and said mutation and display modified expression of the transgenic phenotype as compared to appropriate controls.

[0028] In one embodiment, said DNA sequence encodes Dp110^{D954A} and said tissue specific expression control sequence comprises the eye-specific enhancer ey-Gal4 and expression of said DNA sequence results in said fly displaying the “small eye” phenotype.

[0029] In another aspect, the invention pertains to gene regulatory elements, such as promoters, enhancers, inducers or inhibitors of expression of Drosophila proteins selected from the group consisting of those disclosed in Table 13 or 25 and methods of identifying such gene regulatory elements. In general such sequence features are readily identified using computational tools known in the art. Such gene regulatory elements are useful for a variety of purposes, e.g., control of heterologous gene expression, target for identifying gene activity modulating compounds, and are particularly claimed as fragments of the nucleic acid sequences provided herein.

[0030] In another aspect, the invention pertains to methods for screening test compounds which modulate transcription of the Drosophila proteins described in Table 13 or 25 by:
[0031] (a) contacting a host cell in which the Table 13 or 25 proteins disclosed herein are operably-linked to a reporter gene with a test medium containing the test compound under conditions which allow for expression of the reporter gene;
[0032] (b) measuring the expression of the reporter gene in the presence of the test medium;
[0033] (c) contacting the host with a control medium which does not contain the test compound but is otherwise identical to the test medium in (a), under conditions identical to those used in (a);
[0034] (d) measuring the expression of reporter gene in the presence of the control medium; and
[0035] (e) relating the difference in expression between (b) and (d) to the ability of the test compound to regulate the activity of the protein.

[0036] In a particular embodiment, the invention relates to a method to identify drug targets for the development of therapeutics to treat, prevent or ameliorate pathological conditions associated with dysregulation of the ISP said method comprising identifying the human homologs of the Drosophila proteins identified according to the method discussed above.

[0037] Other objects, features, advantages and aspects of the present invention will become apparent to those of skill from the following description. It should be understood, however, that the following description and the specific examples, while indicating preferred embodiments of the invention, are given by way of illustration only. Various changes and modifications within the spirit and scope of the disclosed invention will become readily apparent to those skilled in the art from reading the following description and from reading the other parts of the present disclosure.

### BRIEF DESCRIPTION OF THE FIGURES

[0038] FIG. 1 depicts the genetic crosses performed to produce the transgenic Drosophila disclosed herein.

### DETAILED DESCRIPTION OF THE INVENTION

[0039] All patent applications, patents and literature references cited herein are hereby incorporated by reference in their entirety.

[0040] In practicing the present invention, many conventional techniques in molecular biology, microbiology and recombinant DNA are used. These techniques are well-known and are explained in, e.g., Current Protocols in Molecular Biology, Vols. I-III, Ausubel, ed. (1997); Sambrook et al., Molecular Cloning: A Laboratory Manual, 2^{nd} Edition, Cold Spring Harbor Laboratory Press, Cold Spring Harbor, N.Y. (1989); DNA Cloning: A Practical Approach, Vols. I and II, Glover, ed. (1985); Oligonucleotide Synthesis, Gait, ed. (1984); Nucleic Acid Hybridization, Hames and Higgins (1985); Transcription and Translation, Hames and Higgins, eds. (1984); Animal Cell Culture, Freshney, ed. (1986); Immobilized Cells and Enzymes, IRL Press (1986); Methods in Enzymology, Perbal, ed., Academic Press, Inc. (1984); Gene Transfer Vectors for Mammalian Cells, Miller and Calos, eds., Cold Spring Harbor Laboratory Press, Cold Spring Harbor, N.Y. (1987); and Methods in Enzymology, Vols. 154 and 155, Wu and Grossman and Wu, eds., respectively. Well-known Drosophila molecular genetics techniques can be found, e.g., in Robert, Drosophila, A Practical Approach, IRL Press, Washington, D.C. (1986).

[0041] Abbreviations used in the following description include:
[0042] IRS insulin receptor substrate
[0043] PI3K phosphoinositide 3-kinase
[0044] PDK 3′-phosphoinositide-dependent protein kinases
[0045] PTEN phosphatase and tensin homolog deleted from chromosome 10
[0046] PKB protein kinase B, also known as Akt1

[0047] Descriptions of flystocks can be found in the Flybase database at http://flybase.bio.indiana.edu.

[0048] Stock centers referred to herein include Bloomington and Szeged stock centers which are located at Bloomington, Ind. and Szeged, Hungary, respectively.

[0049] As used herein and in the appended claims, the singular forms “a”, “an” and “the” include plural reference unless the context clearly dictates otherwise. Thus, e.g., reference to “the antibody” is a reference to one or more antibodies and equivalents thereof known to those skilled in the art, and so forth.

[0050] “Nucleic acid sequence”, as used herein, refers to an oligonucleotide, nucleotide or polynucleotide, and fragments or portions thereof, and to DNA or RNA of genomic or synthetic origin that may be single- or double-stranded, and represent the sense or antisense strand.

[0051] The term “antisense”, as used herein, refers to nucleotide sequences which are complementary to a specific DNA or RNA sequence. The term “antisense strand” is used in reference to a nucleic acid strand that is complementary to the “sense” strand. Antisense molecules may be produced by any method, including synthesis by ligating the gene(s) of interest in a reverse orientation to a viral promoter which permits the synthesis of a complementary strand. Once introduced into a cell, this transcribed strand combines natural sequences produced by the cell to form duplexes. These duplexes then block either the further transcription or translation. The designation “negative” is sometimes used in reference to the antisense strand, and “positive” is sometimes used in reference to the sense strand.

[0052] “cDNA” refers to DNA that is complementary to a portion of mRNA sequence and is generally synthesized from an mRNA preparation using reverse transcriptase.

[0053] As contemplated herein, antisense oligonucleotides, triple helix-DNA, RNA aptamers, ribozymes, siRNA and double- or single-stranded RNA are directed to a nucleic acid sequence such that the nucleotide sequence chosen will produce gene-specific inhibition of gene expression. For example, knowledge of a nucleotide sequence may be used to design an antisense molecule which gives strongest hybridization to the mRNA. Similarly, ribozymes can be synthesized to recognize specific nucleotide sequences of a gene and cleave it. See Cech, JAMA, Vol. 260, p. 3030 (1988). Techniques for the design of such molecules for use in targeted inhibition of gene expression is well-known to one of skill in the art.

[0054] The individual proteins/polypeptides referred to herein include any and all forms of these proteins including, but not limited to, partial forms, isoforms, variants, precursor forms, the full-length protein, fusion proteins containing the sequence or fragments of any of the above, from human or any other species. Protein homologs or orthologs which would be apparent to one of skill in the art are included in this definition. It is also contemplated that the term refers to proteins isolated from naturally-occurring sources of any species, such as genomic DNA libraries, as well as genetically-engineered host cells comprising expression systems, or produced by chemical synthesis using, for instance, automated peptide synthesizers or a combination of such methods. Means for isolating and preparing such polypeptides are well-understood in the art.

[0055] The term “sample”, as used herein, is used in its broadest sense. A biological sample from a subject may comprise blood, urine, brain tissue, primary cell lines, immortilized cell lines, or other biological material with which protein activity or gene expression may be assayed. A biological sample may include, e.g., blood, tumors or other specimens from which total RNA may be purified for gene expression profiling using, e.g., conventional glass chip microarray technologies, such as Affymetrix chips, RT-PCR or other conventional methods.

[0056] As used herein, the term “antibody” refers to intact molecules, as well as fragments thereof, such as Fa, F(ab′)₂ and Fv, which are capable of binding the epitopic determinant. Antibodies that bind specific polypeptides can be prepared using intact polypeptides or fragments containing small peptides of interest as the immunizing antigen. The polypeptides or peptides used to immunize an animal can be derived from the translation of RNA or synthesized chemically, and can be conjugated to a carrier protein. Commonly used carriers that are chemically coupled to peptides include bovine serum albumin and thyroglobulin. The coupled peptide is then used to immunize an animal, e.g., a mouse, goat, chicken, rat or rabbit.

[0057] The term “humanized antibody”, as used herein, refers to antibody molecules in which amino acids have been replaced in the non-antigen binding regions in order to more closely resemble a human antibody, while still retaining the original binding ability.

[0058] A peptide mimetic is a synthetically-derived peptide or non-peptide agent created based on a knowledge of the critical residues of a subject polypeptide which can mimic normal polypeptide function. Peptide mimetics can disrupt binding of a polypeptide to its receptor or to other proteins and thus interfere with the normal function of a polypeptide.

[0059] A “therapeutically-effective amount” is the amount of drug sufficient to treat, prevent or ameliorate pathological conditions associated with dysregulation of the ISP.

[0060] A “transgenic” organism, as used herein, refers to an organism that has had extra genetic material inserted into its genome. As used herein, a “transgenic fly” includes embryonic, larval and adult forms of Drosophila that contain a DNA sequence from the same or another organism randomly inserted into their genome. Although Drosophila melanogaster is preferred, it is contemplated that any fly of the genus Drosophila may be used in the present invention.

[0061] As used herein, “ectopic” expression of the transgene refers to expression of the transgene in a tissue or cell or at a specific developmental stage where it is not normally expressed.

[0062] As used herein, “phenotype” refers to the observable physical or biochemical characteristics of an organism as determined by both genetic makeup and environmental influences.

[0063] The term “transcription factor” refers to any protein required to inititate or regulate transcription in eukaryotes. For example, the eye-specific promoter GMR is a binding site for the eye-specific transcription factor. See Moses and Rubin, GM Genes Dev, Vol. 5, No. 4, pp. 583-593 (1991).

[0064] “UAS” region, as used herein, refers to an up-stream activating sequence recognized by the GAL-4 transcriptional activator.

[0065] As used herein, a “control” fly refers to a larva or fly that is of the same genotype as larvae or flies used in the methods of the present invention except that the control larva or fly does not carry the mutation being tested for modification of phenotype.

[0066] As used herein, a “transformation vector” is a modified transposable element used with the transposable element technique to mediate integration of a piece of DNA in the genome of the organism and is familiar to one of skill in the art.

[0067] As used herein, “elevated transcription of mRNA” refers to a greater amount of mRNA transcribed from the natural endogenous gene encoding a protein, e.g., a human protein set forth in Table 13 or 25, compared to control levels. Elevated mRNA levels of a protein, e.g., a human protein disclosed on Table 13 or 25, may be present in a tissue or cell of an individual suffering from a pathological condition associated with dysregulation of the ISP compared to levels in a subject not suffering from said condition. In particular, levels in a subject suffering from said condition may be at least about 2 times, preferably at least about 5 times, more preferably at least about 10 times, most preferably at least about 100 times the amount of mRNA found in corresponding tissues in humans who do not suffer from said condition. Such elevated level of mRNA may eventually lead to increased levels of protein translated from such mRNA in an individual suffering from a pathological condition associated with dysregulation of the ISP as compared to levels in a healthy individual.

[0068] As used herein, a “Drosophila transformation vector” is a DNA plasmid that contains transposable element sequences and can mediate integration of a piece of DNA in the genome of the organism. This technology is familiar to one of skill in the art.

[0069] As used herein, the “small eye phenotype” is characterized by reduced cell size in the eye tissue compared to appropriate controls. See Leevers et al., EMBO J, Vol. 15, No. 23, pp. 6584-6594 (1996).

[0070] A “host cell”, as used herein, refers to a prokaryotic or eukaryotic cell that contains heterologous DNA that has been introduced into the cell by any means, e.g., electroporation, calcium phosphate precipitation, microinjection, transformation, viral infection and the like.

[0071] “Heterologous”, as used herein, means “of different natural origin” or represent a non-natural state. For example, if a host cell is transformed with a DNA or gene derived from another organism, particularly from another species, that gene is heterologous with respect to that host cell and also with respect to descendants of the host cell which carry that gene. Similarly, heterologous refers to a nucleotide sequence derived from and inserted into the same natural, original cell type, but which is present in a non-natural state, e.g., a different copy number, or under the control of different regulatory elements.

[0072] A “vector” molecule is a nucleic acid molecule into which heterologous nucleic acid may be inserted which can then be introduced into an appropriate host cell. Vectors preferably have one or more origin of replication, and one or more site into which the recombinant DNA can be inserted. Vectors often have convenient means by which cells with vectors can be selected from those without, e.g., they encode drug resistance genes. Common vectors include plasmids, viral genomes, and (primarily in yeast and bacteria) “artificial chromosomes”.

[0073] “Plasmids” generally are designated herein by a lower case “p” preceded and/or followed by capital letters and/or numbers, in accordance with standard naming conventions that are familiar to those of skill in the art. Starting plasmids disclosed herein are either commercially available, publicly available on an unrestricted basis, or can be constructed from available plasmids by routine application of well-known, published procedures. Many plasmids and other cloning and expression vectors that can be used in accordance with the present invention are well-known and readily-available to those of skill in the art. Moreover, those of skill readily may construct any number of other plasmids suitable for use in the invention. The properties, construction and use of such plasmids, as well as other vectors, in the present invention will be readily-apparent to those of skill from the present disclosure.

[0074] The term “isolated” means that the material is removed from its original environment, e.g., the natural environment if it is naturally-occurring. For example, a naturally-occurring polynucleotide or polypeptide present in a living animal is not isolated, but the same polynucleotide or polypeptide, separated from some or all of the coexisting materials in the natural system, is isolated, even if subsequently reintroduced into the natural system. Such polynucleotides could be part of a vector and/or such polynucleotides or polypeptides could be part of a composition, and still be isolated in that such vector or composition is not part of its natural environment.

[0075] As used herein, the terms “transcriptional control sequence” or “expression control sequence” refer to DNA sequences, such as initiator sequences, enhancer sequences and promoter sequences, which induce, repress or otherwise control the transcription of a protein encoding nucleic acid sequences to which they are operably-linked. They may be tissue-specific and developmental stage-specific.

[0076] A “human transcriptional control sequence” is a transcriptional control sequence normally found associated with the human gene encoding a polypeptide set forth in Table 13 or 25 of the present invention as it is found in the respective human chromosome.

[0077] A “non-human transcriptional control sequence” is any transcriptional control sequence not found in the human genome.

[0078] The term “polypeptide” is used interchangeably herein with the terms “polypeptides” and “protein(s)”. As generally referred to herein, a protein or gene selected from the group consisting of those disclosed in Table 13 or 25 refers to the human protein or gene and its Drosophila homolog.

[0079] A “chemical derivative” of a protein set forth in Table 13 or 25 of the invention is a polypeptide that contains additional chemical moieties not normally a part of the molecule. Such moieties may improve the molecule's solubility, absorption, biological half-life, etc. The moieties may alternatively decrease the toxicity of the molecule, eliminate or attenuate any undesirable side effect of the molecule, etc. Moieties capable of mediating such effects are disclosed, e.g., in Remington's Pharmaceutical Sciences, 16^{th} edition, Mack Publishing Co., Easton, Pa. (1980).

[0080] The ability of a substance to “modulate” a protein set forth in Table 13 or 25, i.e., “a modulator of a protein selected from the group consisting of those disclosed in Table 13 or 25” includes, but is not limited to, the ability of a substance to inhibit the activity of said protein and/or inhibit the gene expression of said protein. Such modulation could also involve affecting the ability of other proteins to interact with said protein, e.g., related regulatory proteins or proteins that are modified by said protein.

[0081] The term “agonist”, as used herein, refers to a molecule, i.e., modulator, which directly or indirectly may modulate a polypeptide, e.g., a polypeptide set forth in Table 13 or 25, and which increase the biological activity of said polypeptide. Agonists may include proteins, nucleic acids, carbohydrates or other molecules. A modulator that enhances gene transcription or the biochemical function of a protein is something that increases transcription or stimulates the biochemical properties or activity of said protein, respectively.

[0082] The terms “antagonist” or “inhibitor” as used herein, refer to a molecule, i.e., modulator, which directly or indirectly may modulate a polypeptide, e.g., a polypeptide set forth in Table 13 or 25, which blocks or inhibits the biological activity of said polypeptide. Antagonists and inhibitors may include proteins, nucleic acids, carbohydrates or other molecules. A modulator that inhibits gene expression or the biochemical function of a protein is something that reduces gene expression or biological activity of said protein, respectively.

[0083] As used herein, “pathological condition associated with dysregulation of the ISP” includes, but is not limited to, diabetes, e.g., Type II diabetes, gestational diabetes and the Type A syndrome of insulin resistance, autoimmune arthritis, asthma, septic shock, lung fibrosis, glomerulonephritis and atherosclerosis.

[0084] “In vivo models of a pathological condition associated with dysregulation of the ISP” include those in vivo models of diabetes familiar to those of skill in the art. Such in vivo models include: an association of the common pro12 allele in PPAR-gamma with type-2 diabetes [see Altshuler et al., Nature Genet, pp. 76-80 (2000)], defects in the human insulin receptor gene [see Kadowaki et al., Science, Vol. 240, pp. 787-790 (1988)], defects in the insulin receptor substrate 1 gene in mouse [see Abe et al., J Clin Invest, Vol. 101, pp. 1784-1788 (1998)] and defects in glycogen sythase in humans. See Groop et al., NEJM, Vol. 328, pp. 10-14 (1993).

[0085] The present invention further provides non-coding fragments of the nucleic acid molecules provided in Table 13 or 25. Preferred non-coding fragments include, but are not limited to, promoter sequences, enhancer sequences, gene modulating sequences and gene termination sequences. Such fragments are useful in controlling heterologous gene expression and in developing screens to identify gene-modulating agents. A promoter can readily be identified using techniques available in the art as being 5′ to the ATG start site in the genomic sequence provided in Table 13 or 25.

[0086] Conventional expression control systems may be used to achieve ectopic expression of proteins of interest, including the Dp110^{D954A} peptide. Such expression may result in the disturbance of biochemical pathways and the generation of altered phenotypes. One such expression control system involves direct fusion of the DNA sequence to expression control sequences of tissue-specifically expressed genes, such as promoters or enhancers. A tissue specific expression control system that may be used is the binary Gal4-transcriptional activation system. See Brand and Perrimon, Development, Vol. 118, pp. 401-415 (1993).

[0087] The Gal4 system uses the yeast transcriptional activator Gal4, to drive the expression of a gene of interest in a tissue-specific manner. The Gal4 gene has been randomly inserted into the fly genome, using a conventional transformation system, so that it has come under the control of genomic enhancers that drive expression in a temporal and tissue-specific manner. Individual strains of flies have been established, called “drivers”, that carry those insertions. See Brand and Perrimon (1993), supra.

[0088] In the Gal4 system, a gene of interest is cloned into a transformation vector, so that its transcription is under the control of the Upstream Activating Sequence (UAS), the Gal4-responsive element. When a fly strain that carries the UAS gene of interest sequence is crossed to a fly strain that expresses the Gal4 gene under the control of a tissue-specific enhancer, the gene will be expressed in a tissue-specific pattern.

[0089] In order to generate phenotypes that are easily visible in adult tissues and can thus be used in genetic screens, Gal4 “drivers” that drive expression in later stages of the fly development may be used in the present invention. Using these drivers, expression would result in possible defects in the wings, the eyes, the legs, different sensory organs and the brain. These “drivers” include, e.g., hsp-Gal4 (heat shock-inducible), apterous-Gal4 (wings), elav-Gal4 (CNS), sevenless-Gal4, eyeless-Gal4 (ey-Gal4) and pGMR-Gal4 (eyes). Descriptions of the Gal4 lines and notes about their specific expression patterns is available in Flybase (http://flybase.bio.indiana.edu).

[0090] Various DNA constructs may be used to generate the transgenic Drosophila melanogaster disclosed herein. For example, the construct may contain the Dp110^{D954A} sequence cloned into the pUAST vector [see Brand and Perrimon (1993), supra] which places the UAS sequence up-stream of the transcribed region. Insertion of these constructs into the fly genome may occur through P-element recombination, Hobo element recombination [see Blackman et al., EMBO J., Vol. 8, pp. 211-217 (1989)], homologous recombination [see Rong and Golic, Science, Vol. 288, pp. 2013-2018 (2000)] or other standard techniques known to one of skill in the art.

[0091] As discussed above, an ectopically-expressed gene may result in an altered phenotype by disruption of a particular biochemical pathway. Mutations in genes acting in the same biochemical pathway are expected to cause modification of the altered phenotype. Thus, e.g., a transgenic fly carrying both ey-Gal4 and UAS-Dp110^{D954A} can be used to identify genes acting in the ISP by crossing this transgenic fly with a fly containing a mutation in a known or predicted gene; and screening progeny of the crosses for flies that display quantitative or qualitative modification of the altered phenotype of the ey-Gal4/Dp110^{D954A} transgenic fly, as compared to controls. Thus, this system is extremely beneficial for the elucidation of the function of Dp110^{D954A} products, as well as the identification of other genes that directly or indirectly interact with them. Mutations that can be screened include, but are not limited to, loss-of-function alleles of known genes, deletion strains, “enhancer-trap” strains generated by the P-element and gain-of-function mutations generated by random insertions into the Drosophila genome of a Gal4-inducible construct that can activate the ectopic expression of genes in the vicinity of its insertion. It is contemplated herein that genes involved in the ISP (in both Drosophila and humans) can be identified in this manner and these genes can then serve as targets for the development of therapeutics to treat pathological conditions associated with dysregulation in the ISP.

[0092] Nucleic acid molecules of the human homologs of the target polypeptides identifed according to the methods of the present invention and disclosed herein may act as target gene antisense molecules, useful, e.g., in target gene regulation and/or as antisense primers in amplification reactions of target gene nucleic acid sequences. Further, such sequences may be used as part of ribozyme and/or triple-helix sequences or as targets for siRNA or double- or single-stranded RNA, which may be employed for gene regulation. Still further, such molecules may be used as components of diagnostic kits as disclosed herein.

[0093] In cases where the gene identified using the methods of the present invention is the normal, or wild-type, gene, this gene may be used to isolate mutant alleles of the gene. Such isolation is preferable in processes and disorders which are known or suspected to have a genetic basis. Mutant alleles may be isolated from individuals either known or suspected to have a genotype which contributes to disease symptoms related to pathological conditions associated with dysregulation of the ISP including, but not limited to, conditions, such as Type II diabetes or the Type A syndrome of insulin resistance. See Taylor and Ariogluo, J Basic Clin Physiol Pharmacol, Vol. 9, pp. 419-439 (1998). Mutant alleles and mutant allele products may then be utilized in the diagnostic assay systems described herein.

[0094] A cDNA of the mutant gene may be isolated, e.g., by using PCR, a technique which is well-known to those of skill in the art. In this case, the first cDNA strand may be synthesized by hybridizing an oligo-dT oligonucleotide to mRNA isolated from tissue known or suspected to be expressed in an individual putatively carrying the mutant allele, and by extending the new strand with RT. The second strand of the cDNA is then synthesized using an oligonucleotide that hybridizes specifically to the 5′ end of the normal gene. Using these two primers, the product is then amplified via PCR, cloned into a suitable vector and subjected to DNA sequence analysis through methods well-known to those of skill in the art. By comparing the DNA sequence of the mutant gene to that of the normal gene, the mutation(s) responsible for the loss or alteration of function of the mutant gene product can be ascertained.

[0095] Alternatively, a genomic or cDNA library can be constructed and screened using DNA or RNA, respectively, from a tissue known to or suspected of expressing the gene of interest in an individual suspected of or known to carry the mutant allele. The normal gene or any suitable fragment thereof may then be labeled and used as a probe to identify the corresponding mutant allele in the library. The clone containing this gene may then be purified through methods routinely practiced in the art, and subjected to sequence analysis as described above.

[0096] Additionally, an expression library can be constructed utilizing DNA isolated from or cDNA synthesized from a tissue known to or suspected of expressing the gene of interest in an individual suspected of or known to carry the mutant allele. In this manner, gene products made by the putatively mutant tissue may be expressed and screened using standard antibody screening techniques in conjunction with antibodies raised against the normal gene product, as described below. For screening techniques, see, e.g., Harlow and Lane, eds., Antibodies: A Laboratory Manual, Cold Spring Harbor Press, Cold Spring Harbor, N.Y. (1988). In cases where the mutation results in an expressed gene product with altered function, e.g., as a result of a missense mutation; a polyclonal set of antibodies are likely to cross-react with the mutant gene product. Library clones detected via their reaction with such labeled antibodies can be purified and subjected to sequence analysis as described above.

[0097] In another embodiment, nucleic acids comprising a sequence encoding a polypeptide set forth in Table 13 or 25 or functional derivatives thereof, may be administered to promote normal biological function, e.g., normal insulin mediated signal transduction, by way of gene therapy. Gene therapy refers to therapy performed by the administration of a nucleic acid to a subject. In this embodiment of the invention, the nucleic acid produces its encoded protein that mediates a therapeutic effect by promoting a normal ISP.

[0098] Any of the methods for gene therapy available in the art can be used according to the present invention. Exemplary methods are described below.

[0099] In a preferred aspect, the therapeutic comprises a nucleic acid for a Table 13 or 25 polypeptide that is part of an expression vector that expresses a Table 13 or 25 protein or fragment or chimeric protein thereof in a suitable host. In particular, such a nucleic acid has a promoter operably-linked to the Table 13 or 25 protein coding region, said promoter being inducible or constitutive, and, optionally, tissue-specific. In another particular embodiment, a nucleic acid molecule is used in which the Table 13 or 25 protein coding sequences and any other desired sequences are flanked by regions that promote homologous recombination at a desired site in the genome, thus providing for intrachromosomal expression of the Table 13 or 25 nucleic acid. See Koller and Smithies, Proc Natl Acad Sci USA, Vol. 86, pp. 8932-8935 (1989); and Zijlstra et al., Nature, Vol. 342, pp. 435-438 (1989).

[0100] Delivery of the nucleic acid into a patient may be either direct, in which case the patient is directly exposed to the nucleic acid or nucleic acid-carrying vector, or indirect, in which case, cells are first transformed with the nucleic acid in vitro, then transplanted into the patient. These two approaches are known, respectively, as in vivo or ex vivo gene therapy.

[0101] In a specific embodiment, the nucleic acid is directly administered in vivo, where it is expressed to produce the encoded product. This can be accomplished by any of numerous methods known in the art, e.g., by constructing it as part of an appropriate nucleic acid expression vector and administering it so that it becomes intracellular, e.g., by infection using a defective or attenuated retroviral or other viral vector (see, e.g., U.S. Pat. No. 4,980,286 and others mentioned infra), or by direct injection of naked DNA, or by use of microparticle bombardment, e.g., a gene gun; Biolistic, Dupont; or coating with lipids or cell-surface receptors or transfecting agents, encapsulation in liposomes, microparticles or microcapsules, or by administering it in linkage to a peptide which is known to enter the nucleus, by administering it in linkage to a ligand subject to receptor-mediated endocytosis (see e.g., U.S. Pat. Nos. 5,166,320; 5,728,399; 5,874,297; and 6,030,954, all of which are incorporated by reference herein in their entirety) which can be used to target cell types specifically expressing the receptors, etc. In another embodiment, a nucleic acid-ligand complex can be formed in which the ligand comprises a fusogenic viral peptide to disrupt endosomes, allowing the nucleic acid to avoid lysosomal degradation. In yet another embodiment, the nucleic acid can be targeted in vivo for cell-specific uptake and expression, by targeting a specific receptor. See, e.g., PCT Publications WO 92/06180, WO 92/22635, WO 92/20316, WO 93/14188 and WO 93/20221. Alternatively, the nucleic acid can be introduced intracellularly and incorporated within host cell DNA for expression, by homologous recombination. See, e.g., U.S. Pat. Nos. 5,413,923, 5,416,260 and 5,574,205; and Zijistra et al. (1989), supra.

[0102] In a specific embodiment, a viral vector that contains a nucleic acid encoding a Table 13 or 25 polypeptide is used. For example, a retroviral vector can be used. See, e.g., U.S. Pat. Nos. 5,219,740, 5,604,090 and 5,834,182. These retroviral vectors have been modified to delete retroviral sequences that are not necessary for packaging of the viral genome and integration into host cell DNA. The nucleic acid for the Table 13 or 25 polypeptide to be used in gene therapy is cloned into the vector, which facilitates delivery of the gene into a patient.

[0103] Adenoviruses are other viral vectors that can be used in gene therapy. Adenoviruses are especially attractive vehicles for delivering genes to respiratory epithelia. Adenoviruses naturally infect respiratory epithelia where they cause a mild disease. Other targets for adenovirus-based delivery systems are liver, the central nervous system, endothelial cells, and muscle. Adenoviruses have the advantage of being capable of infecting non-dividing cells. Methods for conducting adenovirus-based gene therapy are described in, e.g., U.S. Pat. Nos. 5,824,544, 5,868,040, 5,871,722, 5,880,102, 5,882,877, 5,885,808, 5,932,210, 5,981,225, 5,994,106, 5,994,132, 5,994,134, 6,001,557 and 6,033,8843, all of which are incorporated by reference herein in their entirety.

[0104] Adeno-associated virus (AAV) has also been proposed for use in gene therapy. Methods for producing and utilizing AAV are described, e.g., in U.S. Pat. Nos. 5,173,414, 5,252,479, 5,552,311, 5,658,785, 5,763,416, 5,773,289, 5,843,742, 5,869,040, 5,942,496 and 5,948,675, all of which are incorporated by reference herein in their entirety.

[0105] Another approach to gene therapy involves transferring a gene to cells in tissue culture by such methods as electroporation, lipofection, calcium phosphate mediated transfection or viral infection. Usually, the method of transfer includes the transfer of a selectable marker to the cells. The cells are then placed under selection to isolate those cells that have taken up and are expressing the transferred gene. Those cells are then delivered to a patient.

[0106] The resulting recombinant cells can be delivered to a patient by various methods known in the art. In a preferred embodiment, epithelial cells are injected, e.g., subcutaneously. In another embodiment, recombinant skin cells may be applied as a skin graft onto the patient. Recombinant blood cells, e.g., hematopoietic stem or progenitor cells, are preferably administered intravenously. The amount of cells envisioned for use depends on the desired effect, patient state, etc., and can be determined by one skilled in the art.

[0107] Cells into which a nucleic acid can be introduced for purposes of gene therapy encompass any desired, available cell type and include, but are not limited to, epithelial cells, endothelial cells, keratinocytes, fibroblasts, muscle cells, hepatocytes; blood cells, such as T lymphocytes, B lymphocytes, monocytes, macrophages, neutrophils, eosinophils, megakaryocytes and granulocytes; various stem or progenitor cells, in particular, hematopoietic stem or progenitor cells, e.g., as obtained from bone marrow, umbilical cord blood, peripheral blood, fetal liver, etc.

[0108] In a preferred embodiment, the cell used for gene therapy is autologous to the patient.

[0109] In an embodiment in which recombinant cells are used in gene therapy, the nucleic acid of a polypeptide set forth in Table 13 or 25 is introduced into the cells such that it is expressible by the cells or their progeny, and the recombinant cells are then administered in vivo for therapeutic effect. In a specific embodiment, stem or progenitor cells are used. Any stem cells and/or progenitor cells that can be isolated and maintained in vitro can potentially be used in accordance with this embodiment of the present invention. Such stem cells include, but are not limited to, hematopoietic stem cells (HSC), stem cells of epithelial tissues, such as the skin and the lining of the gut, embryonic heart muscle cells, liver stem cells (see, e.g., WO 94/08598) and neural stem cells. See Stemple and Anderson, Cell, Vol. 71, pp. 973-985 (1992).

[0110] Epithelial stem cells (ESCs) or keratinocytes can be obtained from tissues, such as the skin and the lining of the gut by known procedures. See Rheinwald, Meth Cell Biol, Vol. 21A, p. 229 (1980). In stratified epithelial tissue, such as the skin, renewal occurs by mitosis of stem cells within the germinal layer, the layer closest to the basal lamina. Stem cells within the lining of the gut provide for a rapid renewal rate of this tissue. ESCs or keratinocytes obtained from the skin or lining of the gut of a patient or donor can be grown in tissue culture. See Pittelkow and Scott, Mayo Clinic Proc, Vol. 61, p. 771 (1986). If the ESCs are provided by a donor, a method for suppression of host versus graft reactivity, e.g., irradiation, drug or antibody administration to promote moderate immunosuppression, can also be used.

[0111] With respect to HSCs, any technique which provides for the isolation, propagation, and maintenance in vitro of HSCs can be used in this embodiment of the invention. Techniques by which this may be accomplished include:
[0112] (a) the isolation and establishment of HSC cultures from bone marrow cells isolated from the future host or a donor; or
[0113] (b) the use of previously established long-term HSC cultures, which may be allogeneic or xenogeneic.

[0114] Non-autologous HSC are used preferably in conjunction with a method of suppressing transplantation immune reactions of the future host/patient. In a particular embodiment of the present invention, human bone marrow cells can be obtained from the posterior iliac crest by needle aspiration. See, e.g., Kodo et al., J Clin Invest, Vol. 73, pp. 1377-1384 (1984). In a preferred embodiment of the present invention, the HSCs can be made highly enriched or in substantially pure form. This enrichment can be accomplished before, during, or after long-term culturing, and can be done by any techniques known in the art. Long-term cultures of bone marrow cells can be established and maintained by using, e.g., modified Dexter cell culture techniques [see Dexter et al., J. Cell Physiol., Vol. 91, p. 335 (1977)] or Witlock-Witte culture techniques. See Witlock and Witte, Proc Natl Acad Sci USA, Vol. 79, pp. 3608-3612 (1982).

[0115] In a specific embodiment, the nucleic acid to be introduced for purposes of gene therapy comprises an inducible promoter operably linked to the coding region, such that expression of the nucleic acid is controllable by controlling the presence or absence of the appropriate inducer of transcription.

[0116] A further embodiment of the present invention relates to a method to treat, prevent or ameliorate a pathological condition associated with dysregulation of the ISP that comprises adminstering to a subject in need thereof an effective amount of a modulator of a protein selected from the group consisting of those disclosed in Table 13 or 25. In one embodiment, the modulator comprises one or more antibodies to said protein or fragments thereof, wherein said antibodies or fragments thereof can inhibit the biochemical function of said protein in said subject.

[0117] In another embodiment, the modulator comprises a peptide mimetic of a protein disclosed in Table 13 or 25. Suitable peptide mimetics to Table 13 or 25 proteins can be made according to conventional methods based on an understanding of the regions in a polypeptide required for protein activity. Briefly, a short amino acid sequence is identified in a protein by conventional structure function studies, such as deletion or mutation analysis of the wild-type protein. Once critical regions are identified, it is anticipated that if they correspond to a highly conserved portion of the protein that this region will be responsible for a critical function, such as protein-protein interaction. A small synthetic mimetic that is designed to look like said critical region would be predicted to compete with the intact protein and thus interfere with its function. The synthetic amino acid sequence could be composed of amino acids matching this region in whole or in part. Such amino acids could be replaced with other chemical structures resembling the original amino acids but imparting pharmacologically better properties, such as higher inhibitory activity, stability, half-life or bioavailability.

[0118] Also described herein are methods for the production of antibodies capable of specifically recognizing one or more differentially-expressed gene epitopes. Such antibodies may include, but are not limited to, polyclonal antibodies, monoclonal antibodies (mAbs), humanized or chimeric antibodies, single-chain antibodies, Fab fragments, F(ab′)₂ fragments, fragments produced by a Fab expression library, anti-idiotypic (anti-id) antibodies and epitope-binding fragments of any of the above. Such antibodies may be used, e.g., in the detection of a target protein in a biological sample, or alternatively, as a method for the inhibition of the biochemical function of the protein. Thus, such antibodies may be utilized as part of disease treatment methods, and/or may be used as part of diagnostic techniques whereby patients may be tested, e.g., for abnormal levels of polypeptides set forth in Table 13 or 25, or for the presence of abnormal forms of these polypeptides.

[0119] For the production of antibodies to the Table 13 or 25 polypeptides, various host animals may be immunized by injection with these polypeptides, or a portion thereof. Such host animals may include, but are not limited to, rabbits, mice, goats, chickens and rats, to name but a few. Various adjuvants may be used to increase the immunological response, depending on the host species including, but not limited to, Freund's (complete and incomplete); mineral gels, such as aluminum hydroxide; surface active substances, such as lysolecithin; pluronic polyols; polyanions; peptides; oil emulsions; keyhole limpet hemocyanin; dinitrophenol; and potentially useful human adjuvants, such as Bacille Calmette-Guerin (BCG) and Corynebacterium parvum.

[0120] Polyclonal antibodies are heterogeneous populations of antibody molecules derived from the sera of animals immunized with an antigen, such as target gene product, or an antigenic functional derivative thereof. For the production of polyclonal antibodies, host animals, such as those described above, may be immunized by injection with a Table 13 or 25 polypeptide, or a portion thereof, supplemented with adjuvants as also described above.

[0121] Monoclonal antibodies, which are homogeneous populations of antibodies to a particular antigen, may be obtained by any technique that provides for the production of antibody molecules by continuous cell lines in culture. These include, but are not limited to, the hybridoma technique [see Kohler and Milstein, Nature, Vol. 256, pp. 495-497 (1975); and U.S. Pat. No. 4,376,110], the human B-cell hybridoma technique [Kosbor et al., Immunol Today, Vol. 4, p. 72 (1983); and Cole et al., Proc Natl Acad Sci USA, Vol. 80, pp. 2026-2030 (1983)], and the EBV-hybridoma technique. See Cole et al., Monoclonal Antibodies and Cancer Therapy, Alan R. Liss, Inc., pp. 77-96 (1985). Such antibodies may be of any immunoglobulin class including IgG, IgM, IgE, IgA, IgD and any subclass thereof. The hybridoma producing the mAb of this invention may be cultivated in vitro or in vivo. Production of high titers of mAbs in vivo makes this the presently preferred method of production.

[0122] In addition, techniques developed for the production of “chimeric antibodies”[see Morrison et al., Proc. Natl. Acad. Sci. USA, Vol. 81, pp. 6851-6855 (1984); Neuberger et al., Nature, Vol. 312, pp. 604-608 (1984); Takeda et al., Nature, Vol. 314, pp. 452-454 (1985)] by splicing the genes from a mouse antibody molecule of appropriate antigen specificity together with genes from a human antibody molecule of appropriate biological activity can be used. A chimeric antibody is a molecule in which different portions are derived from different animal species, such as those having a variable or hypervariable region derived from a murine mAb and a human immunoglobulin constant region.

[0123] Alternatively, techniques described for the production of single-chain antibodies [see U.S. Pat. No. 4,946,778; Bird, Science, Vol. 242, pp. 423-426 (1988); Huston et al., 1988, Proc Natl Acad Sci USA, Vol. 85, pp. 5879-5883 (1988); and Ward et al., Nature, Vol. 334, pp. 544-546 (1989)] can be adapted to produce differentially-expressed gene single-chain antibodies. Single-chain antibodies are formed by linking the heavy- and light-chain fragments of the Fv region via an amino acid bridge, resulting in a single-chain polypeptide.

[0124] Most preferably, techniques useful for the production of “humanized antibodies” can be adapted to produce antibodies to the polypeptides, fragments, derivatives and functional equivalents disclosed herein. Such techniques are disclosed in U.S. Pat. Nos. 5,932,448, 5,693,762, 5,693,761, 5,585,089, 5,530,101, 5,910,771, 5,569,825, 5,625,126, 5,633,425, 5,789,650, 5,545,580, 5,661,016 and 5,770,429, the disclosures of all of which are incorporated by reference herein in their entirety.

[0125] Antibody fragments that recognize specific epitopes may be generated by known techniques. For example, such fragments include, but are not limited to, the F(ab′)₂ fragments which can be produced by pepsin digestion of the antibody molecule and the Fab fragments which can be generated by reducing the disulfide bridges of the F(ab′)₂ fragments. Alternatively, Fab expression libraries may be constructed [see Huse et al., Science, Vol. 246, pp. 1275-1281 (1989)] to allow rapid and easy identification of monoclonal Fab fragments with the desired specificity.

[0126] As contemplated herein, an antibody of the present invention can be preferably used in a diagnostic kit for detecting levels of a protein disclosed in Table 13 or 25 in a biological sample, as well as in a method to diagnose subjects suffering from pathological conditions associated with dysregulation of the ISP who may be suitable candidates for treatment with modulators to a protein selected from the group consisting of those disclosed in Table 13 or 25. Preferably, said detecting step comprises contacting said appropriate tissue cell, e.g., biological sample, with an antibody which specifically binds to a Table 13 or 25 polypeptide or a fragment thereof and detecting specific binding of said antibody with a polypeptide in said appropriate tissue, cell or sample wherein detection of specific binding to a polypeptide indicates the presence of a polypeptide set forth in Table 13 or 25 or a fragment thereof.

[0127] Particularly preferred, for ease of detection, is the sandwich assay, of which a number of variations exist, all of which are intended to be encompassed by the present invention. For example, in a typical forward assay, unlabeled antibody is immobilized on a solid substrate and the sample to be tested brought into contact with the bound molecule. After a suitable period of incubation, for a period of time sufficient to allow formation of an antibody-antigen binary complex. At this point, a second antibody, labeled with a reporter molecule capable of inducing a detectable signal, is then added and incubated, allowing time sufficient for the formation of a ternary complex of antibody-antigen-labeled antibody. Any unreacted material is washed away, and the presence of the antigen is determined by observation of a signal, or may be quantitated by comparing with a control sample containing known amounts of antigen. Variations on the forward assay include the simultaneous assay, in which both sample and antibody are added simultaneously to the bound antibody, or a reverse assay in which the labeled antibody and sample to be tested are first combined, incubated and added to the unlabeled surface bound antibody. These techniques are well known to those skilled in the art, and the possibility of minor variations will be readily apparent. As used herein, “sandwich assay” is intended to encompass all variations on the basic two-site technique. For the immunoassays of the present invention, the only limiting factor is that the labeled antibody be an antibody which is specific for a Table 13 or 25 polypeptide or a fragment thereof.

[0128] The most commonly used reporter molecules in this type of assay are either enzymes, fluorophore- or radionuclide-containing molecules. In the case of an enzyme immunoassay, an enzyme is conjugated to the second antibody, usually by means of glutaraldehyde or periodate. As will be readily recognized, however, a wide variety of different ligation techniques exist, which are well-known to the skilled artisan. Commonly used enzymes include horseradish peroxidase, glucose oxidase, beta (β)-galactosidase and alkaline phosphatase, among others. The substrates to be used with the specific enzymes are generally chosen for the production, upon hydrolysis by the corresponding enzyme, of a detectable color change. For example, p-nitrophenyl phosphate is suitable for use with alkaline phosphatase conjugates; for peroxidase conjugates, 1,2-phenylenediamine or toluidine are commonly used. It is also possible to employ fluorogenic substrates, which yield a fluorescent product rather than the chromogenic substrates noted above. A solution containing the appropriate substrate is then added to the tertiary complex. The substrate reacts with the enzyme linked to the second antibody, giving a qualitative visual signal, which may be further quantitated, usually spectrophotometrically, to give an evaluation of the amount of Table 13 or 25 polypeptide which is present in the serum sample.

[0129] Alternately, fluorescent compounds, such as fluorescein and rhodamine, may be chemically coupled to antibodies without altering their binding capacity. When activated by illumination with light of a particular wavelength, the fluorochrome-labeled antibody absorbs the light energy, inducing a state of excitability in the molecule, followed by emission of the light at a characteristic longer wavelength. The emission appears as a characteristic color visually detectable with a light microscope. Immunofluorescence and EIA techniques are both very well-established in the art and are particularly preferred for the present method. However, other reporter molecules, such as radioisotopes, chemiluminescent or bioluminescent molecules may also be employed. It will be readily apparent to the skilled artisan how to vary the procedure to suit the required use.

[0130] The pharmaceutical compositions of the present invention may also comprise substances that inhibit the expression of a protein disclosed in Table 13 or 25 at the nucleic acid level. Such molecules include ribozymes, antisense oligonucleotides, triple-helix DNA, RNA aptamers, siRNA and/or single- or double-stranded RNA directed to ad appropriate nucleotide sequence of nucleic acid encoding such a protein. These inhibitory molecules may be created using conventional techniques by one of skill in the art without undue burden or experimentation. For example, modifications, e.g., inhibition, of gene expression can be obtained by designing antisense molecules, DNA or RNA, to the control regions of the genes encoding the polypeptides discussed herein, i.e., to promoters, enhancers and introns. For example, oligonucleotides derived from the transcription initiation site, e.g., between positions −10 and +10 from the start site may be used. Notwithstanding, all regions of the gene may be used to design an antisense molecule in order to create those which gives strongest hybridization to the mRNA and such suitable antisense oligonucleotides may be produced and identified by standard assay procedures familiar to one of skill in the art.

[0131] Similarly, inhibition of gene expression may be achieved using “triple-helix” base-pairing methodology. Triple-helix pairing is useful because it causes inhibition of the ability of the double helix to open sufficiently for the binding of polymerases, transcription factors or regulatory molecules. Recent therapeutic advances using triplex DNA have been described in the literature. See Gee et al., Huber and Carr, eds., Molecular and Immunologic Approaches, Futura Publishing Co., Mt. Kisco, N.Y. (1994). These molecules may also be designed to block translation of mRNA by preventing the transcript from binding to ribosomes.

[0132] Ribozymes, enzymatic RNA molecules, may also be used to inhibit gene expression by catalyzing the specific cleavage of RNA. The mechanism of ribozyme action involves sequence-specific hybridization of the ribozyme molecule to complementary target RNA, followed by endonucleolytic cleavage. Examples which may be used include engineered “hammerhead” or “hairpin” motif ribozyme molecules that can be designed to specifically and efficiently catalyze endonucleolytic cleavage of gene sequences. Specific ribozyme cleavage sites within any potential RNA target are initially identified by scanning the target molecule for ribozyme cleavage sites which include the following sequences: GUA, GUU and GUC. Once identified, short RNA sequences of between 15 and 20 ribonucleotides corresponding to the region of the target gene containing the cleavage site may be evaluated for secondary structural features which may render the oligonucleotide inoperable. The suitability of candidate targets may also be evaluated by testing accessibility to hybridization with complementary oligonucleotides using ribonuclease protection assays.

[0133] Ribozyme methods include exposing a cell to ribozymes or inducing expression in a cell of such small RNA ribozyme molecules. See Grassi and Marini, Ann Med, Vol. 28, pp. 499-510 (1996); and Gibson, Cancer Metast Rev, Vol. 15, pp. 287-299 (1996). Intracellular expression of hammerhead and hairpin ribozymes targeted to mRNA corresponding to at least one of the genes discussed herein can be utilized to inhibit protein encoded by the gene.

[0134] Ribozymes can either be delivered directly to cells, in the form of RNA oligonucleotides incorporating ribozyme sequences, or introduced into the cell as an expression vector encoding the desired ribozymal RNA. Ribozymes can be routinely expressed in vivo in sufficient number to be catalytically effective in cleaving mRNA, and thereby modifying mRNA abundance in a cell. See Cotten et al., EMBO J, Vol. 8, pp. 3861-3866 (1989). In particular, a ribozyme coding DNA sequence, designed according to conventional, well-known rules and synthesized, e.g., by standard phosphoramidite chemistry, can be ligated into a restriction enzyme site in the anticodon stem and loop of a gene encoding a tRNA, which can then be transformed into and expressed in a cell of interest by methods routine in the art. Preferably, an inducible promoter, e.g., a glucocorticoid or a tetracycline response element, is also introduced into this construct so that ribozyme expression can be selectively controlled. For saturating use, a highly and constituently active promoter can be used. tDNA genes, i.e., genes encoding tRNAs, are useful in this application because of their small size, high rate of transcription and ubiquitous expression in different kinds of tissues.

[0135] Therefore, ribozymes can be routinely designed to cleave virtually any mRNA sequence, and a cell can be routinely transformed with DNA coding for such ribozyme sequences such that a controllable and catalytically effective amount of the ribozyme is expressed. Accordingly, the abundance of virtually any RNA species in a cell can be modified or perturbed.

[0136] Ribozyme sequences can be modified in essentially the same manner as described for antisense nucleotides, e.g., the ribozyme sequence can comprise a modified base moiety.

[0137] RNA aptamers can also be introduced into or expressed in a cell to modify RNA abundance or activity. RNA aptamers are specific RNA ligands for proteins, such as for Tat and Rev RNA [see Good et al., Gene Ther, Vol. 4, pp. 45-54 (1997)] that can specifically inhibit their translation.

[0138] Gene specific inhibition of gene expression may also be achieved using conventional single- or double-stranded RNA technologies. A description of such technology may be found in WO 99/32619 which is hereby incorporated by reference in its entirety. In addition, siRNA technology has also proven useful as a means to inhibit gene expression. See Cullen, Br Nat Immunol, Vol. 3, No. 7, pp. 597-599 (2002); and Martinez et al., Cell, Vol. 110, No. 5, p. 563 (2002).

[0139] Antisense molecules, triple-helix DNA, RNA aptamers, dsRNA, ssRNA, siRNA and ribozymes of the present invention may be prepared by any method known in the art for the synthesis of nucleic acid molecules. These include techniques for chemically synthesizing oligonucleotides such as solid phase phosphoramidite chemical synthesis. Alternatively, RNA molecules may be generated by in vitro and in vivo transcription of DNA sequences encoding the genes of the polypeptides discussed herein. Such DNA sequences may be incorporated into a wide variety of vectors with suitable RNA polymerase promoters, such as T7 or SP6. Alternatively, cDNA constructs that synthesize antisense RNA constitutively or inducibly can be introduced into cell lines, cells or tissues.

[0140] Vectors may be introduced into cells or tissues by many available means, and may be used in vivo, in vitro or ex vivo. For ex vivo therapy, vectors may be introduced into stem cells taken from the patient and clonally propagated for autologous transplant back into that same patient. Delivery by transfection and by liposome injections may be achieved using methods that are well-known in the art.

[0141] Detection of mRNA levels of proteins disclosed herein may comprise contacting a biological sample or even contacting an isolated RNA or DNA molecule derived from a biological sample with an isolated nucleotide sequence of at least about 20 nucleotides in length that hybridizes under high-stringency conditions, e.g., 0.1×SSPE or SSC, 0.1% SDS, 65° C.) with the isolated nucleotide sequence encoding a polypeptide set forth in Table 13 or 25. Hybridization conditions may be highly-stringent or less-highly stringent. In instances wherein the nucleic acid molecules are deoxyoligonucleotides (“oligos”), highly-stringent conditions may refer, e.g., to washing in 6×SSC/0.05% sodium pyrophosphate at 37° C. (for 14-base oligos), 48° C. (for 17-base oligos), 55° C. (for 20-base oligos), and 60° C. (for 23-base oligos). Suitable ranges of such stringency conditions for nucleic acids of varying compositions are described in Krause and Aaronson, Methods Enzymol, Vol. 200, pp. 546-556 (1991), in addition to Maniatis et al., cited above.

[0142] In some cases, detection of a mutated form of the gene which is associated with a dysfunction will provide a diagnostic tool that can add to, or define, a diagnosis of a disease, or susceptibility to a disease, which results from under-expression, over-expression or altered spatial or temporal expression of the gene. Individuals carrying mutations in the gene may be detected at the DNA level by a variety of techniques.

[0143] Nucleic acids, in particular mRNA, for diagnosis may be obtained from a subject's cells, such as from blood, urine, saliva, tissue biopsy or autopsy material. The genomic DNA may be used directly for detection or may be amplified enzymatically by using PCR or other amplification techniques prior to analysis. RNA or cDNA may also be used in similar fashion. Deletions and insertions can be detected by a change in size of the amplified product in comparison to the normal genotype. Point mutations can be identified by hybridizing amplified DNA to labeled nucleotide sequences encoding a polypeptide encoded by a gene disclosed in Table 13 or 25. Perfectly matched sequences can be distinguished from mismatched duplexes by RNase digestion or by differences in melting temperatures. DNA sequence differences may also be detected by alterations in electrophoretic mobility of DNA fragments in gels, with or without denaturing agents, or by direct DNA sequencing. See, e.g., Myers et al., Science, Vol. 230, p. 1242 (1985). Sequence changes at specific locations may also be revealed by nuclease protection assays, such as RNase and S1 protection or the chemical cleavage method. See Cotton et al., Proc Natl Acad Sci USA, Vol. 85, pp. 4397-4401 (1985). In addition, an array of oligonucleotides probes comprising nucleotide sequence encoding the Table 13 or 25 polypeptides or fragments of such nucleotide sequences can be constructed to conduct efficient screening of, e.g., genetic mutations. Array technology methods are well-known and have general applicability and can be used to address a variety of questions in molecular genetics including gene expression, genetic linkage and genetic variability. See, e.g., Chee et al., Science, Vol. 274, pp. 610-613 (1996).

[0144] The diagnostic assays offer a process for diagnosing or determining a susceptibility to disease through detection of mutation in the gene of a polypeptide set forth in Table 13 or 25 by the methods described. In addition, such diseases may be diagnosed by methods comprising determining from a sample derived from a subject an abnormally decreased or increased level of polypeptide or mRNA. Decreased or increased expression can be measured at the RNA level using any of the methods well-known in the art for the quantitation of polynucleotides, such as, e.g., nucleic acid amplification, for instance, PCR, RT-PCR, RNase protection, Northern blotting and other hybridization methods. Assay techniques that can be used to determine levels of a protein, such as a polypeptide of the present invention, in a sample derived from a host are well-known to those of skill in the art. Such assay methods include radioimmunoassays, competitive-binding assays, Western Blot analysis and ELISA assays.

[0145] Thus in another aspect, the present invention relates to a diagnostic kit for detecting mRNA levels (or protein levels) which comprises:
[0146] (a) a polynucleotide of a polypeptide set forth in Table 13 or 25 or a fragment thereof;
[0147] (b) a nucleotide sequence complementary to that of (a);
[0148] (c) a polypeptide of Table 13 or 25 of the present invention encoded by the polynucleotide of (a),
[0149] (d) an antibody to the polypeptide of (c);
[0150] (e) an RNAi sequence complementary to that of (a); and
[0151] (f) a peptide mimetic to a Table 13 or 25 protein.

[0152] It will be appreciated that in any such kit, (a), (b), (c), (d), (e) or (f) may comprise a substantial component. Such a kit will be of use in diagnosing a disease or susceptibility to a disease, particularly to a disease or condition associated with dysregulation of the ISP, e.g., Type II diabetes or the Type A syndrome of insulin resistance.

[0153] The nucleotide sequences of the present invention are also valuable for chromosome localization. The sequence is specifically targeted to, and can hybridize with, a particular location on an individual human chromosome. The mapping of relevant sequences to chromosomes is an important first step in correlating those sequences with gene associated disease. Once a sequence has been mapped to a precise chromosomal location, the physical position of the sequence on the chromosome can be correlated with genetic map data. Such data are found in, e.g., McKusick, Mendelian Inheritance in Man (available on-line through Johns Hopkins University Welch Medical Library). The relationship between genes and diseases that have been mapped to the same chromosomal region are then identified through linkage analysis (coinheritance of physically adjacent genes).

[0154] The differences in the cDNA or genomic sequence between affected and unaffected individuals can also be determined. If a mutation is observed in some or all of the affected individuals but not in any normal individuals, then the mutation is likely to be the causative agent of the disease.

[0155] An additional embodiment of the invention relates to the administration of a pharmaceutical composition, in conjunction with a pharmaceutically acceptable carrier, excipient or diluent, for any of the therapeutic effects discussed above. Such pharmaceutical compositions may comprise, for example, a polypeptide set forth in Table 13 or 25, antibodies to that polypeptide, mimetics, agonists, antagonists, inhibitors or other modulators of function of a Table 13 or 25 polypeptide or gene therefore. The compositions may be administered alone or in combination with at least one other agent, such as stabilizing compound, which may be administered in any sterile, biocompatible pharmaceutical carrier, including, but not limited to, saline, buffered saline, dextrose and water. The compositions may be administered to a patient alone, or in combination with other agents, drugs or hormones.

[0156] In addition, any of the therapeutic proteins, antagonists, antibodies, agonists, antisense sequences or other modulators described above may be administered in combination with other appropriate therapeutic agents. Selection of the appropriate agents for use in combination therapy may be made by one of ordinary skill in the art, according to conventional pharmaceutical principles. The combination of therapeutic agents may act synergistically to effect the treatment, prevention or amelioration of pathological conditions associated with abnormalities in the ISP. Using this approach, one may be able to achieve therapeutic efficacy with lower dosages of each agent, thus reducing the potential for adverse side effects. Antagonists, agonists and other modulators of the human polypeptides set forth in Table 13 or 25, and genes encoding said polypeptides may be made using methods which are generally known in the art.

[0157] The pharmaceutical compositions encompassed by the invention may be administered by any number of routes including, but not limited to, oral, intravenous, intramuscular, intraarticular, intraarterial, intramedullary, intrathecal, intraventricular, transdermal, subcutaneous, intraperitoneal, intranasal, enteral, topical, sublingual or rectal means.

[0158] In addition to the active ingredients, these pharmaceutical compositions may contain suitable pharmaceutically-acceptable carriers comprising excipients and auxiliaries which facilitate processing of the active compounds into preparations which can be used pharmaceutically. Further details on techniques for formulation and administration may be found in the latest edition of Remington's Pharmaceutical Sciences (Maack Publishing Co., Easton, Pa.).

[0159] Pharmaceutical compositions for oral administration can be formulated using pharmaceutically acceptable carriers well known in the art in dosages suitable for oral administration. Such carriers enable the pharmaceutical compositions to be formulated as tablets, pills, dragees, capsules, liquids, gels, syrups, slurries, suspensions and the like, for ingestion by the patient.

[0160] Pharmaceutical preparations for oral use can be obtained through combination of active compounds with solid excipient, optionally grinding a resulting mixture, and processing the mixture of granules, after adding suitable auxiliaries, if desired, to obtain tablets or dragee cores. Suitable excipients are carbohydrate or protein fillers, such as sugars, including lactose, sucrose, mannitol or sorbitol; starch from corn, wheat, rice, potato or other plants; cellulose, such as methyl cellulose, hydroxypropylmethyl-cellulose, or sodium carboxymethylcellulose; gums including arabic and tragacanth; and proteins, such as gelatin and collagen. If desired, disintegrating or solubilizing agents may be added, such as the cross-linked polyvinyl pyrrolidone, agar, alginic acid or a salt thereof, such as sodium alginate.

[0161] Dragee cores may be used in conjunction with suitable coatings, such as concentrated sugar solutions, which may also contain gum arabic, talc, polyvinylpyrrolidone, carbopol gel, polyethylene glycol, and/or titanium dioxide, lacquer solutions and suitable organic solvents or solvent mixtures. Dyestuffs or pigments may be added to the tablets or dragee coatings for product identification or to characterize the quantity of active compound, i.e., dosage.

[0162] Pharmaceutical preparations that can be used orally include push-fit capsules made of gelatin, as well as soft, sealed capsules made of gelatin and a coating, such as glycerol or sorbitol. Push-fit capsules can contain active ingredients mixed with a filler or binders, such as lactose or starches, lubricants, such as talc or magnesium stearate, and, optionally, stabilizers. In soft capsules, the active compounds may be dissolved or suspended in suitable liquids, such as fatty oils, liquid or liquid polyethylene glycol with or without stabilizers.

[0163] Pharmaceutical formulations suitable for parenteral administration may be formulated in aqueous solutions, preferably in physiologically compatible buffers, such as Hanks' solution, Ringer's solution or physiologically buffered saline. Aqueous injection suspensions may contain substances that increase the viscosity of the suspension, such as sodium carboxymethyl cellulose, sorbitol or dextran. Additionally, suspensions of the active compounds may be prepared as appropriate oily injection suspensions. Suitable lipophilic solvents or vehicles include fatty oils, such as sesame oil; or synthetic fatty acid esters, such as ethyl oleate or triglycerides or liposomes. Non-lipid polycationic amino polymers may also be used for delivery. Optionally, the suspension may also contain suitable stabilizers or agents which increase the solubility of the compounds to allow for the preparation of highly-concentrated solutions.

[0164] For topical or nasal administration, penetrants appropriate to the particular barrier to be permeated are used in the formulation. Such penetrants are generally known in the art.

[0165] The pharmaceutical compositions of the present invention may be manufactured in a manner that is known in the art, e.g., by means of conventional mixing, dissolving, granulating, dragee-making, levigating, emulsifying, encapsulating, entrapping or lyophilizing processes.

[0166] The pharmaceutical composition may be provided as a salt and can be formed with many acids including, but not limited to, hydrochloric, sulfuric, acetic, lactic, tartaric, malic, succinic, etc. Salts tend to be more soluble in aqueous or other protonic solvents than are the corresponding free base forms. In other cases, the preferred preparation may be a lyophilized powder that may contain any or all of the following: 1-50 mM histidine, 0.1-2% sucrose, and 2-7% mannitol, at a pH range of 4.5-5.5, that is combined with buffer prior to use.

[0167] After pharmaceutical compositions have been prepared, they can be placed in an appropriate container and labeled for treatment of an indicated condition. Such labeling would include amount, frequency and method of administration.

[0168] Pharmaceutical compositions suitable for use in the invention include compositions wherein the active ingredients are contained in an effective amount to achieve the intended purpose. The determination of an effective dose is well within the capability of those skilled in the art.

[0169] For any compound, the therapeutically effective dose can be estimated initially either in cell culture assays, e.g., of neoplastic cells, or in animal models, usually mice, rabbits, dogs or pigs. The animal model may also be used to determine the appropriate concentration range and route of administration. Such information can then be used to determine useful doses and routes for administration in humans.

[0170] A therapeutically-effective dose refers to that amount of active ingredient which ameliorates the symptoms or condition. Therapeutic efficacy and toxicity may be determined by standard pharmaceutical procedures in cell cultures or experimental animals, e.g., the dose therapeutically effective in 50% of the population (ED₅₀) and the dose lethal to 50% of the population (LD₅₀). The dose ratio between toxic and therapeutic effects is the therapeutic index, and it can be expressed as the ratio, LD₅₀/ED₅₀. Pharmaceutical compositions which exhibit large therapeutic indices are preferred. The data obtained from cell culture assays and animal studies is used in formulating a range of dosage for human use. The dosage contained in such compositions is preferably within a range of circulating concentrations that include the ED₅₀ with little or no toxicity. The dosage varies within this range depending upon the dosage form employed, sensitivity of the patient and the route of administration.

[0171] The exact dosage will be determined by the practitioner, in light of factors related to the subject that requires treatment. Dosage and administration are adjusted to provide sufficient levels of the active moiety or to maintain the desired effect. Factors that may be taken into account include the severity of the disease state, general health of the subject, age, weight, and gender of the subject, diet, time and frequency of administration, drug combination(s), reaction sensitivities and tolerance/response to therapy. Long-acting pharmaceutical compositions may be administered every 3-4 days, every week or once every two weeks depending on half-life and clearance rate of the particular formulation.

[0172] Normal dosage amounts may vary from 0.1-100,000 mg, up to a total dose of about 1 g, depending upon the route of administration. Guidance as to particular dosages and methods of delivery is provided in the literature and generally available to practitioners in the art. Those skilled in the art will employ different formulations for nucleotides than for proteins or their inhibitors. Similarly, delivery of polynucleotides or polypeptides will be specific to particular cells, conditions, locations, etc. Pharmaceutical formulations suitable for oral administration of proteins are described, e.g., in U.S. Pat. Nos. 5,008,114, 5,505,962, 5,641,515, 5,681,811, 5,700,486, 5,766,633, 5,792,451, 5,853,748, 5,972,387, 5,976,569 and 6,051,561.

[0173] The following Examples illustrate the present invention, without in any way limiting the scope thereof.

### EXAMPLES

[0174] The following methods are employed to perform the examples provided below:

Drosophila Genetics

[0175] Flies are kept on standard corn meal food. All crosses are done at 25° C. The genetic background for all the flies used is w1118. UAS-Dp110^{D954A} and UAS-Dp110^{CAAX} are used to overexpress a dominant negative form and a constitutively active form of the fly PI3K catalytic subunit, respectively. See Leevers et al. (1996), supra. UAS-dPTEN is used to over-express fly PTEN. See Huang et al., Development, Vol. 126, pp. 5365-5372 (1999). UAS-dAkt1 is used to over-express fly Akt. See Verdu et al., Nat. Cell Biol., Vol. 1, pp. 500-506 (1999). UAS-dfoxo is generated using a cDNA of the gene CG3143 (see Li, unpublished data) and used to overexpress fly Foxo, a putative forkhead-domain transcription factor and a homolg of human Foxo family transcription factor.

Transgene Expression and Total RNA Isolation

[0176] Based on the GAL4/UAS system [see Brand and Perrimon, Development, Vol. 118, pp. 401-415 (1993)] hsp-Gal4 is used to induce the overexpression of the UAS-transgenes (UAS-Dp110^{D954A}, UAS-Dp110^{CAAX}, UAS-dPTEN, UAS-dAkt1 and UAS-dfoxo). The genetic crosses are shown in FIG. 1.

[0177] Heat shock-dependent induction is done only in adult male flies to avoid sampling RNA from ovaries. For dAkt1, dPTEN and Dp110^{D954A} overexpression experiments, the genetic cross (see FIGS. 1A, 1B and 1C) generate male progenies of 4 genotypes: flies carrying both hsp-Gal4 and UAS-transgene (hsp-Gal4/UAS), flies carrying only hsp-Gal4 (hsp-Gal4), flies carrying only UAS-transgene (UAS), and flies carrying neither hsp-Gal4 nor UAS-transgene (CyO). For Dp110CAAX and dfoxo overexpression experiments (see FIGS. 1D and 1E for genetic crosses), external control groups of genotypes hsp-Gal4/+ and +/CyO are used. In each of the 5 overexpression experiments, levels of 3 factors are involved: +/− heat shock, +/− hsp-Gal4 and +/− UAS-transgene. Thus, there are 8 combinations of genotype and treatment. For each combination, 4 independent total RNA samples, each from ˜50 7- to 10-day-old adult male files, are made. This resulted in 32 RNA samples per experiment. Non-heat-shock treated flies are kept at 25° C. The heat-shock treated flies are kept at 37° C. for 1 hour, followed by a recovery period of 3 hours at 25° C. This scheme is repeated 6 times before RNA isolation. The total RNA is extracted using Trizol reagent (GIBCO/BRL) and then further purified using RNeasy columns (Qiagen) following the RNA cleanup protocol.

Microarray Experiments

[0178] Microarray experiments are performed using Affymetrix (Santa Clara, Calif.) Drosophila GeneChip™ and following the methods described in the Affymetrix GeneChip™ Expression Technical Manual. Briefly, 10 μg of total RNA per sample is used to synthesize double-stranded cDNA. The cDNA is then transcribed in vitro to form biotin-labeled cRNA using Enzo BioArray® High Yield RNA transcript labeling kit (Enzo Biochem). Fifteen (15) μg of fragmented cRNA is hybridized to each array. Hybridization, washing, staining and scanning of the target cRNA to the arrays are performed as per the Affymetrix GeneChip™ manual. For each overexpression experiment, 32 arrays are used with one array for one RNA sample.

Data Analysis

[0179] The GeneChip™ Drosophila genome array used in this study contains 13,966 gene sequences predicted from the annotation of the Drosophila genome Release 1.0. See Adams, et al., Science, Vol. 287, pp. 2185-2195 (2000).

[0180] Each sequence is represented on the array by a set of 14 pairs of perfect match (PM) and mismatch (MM) oligonucleotide probes (25 mers). Data are collected at the level of the transcript (referred to herein by gene name). The hybridization intensity data are calculated from the images generated by the Gene Array scanner (Affymetrix), using the Affymetrix Microarray Suite (MAS) 4.0. The average difference (Avg Diff) between the PM signal and the MM signal for every probe set is calculated, and the mean Avg Diff for each array is set to 2,500 by linearly scaling array values. Next, the negative Avg Diff values on the array that could interfere with subsequent analysis are truncated and every Avg Diff value below 20 is assigned an Avg Diff of 20. For each experiment, all the arrays are then re-scaled to 5,000,000 of total target intensity. An unpaired t-test for each individual gene is carried out for the following pairwise comparisons for each experiment:
[0181] (1) Heat-shocked hsp-Gal4/UAS-transgene flies versus heat-shocked hsp-Gal4 flies (to eliminate effects caused by heat shock and the overexpression of Gal4 protein only);
[0182] (2) Heat-shocked hsp-Gal4/UAS-transgene flies versus heat-shocked UAS-transgene flies (to eliminate effects caused by UAS-transgene only);
[0183] (3) Heat-shocked hsp-Gal4/UAS-transgene flies versus heat-shocked CyO flies (to eliminate a small number of genes, for which the heat-shocked no hsp-Gal4 and no UAS-transgene group gave high background induction); and
[0184] (4) Heat-shocked hsp-Gal4/UAS-transgene flies versus non-heat-shocked hsp-Gal4 plus non-heat-shocked UAS-transgene plus non-heat-shocked CyO flies (to eliminate a small number of heat-shock responsive genes).

[0185] The differentially-expressed genes (DEGs) by the overexpression of each of these transgenes are identified based on the following criteria: for each of the above t-tests, genes that had significant 2-fold or above changes in mean Avg Diff (p≦0.005) are selected. Additionally, the higher mean Avg Diff of a pairwise comparison for a given gene is above or equal to 200. Since heat-shocked hsp-Gal4 fly samples gave most of the non-specific effects, the fold changes calculated from the first t-test comparison, i.e., heat-shocked hsp-Gal4/UAS-transgene flies versus heat-shocked hsp-Gal4 flies, are used to represent the most conservative estimate of the fold change between experimental and control groups for each gene.

Gene Ontology Analysis

[0186] Every probe set on the GeneChip™ Drosophila genome array is annotated by integrating the information on the gene ontology (GO) web site (http://www.geneontology.org) with the information available from FlyBase (http://www.fruitfly.org). We first associate each probe set on the chip with its current gene entry in FlyBase. Next, we associate each gene to its available GO annotations for molecular function and biological process. We exclude annotations derived exclusively from electronic annotation (evidence code IEA). We restore the GO tree structure and determine the number of genes that are annotated as belonging to a particular GO term and its child GO terms.

Quantitative Real-Time PCR (QRT-PCR)

[0187] To confirm the microarray data analysis results, QRT-PCR is carried out on selected genes. Reverse transcription step is done using TaqMan Reverse Transcription Reagents (Roche Molecular Systems, Inc., Pleasanton, Calif.). QRT-PCR is performed with the reverse transcription product, SYBR® Green PCR Master Mix (Applied Biosystems, Foster City, Calif.), and gene-specific primers (Table 2), using ABI Prism® 7900HT Sequence Detection System. RNA levels of the rp49 gene, which encodes a ribosomal protein, are used as internal normalization controls.

### Example 1

Genome Wide-Expression Analysis

[0188] In order to identify genes whose transcription is effected by activation of the ISP in Drosophila, a genome wide-expression analysis is performed. To this end, several proteins known to be involved in the ISP are overexpressed using the Gal4/UAS system [see Brand and Perrimon (1993), supra], specifically, dAkt1, Dp110 and dPTEN are chosen because they have been shown to be critical components of this pathway and are conserved between humans and Drosophila in both sequence homology and function. dfoxo was also included because it has been demonstrated that the forkhead-domain transcription factor is downstream of and regulated by Akt in humans and C. elegans. See Kops et al., Nature, Vol. 398, pp. 630-634 (1999); Brunet et al., Cell, Vol. 96, pp. 857-868 (1999); Guo et al., J Biol Chem, Vol. 274, pp. 17184-17192 (1999); Rena et al., J Biol Chem, Vol. 274, pp. 17179-17183 (1999); and Ogg et al., Nature, Vol. 389, pp. 994-999 (1997).

[0189] These genes are over-expressed in adult flies to increase the chance of identifying direct downstream targets of ISP and to avoid identifying secondary-effect genes due to developmental effects on gene expression. The heat shock scheme used to induce the transgenes is long enough to achieve a high level of UAS-transgene expression based on our unpublished kinetics of transgene overexpression, but short enough so that genes identified represent more direct downstream targets of ISP and less likely secondary effects of gene expression.

[0190] Following overexpression of these genes, transcript profiles are analyzed using Affymetrix Drosophila GeneChip™ and the differentially expressed genes for each overexpressed transgene are identified as described above. Genes are represented on the chip by one or more probe sets, which correspond to approximately 13,300 unique genes according to Release 1.0 of the Drosophila genome. See Adams et al. (2000), supra. Gene expression is verified by QRT-PCR with gene-specific primers (see Example 3 below).

### Example 2

Expression Patterns of DEGs

[0191] The expression patterns of all the DEGs that passed our filtering criteria (see methods above) in each overexpression experiment are organized by hierarchical clustering. See Eisen et al., Proc Natl Acad Sci USA, Vol. 95, No. 25, pp. 14863-14868 (1998). A total of 128, 339, 85, 16 and 234 genes are found to be differentially-regulated following dAkt1, Dp110CAAX, dPTEN, Dp110^{D954A} and dfoxo over-expression, respectively (see Table 3), at a significance level of p≦0.005. These correspond to approximately 0.96%, 2.5%, 0.64%, 0.12% and 1.75% of the genes represented on the array, respectively. The top 20 down-regulated and top 20 up-regulated genes in response to each UAS-transgene overexpression (except for UAS-Dp110^{D954A} overexpression, where only 16 DEGs are identified) are shown in Tables 5-8.

[0192] Our approach identifies less DEGs following the overexpression of negative regulators of the ISP, Dp110^{D954A} and dPTEN, than positive regulators dAkt1 and Dp110^{CAAX}. One possible explanation could be that insulin signaling in adult flies are maintained at a relatively lower level than that of earlier developmental stages and thus the effects of up-regulation of the insulin signal may be easier to observe than down-regulation of the insulin signal. Overexpression of Dp110^{D954A} gives a much lower percentage of DEGs. This could be because the dominant negative form of Dp110 induced in our experiment is not a strong effector.

[0193] All the DEGs and all the over-expression experiments are hierarchically clustered to see which experiments are more similar to each other in terms of fold change as compared to others. It is interesting to see that overexpression of dAkt1 and Dp110CAAX, two positive regulators of insulin signaling, are clustered together, whereas overexpression of dPTEN and Dp110^{D954A}, two negative regulators of insulin signaling, are clustered together. Furthermore, DEGs whose expression levels are high in dAkt1 and Dp110^{CAAX} experiments generally have low-expression levels in dPTEN and Dp110^{D954A} experiments and vice versa. Taken together, the above observations demonstrate that the transcription of these DEGs are regulated by the ISP.

[0194] Since dfoxo activity is down-regulated through phosphorylation by dAkt1 in mammals and C. elegans, its activity is likely down-regulated in Drosophila as well. Thus, over-expressing dfoxo in a subject could potentially antagonize insulin signal transduction through the dAkt-dfoxo branch. Consistent with this idea, we find that over-expression effect of dfoxo on global patten of gene expressing is more similar to those caused by dPTEN and Dp110^{D954A}.

### Example 3

Verification of Microarray Expression Data with QRT-PCR

[0195] To confirm the differential-expression results described above and to identify best gene markers to complement genetic studies, e.g., validation of genetic screen hits, QRT-PCR is carried out on selected candidate genes. A total of 50 genes (including Zw, diptericin, diptericin B, see below) from the following categories are selected:
[0196] (1) Genes up- or down-regulated by dAkt1, Dp110CAAX, dfoxo, dPTEN or Dp110^{D954A} overexpression alone, respectively;
[0197] (2) Genes up- or down-regulated by both dAkt1 and Dp110^{CAAX} overexpression; and
[0198] (3) Genes up- or down-regulated by both dPTEN and Dp110^{D954A} overexpression.

[0199] In all, 66 QRT-PCR reactions for the 50 DEGs are conducted and only 2 failed to confirm the microarray results because of failing to pass the t-test p-value filter (data not shown). These results show that the changes in the relative expression level, as measured by QRT-PCR, are generally consistent with the data obtained with the oligonucleotide arrays.

### Example 4

Functional Classification of Differentially-Expressed Transcripts

[0200] Molecular genetic studies with Drosophila have demonstrated that the ISP is involved in the regulation of growth, cell proliferation, metabolism and aging. In order to find out what biological processes and functional products encoded by the genes showing differential transcription responses are affected by the over-expression of ISP genes in Drosophila, we use the annotation project directed by the GO Consortium (http://www.geneontology.org) to functionally classify these differentially-regulated genes. The objective of GO is to provide controlled vocabularies for the description of the molecular function, biological process and cellular component of gene products. See Ashburner et al., Nat Genet, Vol. 25, pp. 25-29 (2000). The GO contains information on approximately 46% (6,423/13,966) of the probe sets present on the arrays employed herein.

[0201] Detailed biological process and molecular function classifications of the genes differentially-regulated by the over-expression of the ISP components performed herein are presented in Tables 10 and 11, respectively. Primary GO terms under the 2 major GO terms “biological process” and “molecular function” and selected secondary GO terms showing more detailed annotation of the primary terms are shown. For secondary GO terms, only those containing DEGs from at least 3 out of the 5 over-expression experiments are shown.

[0202] As shown in Table 3, a total of 128, 339, 85, 16 and 234 genes are found to be differentially-regulated following dAkt1, Dp110^{CAAX}, dPTEN, Dp110^{D954A} and dfoxo overexpression, respectively, at a significance level of p≦0.005. These correspond to approximately 0.96%, 2.5%, 0.64%, 0.12% and 1.75% of the genes represented on the array, respectively. If the DEGs from each overexpression experiment comprise approximately 0.96%, 2.5%, 0.64%, 0.12% and 1.75% of the genes represented on the array, respectively, then for each of the above overexpression experiments, if there is no relationship between the differential expression and molecular functions or biological processes, by random chance we expect (for each GO term) 0.96/100, 2.5/100, 0.64/100, 0.12/100 and 1.75/100 as many DEGs in each overexpression experiment as there are on the entire chip, respectively. However, Tables 10 and 11 show that, for several GO terms, the percentages of DEGs relative to the total number of genes in that GO category represented on the chip is much higher than the percentage of DEGs from each over-expression experiment relative to the total number of genes represented on the array. Therefore, the biological processes defined by these GO terms are likely regulated by the ISP components.

[0203] Interestingly, one of the major biological processes that may be regulated by the insuling signaling pathway is the “defense/immune response” (see Table 9). This is also confirmed by molecular function classification shown in Table 10 (GO term “defense/immunity proteins”). The DEGs under the biological process GO term “defense response” from different overexpression experiments are shown in Table 11. This discovery is of great interest because insulin signaling has not previously been shown to directly regulate Drosophila innate immunity.

[0204] Innate immunity is the first-line defense of multicellular organisms against pathogenic challenges. Invertebrates and vertebrates share a common ancestry for this defense system, illustrated by the striking conservation of the intracellular signaling pathways that regulate the rapid transcriptional response to infection in Drosophila and mammals. See Hoffmann et al., Science, Vol. 284, pp. 1313-1318 (1999); and Borregaard et al., Immunol Today, Vol. 21, pp. 68-70 (2000).

[0205] It has been shown that transcriptional induction of innate immune response is controlled by at least 2 distinct NFκB signaling pathways, Toll and Imd. See Imler and Hoffmann, Curr Opin Microbiol, Vol. 3, pp. 16-22 (2000). In addition to these 2 pathways, the JNK and JAK/STAT pathways have also been shown to contribute to the expression of microbial challenge-induced genes. See Boutros et al., Devel Cell, Vol. 3, pp. 711-722 (2002).

[0206] Recently, several studies have investigated the transcriptional responses to microbial infection in Drosophila using DNA microarrays [see De Gregorio, Proc Natl Acad Sci USA, Vol. 98, pp. 12590-12595 (2001); Irving, Proc Natl Acad Sci USA, Vol. 98, pp. 15119-15124 (2001); and Boutros et al. (2002), supra] and target genes involved in immune responses were identified. By comparing DEGs shown in Table 11 to immune responsive genes identified in these microarray studies, we show that overexpression of ISP components affect genes in both Toll and Imd pathways. For the Toll pathway, Toll receptor ligand, spatzle, the downstream protein kinase, pelle and Toll pathway targets, such as drosomycin, Mtk, IM1 and IM2 are affected. For the Imd pathway, the Imd pathway targets, such as diptericin and diptericin B are affected. Also, CG8193 (see Table 11) encodes a monophenol monooxygenase that plays a role in melanization, which is a common defense mechanism among invertebrates and involved in both pigmentation and wound healing. See De Gregorio et al. (2001), supra. The genes shown in Table 11 represent only well-curated genes by GO.

[0207] To further estimate the percentages of DEGs from each overexpression experiment that are involved in immune responses, the 400 Drosophila immune-regulated genes [referred to as DIRGs in De Gregorio et al. (2001), supra] from the dataset of De Gregorio et al. (2001), supra, are selected and overlaps between DEGs from each of the different overexpression experiments and these genes identified as DIRGs are analyzed. Results indicate that approximately 22%, 12%, 15% and 13% of the DEGs from dAkt1, Dp110CAAX, dfoxo and dPTEN overexpression experiments, respectively, are Drosophila immune-regulated genes. One of the molecular function classes “serine-type peptidase” also show high relative numbers of DEGs (see Table 10). Since trypsin-like serine proteases and their inhibitors, serpins, play a central role in the insect immune response [see Levashina et al., Science, Vol. 285, pp. 1917-1919 (1999)], we look at the DEGs in this GO class, as well as the DEGs in the molecular function GO term “enzyme inhibitor” (see Table 10). Surprisingly, seven trypsin-like serine-protease-encoding DEGs (CG12385, CG12351, CG8871, CG16749, CG6467, CG9645 and CG11842) in the GO term “serine-type peptidase” and three serpin-encoding DEGs (CG3801, CG6687 and CG18525) in the GO term “enzyme inhibitor” from different insulin signalling pathway gene over-expression experiments overlap with the DIRGs, mentioned above.

[0208] The above evidence indicates that the ISP likely crosstalks with NFκB signaling pathways and plays an important role in regulating defense/immune responses in Drosophila. Previous studies in mammalian systems support this discovery. It has been shown that tumor necrosis factor ax (TNFα) and platelet-derived growth factor (PDGF) induced NFκB activation requires Akt and it has been indicated that Akt is part of a signalling pathway that is necessary for inducing key immune and inflammatory responses. See Ozes et al., Nature, Vol. 401, pp. 82-85 (1999); Romashkova and Makarov, Nature, Vol. 401, pp. 86-90 (1999); Madrid et al., Mol Cell Biol, Vol. 20, pp. 1626-1638 (2000); and Burow et al., Biochem Biophys Res Commun, Vol. 271, pp. 342-345 (2000).

[0209] Briefly, TNFα or PDGF activates PI3K and its downstream target Akt, which activates IκB kinase (IKK). The activation of NFκB involves phosphorylation of IκB by IKK, and subsequent IκB ubiquitination and degradation. Therefore, in Drosophila, it is possible that the ISP contributes to the regulation of innate immunity through activating NFκB transcription factors, such as Rel and Dif. Previous studies in mammalian systems also demonstrated an important role of PI3K in regulating innate immune responses, such as phagocytosis. Taken together, our results and previous studies in other systems support a role for the ISP in regulating innate immunity in Drosophila via interacting with other signaling pathways, such as NFκB pathways.

[0210] Many metabolic processes show high relative numbers of DEGs from multiple over-expression experiments (see Table 9), consistent with the findings that the ISP regulates metabolism in Drosophila. See Bohni et al., Cell, Vol. 97, pp. 865-875 (1999); Britton et al., Dev Cell, Vol. 2, pp. 239-249 (2002); and Brogiolo et al., Curr Biol, Vol. 11, pp. 213-221 (2001).

[0211] It is significant to see that, Zwischenferment (Zw), a gene encoding a rate-limiting enzyme (glucose-6-phosphate 1-dehydrogenase) in the pentose-phosphate shunt (PPP), is regulated by ISP (see Tables 9 and 10). The major role of PPP pathway is to generate NADPH-reducing power needed for fatty acid synthesis. It has been shown that Zw gene expression was up-regulated in sugar-fed but not in starved Drosophila larvae. See Zinke et al., EMBO J, Vol. 21, pp. 6162-6173 (2002). We see that Zw is up-regulated by dAkt1 and Dp110^{CAAX}, but down-regulated by dfoxo, which is a good indication that insulin signaling up-regulates PPP pathway possibly through Dp110/dAkt1/dfoxo branch, and consistent with the observation that insulin promotes fatty acid synthesis. Another gene, CG6283, encoding a triacylglycerol lipase, has been shown to be down-regulated in sugar-fed but not in starved Drosophila larvae. See Zinke et al. (2002), supra. Our resultd show that this gene is down-regulated by Dp110^{CAAX}, but up-regulated by dfoxo. This is also consistent with the fact that insulin inhibits fatty acid breakdown. Several glucose/sugar transporters are also differentially regulated by the over-expression of ISP components (see Table 10), indicating that insulin signaling also regulate carbohydrate/glucose metabolism in Drosophila. To further dissect which metabolic pathways are affected by insulin signalling pathway component over-expression, we also use annotation information of metabolic pathways from Kyoto Encyclopedia of Genes and Genomes (KEGG), http://www.genome.ad.jp/kegg/. A detailed metabolic pathway classification of the genes differentially regulated by the overexpression of ISP components is shown in Table 12. For KEGG metabolic pathways, only those containing DEGs from at least 3 out of the 5 overexpression experiments are shown. The KEGG classification shown in Table 11 shows that the ISP regulates carbohydrate, lipid and amino acid metabolism in Drosophila ISP component.

TABLE 2
The Primer Pairs of the Selected Genes for QRT-PCR Verification

| Probe Set | Forward Primer/SEQ ID NO | Reverse Primer/SEQ ID NO |
|---|---|---|
| 141450_at | TCGTTCCGGTGGCATTGT / 1 | GAAGACGCCGCGGATGT / 51 |
| 141454_at | CTGGAGGTGCCCGCATTA / 2 | AATGATTTTCGCGCTGCAA / 52 |
| 141547_at | TCGGCCAATCACCTACCAGTA / 3 | CCGCCGTGCCACTTGTA / 53 |
| 141688_at | GACCTCATGGGCTCCAACAT / 4 | CCTTGGACGATCTCCTTGTTCT / 54 |
| 142165_at | CGGAGTCTTTAATCATAATATGGAAACC / 5 | GCGCGCTCAATGGAAACTA / 55 |
| 142318_at | GCCGCCGAACCAGTTGT / 6 | CCACGACTGGCTGATCCTTAA / 56 |
| 142359_at | CCACGAGTCCCAGCCACTT / 7 | GTCGCCCACATTCGCATATC / 57 |
| 142414_at | CCCTGTCCGGAAGCCAAT / 8 | AGGGTGTCCGCATCGAAGT / 58 |
| 142415_at | CATTTTCCCCGTTTCCTTCTAGT / 9 | GTTTGCGCCTCAACTTAAGCA / 59 |
| 142516_at | CTCTCGTTTCAATCCCAATGCT / 10 | GGGCAGCCTGAGCCTGTT / 60 |
| 143242_at | CGCCAGGGAGAACTCAACAT / 11 | CCCAGGTTGAGAACGATTACATAGA / 61 |
| 143385_at | TTAGCCAGAGCCAGTGTGCTT / 12 | ACCCTGGCAGGCATCCTT / 62 |
| 143443_at | AGGTGTGGACCAGCGACAAT / 13 | CTTTCCAGCTCGGTTCTGAGTT / 63 |
| 143472_at | CAAGCGGATGCCGTTGTC / 14 | TTGGCCCATCCTGAAAATGT / 64 |
| 143604_r_at | TTAGCCAGAGCCAGTGTGCTT / 15 | ACCCTGGCAGGCATCCTT / 65 |
| 144712_at | GGAGCGGTTCATAATCCAGACA /16 | AGGCATTCTTCGTGGACACAA / 66 |
| 146028_at | ACTTCGCTCCGAATCGTGTT / 17 | GTGCTTTAAGGCATCCGGTTT / 67 |
| 146619_i_at | AGCCATCCAGCGTTTCAAGA / 18 | CGCACACGCTCCACGTT / 68 |
| 146809_at | ATCTATAAGGCGCTGGTGGAACT / 19 | CGCTTCACCACAAACACATTCT / 69 |
| 146850_at | GCGTTTCCCATGGACCTCTA / 20 | CCGGCATGAGGCAGAACT / 70 |
| 146898_at | ATGATATCCGGCTTTGTGGAGAT / 21 | CCCAAAACGGCCAGTTTCTT / 71 |
| 147029_s_at | GTTGCCACTCACTTGCTTCGT / 22 | GAATTTTGGCCGGCAGAAT / 72 |
| 147118_at | GCCCAACTACGAGCAGATGAA / 23 | TAAGCAGACCACTAGCTCCATAGGT / 73 |
| 147225_at | CCCTTCGCAAGTATCCAGTTCT / 24 | AACAGTGGTTCCCTTGGCAAT / 74 |
| 147430_at | CTACGGCCGGAAATGTGATT / 25 | CGGCCTACCCGTCCTGTA / 75 |
| 147431_at | CCGGAGAAATCCATCCAGAA / 26 | CGGGCGACAGTGGAACA / 76 |
| 147473_at | GCATATGCTCCCAATTTTGATGT / 27 | GGCTCAGATCGAATCCTTGCT / 77 |
| 147520_at | CAGGATCTGGCTGACTTGCA / 28 | ATGAAACCGCTCTTGACCAGAA / 78 |
| 148253_at | GTGTGGCTACCAATCTTCAGTATGTC / 29 | GCCACGCAGAGGGTTGAGT / 79 |
| 148259_at | TTTCATCCAACGTGGTCACAGT / 30 | TTGCAGTGGCTGGTTCCAT / 80 |
| 148964_at | CAACGACATCTCGCTTATTCGA / 31 | TACGTGGGAAACTGGCCATT / 81 |
| 149233_at | CAGTGGTGATGGTAGCCTGGTA / 32 | GCCAGCCACGCCAAGTAG / 82 |
| 149394_at | CCACGCCTATCAACGAAGCT / 33 | GGCCAAGGGCAAGTCCAT / 83 |
| 150151_at | GAAACCACGCGGGAGATCT / 34 | AATGTCAAGTACTCCTCCTGGAAGA / 84 |
| 150421_at | CTCTTTGGCATCTTCGTTTCAA / 35 | TTTGCCTACCACATAGTTCAGCTT / 85 |
| 150699_at | TATGCTGGCAAGAATGTGAAGAA / 36 | TGGAGCTCAGGCGCTTGT / 86 |
| 151781_at | AGGCATTGAAAACGGTTCGA / 37 | TGCCACAGGCATCAATAGCA / 87 |
| 151788_at | CTGGAGCGCTACAACAAGGAA / 38 | AATATTTTACAGAGCCTGGTGTTAGACA / 88 |
| 151793_at | TCGCTAACACTCTGCAGTACGAA / 39 | AACGCAGATCACGTTGTTGGT / 89 |
| 151932_at | ACCATGTGCTCCACCATCTCTT / 40 | GAGATGACCCTTGAACTCATCGA / 90 |
| 152049_at | CCGAACCGTCCAGGAAGA / 41 | AAGATTCCGCCAGCAACATT / 91 |
| 152142_at | TCTAGCCACCGCAAACGAA / 42 | CCTGTCTGCCTTTGTATAAATGAAATATT / 92 |
| 152245_at | TGTACTCTATTACCTCGAAAGTGGAACT / 43 | CGGACACGATTGCTCTTCAA / 93 |
| 152369_at | GGCTCCGATGCCTCTCTGTA / 44 | TAACCGTCAATGGAGGATCCA / 94 |
| 152456_at | ACGGAGAGGGCGTACGAGTA / 45 | GAAGCCCAGCTTCTCCATCA / 95 |
| 152687_at | CTGATCCAACTGCCAGAACCA /46 | GCCACGCTGCCCACATA / 96 |
| 152833_at | ATTCCGCCCAGAGCGATT / 47 | ACTTCTGGCCTATGCAGTTCCTT / 97 |
| 152843_at | CATCTGCGGAGCACTGTCTCT / 48 | GAAGUCTCCCCATCCTCGAT / 98 |
| 154014_at | GTGGCGGACATGGAGTTCTT / 49 | TCAATTAGCTCCAGAATGCCAAT / 99 |
| 154894_at | AGAAGAAGCGGCATCACGTT / 50 | CACTTCCTCGCATTGCTTGTT / 100 |

[0212] TABLE 3
Numbers of Genes Differentially-Regulated
by Overexpression of ISP Components

| Differential Expression | | Up- | Down- |
|---|---|---|---|
| in Response To | Total | regulated | regulated |
| dAkt1 | 128 | 65 | 63 |
| Dp110^{CAAX} | 339 | 254 | 85 |
| Dfoxo | 234 | 101 | 133 |
| dPTEN | 85 | 61 | 24 |
| Dp110^{D954A} | 16 | 11 | 5 |

Note:
Overview of the numbers of DEGs following overexpression of basic ISP genes.

[0213] TABLE 4
The Top 20 Down-Regulated and Top 20 Up-Regulated Genes in
Response to dAkt1 Overexpression Ranked by Fold Change

| Probe Set | CG No. | Name | Function | Process | Fold |
|---|---|---|---|---|---|
| 150699_at | CG6295 | — | triacylglycerol lipase | — | −126.53 |
| 142516_at | CG10077 | — | — | — | −73.36 |
| 148228_at | CG10592 | — | alkaline phosphatase | — | −16.1 |
| 151781_at | CG5107 | — | — | — | −13.42 |
| 143443_at | CG12763 | Dpt | antibacterial peptide, gram- | antibacterial humoral | −12.07 |
| | | | negative antibacterial peptide | response (sensu | |
| | | | | Invertebrata) | |
| 146569_at | CG9259 | — | — | — | −11.86 |
| 147150_at | CG4740 | AttC | antibacterial peptide | antibacterial humoral | −10.95 |
| | | | | response (sensu | |
| | | | | Invertebrata) | |
| 150482_at | CG13607 | — | — | — | −8.59 |
| 142762_at | CG13903 | — | ubiquitin-specific protease | deubiquitination | −7.1 |
| 144749_at | CG2309 | — | protein serine/threonine | protein amino acid | −6.82 |
| | | | kinase, MAP kinase kinase | phosphorylation | |
| 151361_at | CG17015 | RhoGAP18B | — | — | −6.48 |
| 147118_at | CG12374 | — | carboxypeptidase A | — | −5.89 |
| 152870_at | CG6716 | prd | DNA binding, specific RNA | periodic partitioning | −5.6 |
| | | | polymerase II transcription | by pair rule gene | |
| | | | factor | | |
| 144565_at | CG6067 | — | — | — | −5.38 |
| 141534_at | CG3961 | — | long-chain-fatty-acid-CoA- | — | −5.05 |
| | | | ligase | | |
| 152313_at | CG10241 | Cyp6a17 | cytochrome P450 | — | −4.93 |
| 147144_at | CG4734 | — | — | — | −4.54 |
| 141300_at | CG9181 | Ptp61F | protein tyrosine phosphatase | axon | −4.5 |
| | | | | guidance\|protein | |
| | | | | amino acid | |
| | | | | dephosphorylation | |
| 141681_at | CG1691 | Imp | mRNA binding | — | −4.46 |
| 148964_at | CG7542 | — | chymotrypsin | — | −3.95 |
| 152833_at | CG1944 | Cyp4p2 | cytochrome P450 | — | 3.67 |
| 142279_at | CG17632 | bw | eye pigment precursor | eye pigment | 3.74 |
| | | | transporter, ATP-binding | biosynthesis\|pteridine | |
| | | | cassette (ABC) transporter | biosynthesis | |
| 152078_at | CG9547 | — | glutaryl-CoA dehydrogenase | — | 3.85 |
| 149303_at | CG14661 | — | — | — | 3.97 |
| 152687_at | CG8952 | — | serine-type endopeptidase | — | 3.97 |
| 152245_at | CG6183 | LOC156106 | — | — | 3.99 |
| 143008_at | CG8987 | tam | 3′-5′exodeoxyribonuclease; | DNA dependent | 4.05 |
| | | | gamma DNA-directed DNA | DNA replication | |
| | | | polymerase | | |
| 148103_at | CG10812 | — | defense/immunity protein | defense response | 4.05 |
| 152128_at | CG9761 | Nep2 | endothelin-converting enzyme; | — | 4.38 |
| | | | metallopeptidase | | |
| 150369_at | CG18594 | — | — | — | 4.39 |
| 150337_at | CG6560 | — | ARF small monomeric GTPase | — | 4.6 |
| 151927_at | CG4784 | — | — | — | 4.81 |
| 150154_at | CG7698 | — | — | mRNA | 5.43 |
| | | | | cleavage\|mRNA | |
| | | | | polyadenylation | |
| 147818_at | CG13565 | similar to | — | — | 5.87 |
| | | CG13565 | | | |
| 142217_at | CG2655 | HLH3B | transcription factor | — | 6.77 |
| 152456_at | CG3318 | Dat | arylalkylamine | catecholamine | 8.36 |
| | | | N-acetyltransferase; arylamine | metabolism | |
| | | | N-acetyltransferase | | |
| 144619_at | CG4547 | — | — | — | 8.95 |
| 141547_at | CG12529 | Zw | glucose-6-phosphate 1- | pentose-phosphate | 9.93 |
| | | | dehydrogenase | shunt | |
| 154985_at | CG9083 | — | — | — | 10.95 |
| 147659_at | CG13504 | — | — | — | 24.48 |

Note:
The listed DEGs are depicted by Affymetrix probe set, CG number, gene description including gene name, molecular function and biological process information.

[0214] TABLE 5
The Top 20 Down-Regulated and Top 20 Up-Regulated Genes in Response
to Dp110^{D954A} Overexpression Ranked by Fold Change

| Probe Set | CG No. | Name | Function | Process | Fold |
|---|---|---|---|---|---|
| 146809_at | CG11669 | — | alpha (α)-glucosidase | — | −22.58 |
| 147812_at | CG5569 | — | — | — | −17.59 |
| 150699_at | CG6295 | — | triacylglycerol lipase | — | −17.16 |
| 148228_at | CG10592 | — | alkaline phosphatase | — | −15.83 |
| 150702_at | CG6283 | — | triacylglycerol lipase | — | −15.32 |
| 142359_at | CG8689 | — | — | — | −11.94 |
| 148253_at | CG6467 | — | translation elongation | translational | −11.83 |
| | | | factor\|protein-synthesizing | elongation | |
| | | | GTPase, elongation serine- | | |
| | | | type endopeptidase | | |
| 150588_at | CG11909 | — | α-glucosidase | — | −10.33 |
| 144310_at | CG8997 | — | — | — | −8.63 |
| 152313_at | CG10241 | Cyp6a17 | cytochrome P450 | — | −8.22 |
| 143604_r_at | CG12351 | deltaTry | trypsin | proteolysis and | −7.93 |
| | | | | peptidolysis | |
| 152870_at | CG6716 | prd | DNA binding, specific RNA | periodic partitioning | −7.27 |
| | | | polymerase II transcription | by pair rule gene | |
| | | | factor | | |
| 143242_at | CG8696 | LvpH | α-glucosidase | glucose metabolism | −7.2 |
| 142201_at | CG4363 | — | — | — | −6.96 |
| 147459_at | CG18609 | — | — | — | −6.61 |
| 149024_at | CG3819 | — | — | — | −6.13 |
| 149922_at | CG3610 | — | — | — | −5.96 |
| 144565_at | CG6067 | — | — | — | −5.91 |
| 144350_at | CG5254 | — | carrier tricarboxylate carrier | — | −5.44 |
| 146810_at | CG8690 | — | α-glucosidase | — | −5.43 |
| 148666_at | CG10522 | — | protein serine/threonine kinase | protein amino acid | 6.78 |
| | | | diacylglycerol binding | phosphorylation | |
| 150810_at | CG11898 | — | multidrug transporter | — | 6.86 |
| | | | xenobiotic-transporting | | |
| | | | ATPase | | |
| 150337_at | CG6560 | — | ARF small monomeric GTPase | — | 7.05 |
| 154795_at | CG14231 | — | — | — | 7.3 |
| 143989_at | CG3480 | — | — | — | 7.38 |
| 152456_at | CG3318 | Dat | arylalkylamine | catecholamine | 7.4 |
| | | | N-acetyltransferase, arylamine | metabolism | |
| | | | N-acetyltransferase | | |
| 149791_at | CG6753 | — | triacylglycerol lipase | — | 8.05 |
| 148640_at | CG11529 | — | serine-type endopeptidase | — | 8.62 |
| 152749_at | CG15772 | — | — | — | 9.62 |
| 144196_at | CG6743 | clone | — | — | 10.11 |
| | | LD18761 | | | |
| | | BcDNA | | | |
| | | mRNA | | | |
| 153258_at | CG4860 | — | acyl-CoA dehydrogenase | — | 10.73 |
| 150219_at | CG11453 | — | long-chain fatty acid | — | 11.34 |
| | | | transporter | | |
| 154291_at | CG1405 | — | ATP-dependent helicase, ATP- | mRNA splicing | 11.75 |
| | | | dependent RNA helicase, | | |
| | | | pre-mRNA splicing factor | | |
| 144619_at | CG4547 | — | — | — | 13.51 |
| 153910_at | CG8211 | — | — | — | 15.05 |
| 154429_at | CG2054 | Cht2 | chitinase | cuticle chitin | 16.05 |
| | | | | catabolism | |
| 147818_at | CG13565 | similar to | — | — | 18.18 |
| | | CG13565 | | | |
| 146141_at | CG5375 | — | — | — | 20.39 |
| 146780_at | CG2916 | Sep5 | GTPase | cytokinesis | 20.91 |
| 145121_at | CG6299 | — | glycolipid transfer | — | 46.54 |

Note:
The listed DEGs are depicted by Affymetrix probe set, CG number, gene description including gene name, molecular function and biological process information.

[0215] TABLE 6
The DEGs in Response to Dp110^{D954A} Overexpression

| Probe Set | CG No. | Name | Function | Process | Fold |
|---|---|---|---|---|---|
| 150699_at | CG6295 | — | triacylglycerol lipase | — | −10.69 |
| 148539_at | CG18348 | — | — | — | −4.67 |
| 148553_at | CG6261 | — | — | — | −4.13 |
| 152313_at | CG10241 | Cyp6a17 | cytochrome P450 | — | −2.85 |
| 147520_at | CG13873 | Obp56g | odorant binding | — | −2.48 |
| 146273_at | CG16997 | — | serine-type endopeptidase | — | −2.31 |
| 145474_at | CG1678 | — | — | — | −2.03 |
| 152918_at | CG1114 | Hph | — | — | 2.19 |
| 142415_at | CG3798 | Nmda1 | N-methyl-D-aspartate selective | — | 2.54 |
| | | | glutamate receptor | | |
| 152142_at | CG9175 | — | DNA binding | — | 2.76 |
| 148259_at | CG6602 | — | — | — | 2.9 |
| 144167_at | CG4325 | — | — | — | 3 |
| 148948_at | CG3882 | — | — | — | 5.35 |
| 150487_at | CG13608 | mRpS24 | structural constituent of | protein biosynthesis | 6.69 |
| | | | ribosome | | |
| 151818_at | CG7051 | — | dynein ATPase; motor | microtubule-based | 9.62 |
| | | | | movement | |
| 152833_at | CG1944 | Cyp4p2 | cytochrome P450 | — | 12.24 |

Note:
The listed DEGs are depicted by Affymetrix probe set, CG number, gene description including gene name, molecular function and biological process information.

[0216] TABLE 7
The Top 20 Down-Regulated and Top 20 Up-Regulated Genes in
Response to dPTEN Over-Expression Ranked by Fold Change

| Probe Set | CG No. | Name | Function | Process | Fold |
|---|---|---|---|---|---|
| 150699_at | CG6295 | — | triacylglycerol lipase | — | −11.73 |
| 147817_at | CG2812 | — | heterotrimeric G-protein | — | −6.91 |
| | | | GTPase, β-subunit | | |
| 148539_at | CG18348 | — | — | — | −5.68 |
| 149329_at | CG2663 | — | tocopherol binding | — | −5.55 |
| 152794_at | CG8560 | — | NOT carboxypeptidase | — | −4.63 |
| 146587_at | CG17571 | similar to | serine-type endopeptidase | — | −4.34 |
| | | CG17571 | | | |
| 152049_at | CG2668 | clone GH06048 | — | — | −3.77 |
| | | BcDNA.GH0 | | | |
| | | 6048 mRNA | | | |
| 147520_at | CG13873 | Obp56g | odorant binding | — | −3.76 |
| 142414_at | CG11315 | similar to | — | — | −3.43 |
| | | CG11315 | | | |
| 146619_i_at | CG12628 | — | — | — | −3.39 |
| 148553_at | CG6261 | — | — | — | −3.36 |
| 146352_r_at | CG16885 | — | — | — | −3.29 |
| 148964_at | CG7542 | — | chymotrypsin | — | −3.2 |
| 146660_at | CG7882 | — | glucose transporter | — | −3.11 |
| 143385_at | CG18444 | alphaTry | trypsin | proteolysis and | −2.77 |
| | | | | peptidolysis | |
| 147118_at | CG12374 | — | carboxypeptidase A | — | −2.75 |
| 146620_s_at | CG12628 | Mgstl | glutathione transferase | — | −2.42 |
| 152369_at | CG13095 | — | aspartic-type endopeptidase | — | −2.4 |
| 141450_at | CG1982 | Sodh-1 | L-iditol 2-dehydrogenase | — | −2.39 |
| 145474_at | CG1678 | — | — | — | −2.34 |
| 146814_at | CG12780 | — | gram-negative bacterial | — | 3.3 |
| | | | binding | | |
| 144234_at | CG7578 | — | ARF guanyl-nucleotide | ER to Golgi | 3.31 |
| | | | exchange factor | transport\|intra-Golgi | |
| | | | | transport | |
| 153902_at | CG3385 | nvy | transcription factor | — | 3.35 |
| 141454_at | CG13213 | — | — | — | 3.45 |
| 152940_at | CG9663 | — | ATP-binding cassette (ABC) | — | 3.54 |
| | | | transporter | | |
| 142522_at | CG12345 | Cha | choline O-acetyltransferase | acetylcholine | 3.57 |
| | | | | biosynthesis | |
| 148102_at | CG10813 | — | defense/immunity protein | defense response | 3.59 |
| 141205_at | CG18177 | — | — | — | 3.63 |
| 151748_at | CG7450 | — | — | — | 3.65 |
| 154894_at | CG8374 | dmt | — | — | 3.68 |
| 151127_f_at | CG12566 | — | — | — | 3.88 |
| 154985_at | CG9083 | — | — | — | 3.89 |
| 142797_at | CG5460 | H | transcription co-repressor | sensory organ | 3.9 |
| | | | | determination | |
| 150683_at | CG6403 | — | — | — | 3.99 |
| 143566_i_at | CG2163 | Pabp2 | RNA binding\|poly(A) binding | mRNA | 4.13 |
| | | | | polyadenylation | |
| 141831_at | CG3625 | — | — | — | 4.71 |
| 153804_at | CG11881 | — | — | — | 6.06 |
| 143410_at | CG2759 | w | eye pigment precursor | eye pigment | 6.19 |
| | | | transporter; ABC transporter | biosynthesis\|eye | |
| | | | | pigment precursor | |
| | | | | transport | |
| 142225_at | CG18381 | — | — | — | 7.11 |
| 145061_at | CG5228 | — | — | — | 8.05 |

Note:
The listed DEGs are depicted by Affymetrix probe set, CG number, gene description including gene name, molecular function and biological process information.

[0217] TABLE 8
The Top 20 Down-Regulated and Top 20 Up-Regulated Genes in
Response to dfoxo Overexpression Ranked by Fold Change

| Probe Set | CG No. | Name | Function | Process | Fold |
|---|---|---|---|---|---|
| 148253_at | CG6467 | — | serine-type endopeptidase | — | −132.5 |
| 150699_at | CG6295 | — | triacylglycerol lipase | — | −112.51 |
| 143604_r_at | CG12351 | deltaTry | trypsin | proteolysis and | −101.85 |
| | | | | peptidolysis | |
| 153069_at | CG15096 | — | high affinity inorganic | — | −33.36 |
| | | | phosphate: sodium symporter | | |
| 144310_at | CG8997 | — | — | — | −31.67 |
| 148228_at | CG10592 | — | alkaline phosphatase | — | −28.02 |
| 143984_at | CG4605 | Acp32CD | — | — | −22.09 |
| 147118_at | CG12374 | — | carboxypeptidase A | — | −18.26 |
| 142419_at | CG12057 | — | — | — | −17.98 |
| 151781_at | CG5107 | — | — | — | −15.11 |
| 147520_at | CG13873 | Obp56g | odorant binding | — | −14.18 |
| 146902_at | CG1652 | lectin-46Cb | galactose binding lectin | — | −13.32 |
| 141435_at | CG11911 | — | serine-type endopeptidase | — | −11.67 |
| 146569_at | CG9259 | — | — | — | −11.21 |
| 149024_at | CG3819 | — | — | — | −10.94 |
| 150574_at | CG11891 | LOC156877 | — | — | −10.88 |
| 142407_at | CG4753 | — | 1-acylglycerol-3-phosphate | — | −10.64 |
| | | | O-acyltransferase | | |
| 150575_at | CG11878 | — | — | — | −10.18 |
| 151793_at | CG6483 | — | serine-type endopeptidase | — | −10.03 |
| 146524_at | CG13965 | — | — | — | −9.98 |
| 144201_at | CG14902 | decay | caspase-3; effector caspase; | apoptosis\|apoptotic | 6.89 |
| | | | caspase translation initiation | program | |
| | | | factor | | |
| 141744_at | CG5772 | Sur | sulfonylurea receptor | — | 7.05 |
| 151670_at | CG2678 | — | — | — | 7.11 |
| 154760_at | CG4618 | — | — | — | 7.24 |
| 153910_at | CG8211 | — | — | — | 7.28 |
| 146413_at | CG6870 | — | electron transporter | — | 7.57 |
| 151899_at | CG11796 | — | 4-hydroxy-phenylpyruvate | — | 7.89 |
| | | | dioxygenase | | |
| 146180_at | CG17107 | similar to | — | — | 8.04 |
| | | CG17107 | | | |
| 151818_at | CG7051 | — | dynein ATPase\|motor | microtubule-based | 8.55 |
| | | | | movement | |
| 150683_at | CG6403 | — | — | — | 9.17 |
| 146850_at | CG13748 | — | serine protease inhibitor | — | 9.18 |
| 152279_at | CG6128 | — | α-L-fucosidase | O-glycoside | 9.93 |
| | | | | catabolism\|fucose | |
| | | | | metabolism | |
| 150711_at | CG17189 | — | — | — | 10.31 |
| 145061_at | CG5228 | — | — | — | 11.43 |
| 150551_at | CG11839 | — | — | — | 12.05 |
| 149394_at | CG15189 | — | — | — | 12.98 |
| 142318_at | CG17919 | — | phosphatidylethanolamine | — | 13.16 |
| | | | binding | | |
| 150552_at | CG9996 | — | — | — | 21.62 |
| 146990_at | CG13215 | — | — | — | 28.09 |
| 154014_at | CG3838 | — | — | — | 34.58 |

Note:
The listed DEGs are depicted by Affymetrix probe set, CG number, gene description including gene name, molecular function and biological process information.

[0218] TABLE 9
Selected Biological Process Classification of Genes Differentially-
Regulated Following Overexpression of ISP Components Using GO

[chemical structure]

[chemical structure]

[chemical structure]

Note:
DEGs following overexpression of ISP components grouped according to GO biological process classes.
Columns from left to right:
(1) primary GO terms (in purple) under the GO term “biological process” and selected secondary GO terms showing more detailed annotation of the primary terms; and
(2) numbers of genes represented on the entire chip in each GO category.
Columns 3, 5, 7, 9 and 11 represent numbers of DEGs following overexpression of dAkt1, Dp110^{CAAX}, dfoxo, dPTEN and Dp110^{D954A}, respectively, in each GO category.
Numbers in the parenthesis in the column headers represent the total number of genes that were differentially-regulated following overexpression of each ISP gene.
Columns 4, 6, 8, 10 and 12 percentage of DEGs for each GO category relative to the total number of genes in that GO category represented on the chip for each ISP gene overexpression.

[0219] TABLE 10
Selected Molecular Function Classification of Genes Differentially-
Regulated Following Overexpression of ISP Components Using GO
One gene product may belong to more than one categories.

[chemical structure]

[chemical structure]

[chemical structure]

[chemical structure]

[chemical structure]

Note:
DEGs following overexpression of ISP components, grouped according to GO molecular function classes.
Columns from left to right:
(1) primary GO terms (in purple) under the GO term “molecular function” and selected secondary GO terms showing more detailed annotation of the primary terms; and
(2) numbers of genes represented on the entire chip in each GO category.
Columns 3, 5, 7, 9 and 11 represent numbers of DEGs following overexpression of dAKT1, Dp100^{CAAX}, dfoxo, dPTEN and Dp110^{D954A}, respectively, in each GO category.
Numbers in the parenthesis in the column headers represent the total number of genes that were differentially-regulated following overexpression of each ISP gene.
Columns 4, 6, 8, 10 and 12 represent percentage of genes that were differentially-regulated for each GO category relative to the total number of genes in that GO category represented on the chip for each ISP gene overexpression.

[0220] TABLE 11
DEGs Encoding Products as Classified as Defense/Immunity Proteins According to GO

[chemical structure]

[chemical structure]

Summary of DEGs encoding products that are classified as defense response proteins according to GO biological process and molecular function classes.
Their corresponding average fold changes following overexpression of insulin signaling pathway components are shown.
Numbers in Green represent fold changes of DEGs in the corresponding experiments.
Numbers not highlighted are the fold changes of genes not satisfying the criteria of differential expression (see Materials and Methods) even though their fold changes may be greater than 2.
*References: 1) Boutros et al. (2002); 2) De Gregorio et al., (2001); and 3) Irving et al. (2001).

[0221] TABLE 12
Selected Metabolic Pathway Classification of Genes Differentially-Regulated Following Overexpression of ISP Components Using KEGG

| KEGG | KEGG | CGs in | | dAkt1/ | | | | dfoxo/ | | dPTEN/ | | |
|---|---|---|---|---|---|---|---|---|---|---|---|---|
| Primary | Secondary | the | dAkt1 | Path | Dp110^{CAAX} | Dp110^{CAAX} | dfoxo | Path | dPTEN | Path | Dp110^{D954A} | Dp110^{D954A} |
| Path | Path | Pathway | (128) | (%) | (339) | Path (%) | (234) | (%) | (85) | (%) | (16) | Path (%) |
| Amino | Phenyl- | 24 | 2 | 8.3 | 2 | 8.3 | 1 | 4.2 | 0 | 0.0 | 0 | 0.0 |
| acid | alanine | | | | | | | | | | | |
| metabo- | metabolism | | | | | | | | | | | |
| lism | | | | | | | | | | | | |
| | Tryptophan | 51 | 4 | 7.8 | 4 | 7.8 | 1 | 2.0 | 1 | 2.0 | 1 | 2.0 |
| | metabolism | | | | | | | | | | | |
| Carbo- | Galactose | 18 | 1 | 5.6 | 4 | 22.2 | 1 | 5.6 | 0 | 0.0 | 0 | 0.0 |
| hydrate | metabolism | | | | | | | | | | | |
| metabo- | | | | | | | | | | | | |
| lism | | | | | | | | | | | | |
| | Pentose | 18 | 2 | 11.1 | 1 | 5.6 | 3 | 16.7 | 0 | 0.0 | 0 | 0.0 |
| | phosphate | | | | | | | | | | | |
| | pathway | | | | | | | | | | | |
| Lipid | Fatty acid | 48 | 4 | 8.3 | 5 | 10.4 | 1 | 2.1 | 1 | 2.1 | 1 | 2.1 |
| metabo- | metabolism | | | | | | | | | | | |
| lism | | | | | | | | | | | | |
| Metabo- | Folate | 20 | 1 | 5.0 | 2 | 10.0 | 2 | 10.0 | 0 | 0.0 | 0 | 0.0 |
| lism | biosynthesis | | | | | | | | | | | |
| of co- | | | | | | | | | | | | |
| factors | | | | | | | | | | | | |
| and | | | | | | | | | | | | |
| vitamins | | | | | | | | | | | | |
| Metabo- | Glycero-lipid | 57 | 1 | 1.8 | 2 | 3.5 | 2 | 3.5 | 1 | 1.8 | 0 | 0.0 |
| lism of | metabolism | | | | | | | | | | | |
| complex | | | | | | | | | | | | |
| lipids | | | | | | | | | | | | |
| | Sphingogly | 25 | 2 | 8.0 | 1 | 4.0 | 1 | 4.0 | 0 | 0.0 | 0 | 0.0 |
| | co-lipid | | | | | | | | | | | |
| | metabolism | | | | | | | | | | | |
| Metabo- | Glutathione | 25 | 1 | 4.0 | 4 | 16.0 | 3 | 12.0 | 3 | 12.0 | 0 | 0.0 |
| lism of | metabolism | | | | | | | | | | | |
| other | | | | | | | | | | | | |
| amino | | | | | | | | | | | | |
| acids | | | | | | | | | | | | |
| Nucleo- | Purine | 65 | 2 | 3.1 | 4 | 6.2 | 2 | 3.1 | 0 | 0.0 | 0 | 0.0 |
| tide | metabolism | | | | | | | | | | | |
| metabo- | | | | | | | | | | | | |
| lism | | | | | | | | | | | | |

DEGs following overexpression of ISP components, grouped according to KEGG.
Columns from left to right: (1) KEGG primary path, (2) KEGG secondary path and (3) numbers of genes belonging to that secondary pathway.
Columns 4, 6, 8, 10 and 12 represent numbers of DEGs following overexpression of dAkt1, Dp110^{CAAX}, dfoxo, dPTEN and Dp110^{D954A}, respectively, in each KEGG category. Numbers in the parenthesis in the column headers represent the total number of genes that were differentially-regulated following overexpression of each ISP gene.
Columns 5, 7, 9, 11 and 13 represent percentage of genes that were differentially-regulated for each KEGG category relative to the total number of genes in that KEGG category for each ISP gene overexpression.

[0222] TABLE 13
Human Homologs of Drosophila Genes Regulated by Insulin Signaling Pathway

| Human Gene | FlyBase | FlyGene | Blast | Blast | Pct | Affy Chip |
|---|---|---|---|---|---|---|
| Locus ID | Gene ID | CG | Score | Prob | Ident | Probe Set |
| LocusLink: 10013 | FBgn0026428 | CG6170 | 687 | 0 | 45 | 155023_at |
| LocusLink: 10109 | FBgn0032859 | CG10954 | 439 | 1E−123 | 75 | 154503_at |
| LocusLink: 10113 | FBgn0031779 | CG9175 | 205 | 4.3E−53 | 32 | 152142_at |
| LocusLink: 102 | FBgn0015954 | CG7147 | 453 | 5E−127 | 41 | 141542_at |
| LocusLink: 10247 | FBgn0028510 | CG15261 | 139 | 5.7E−34 | 46 | 144220_at |
| LocusLink: 1036 | FBgn0034364 | CG5493 | 213 | 1.1E−55 | 52 | 147450_at |
| LocusLink: 10564 | FBgn0028538 | CG7578 | 1981 | 0 | 59 | 144234_at |
| LocusLink: 10565 | FBgn0028538 | CG7578 | 1769 | 0 | 62 | 144234_at |
| LocusLink: 10606 | FBgn0020513 | CG3989 | 491 | 5E−139 | 58 | 153428_at |
| LocusLink: 10797 | FBgn0010222 | CG18466 | 339 | 1.9E−93 | 56 | 151767_at |
| LocusLink: 10898 | FBgn0015621 | CG3642 | 322 | 2.4E−88 | 54 | 143833_at |
| LocusLink: 10946 | FBgn0014366 | CG2925 | 626 | 1E−179 | 63 | 154122_at |
| LocusLink: 10981 | FBgn0015788 | CG8024 | 288 | 1.9E−78 | 67 | 153524_at |
| LocusLink: 1103 | FBgn0000303 | CG12345 | 456 | 2E−128 | 38 | 142522_at |
| LocusLink: 11140 | FBgn0011573 | CG12019 | 327 | 1.1E−89 | 52 | 143662_at |
| LocusLink: 11143 | FBgn0031911 | CG5229 | 473 | 2E−133 | 50 | 153634_at |
| LocusLink: 1118 | FBgn0022702 | CG2054 | 246 | 1.9E−65 | 34 | 154429_at |
| LocusLink: 11182 | FBgn0031517 | CG15406 | 141 | 8.3E−34 | 26 | 145698_at |
| LocusLink: 116064 | FBgn0030209 | CG2892 | 171 | 2.3E−43 | 49 | 144806_at |
| LocusLink: 123169 | FBgn0019637 | CG1433 | 285 | 7.6E−77 | 56 | 154540_at |
| LocusLink: 124936 | FBgn0030099 | CG12056 | 156 | 2.2E−38 | 38 | 142420_at |
| LocusLink: 1360 | FBgn0032144 | CG17633 | 234 | 1.1E−61 | 33 | 146103_at |
| LocusLink: 1360 | FBgn0032144 | CG17633 | 234 | 1.1E−61 | 33 | 146103_at |
| LocusLink: 145226 | FBgn0033205 | CG2064 | 256 | 1.7E−68 | 47 | 141701_at |
| LocusLink: 7678 | FBgn0030010 | CG10959 | 185 | 4.6E−47 | 37 | 153749_at |
| LocusLink: 1510 | FBgn0032049 | CG13095 | 304 | 5.5E−83 | 45 | 152369_at |
| LocusLink: 1653 | FBgn0015075 | CG9054 | 872 | 0 | 58 | 141634_at |
| LocusLink: 1803 | FBgn0031741 | CG11034 | 396 | 4E−110 | 33 | 145847_at |
| LocusLink: 189 | FBgn0014031 | CG3926 | 173 | 5.7E−44 | 48 | 153046_at |
| LocusLink: 2052 | FBgn0034406 | CG15106 | 317 | 8.3E−87 | 38 | 154747_at |
| LocusLink: 217 | FBgn0032114 | CG3752 | 723 | 0 | 68 | 146084_at |
| LocusLink: 2191 | FBgn0031741 | CG11034 | 361 | 9E−100 | 31 | 145847_at |
| LocusLink: 2194 | FBgn0027571 | CG3523 | 1077 | 0 | 48 | 152126_at |
| LocusLink: 64137 | FBgn0031220 | CG4822 | 354 | 1E−117 | 40 | 143011_at |
| LocusLink: 2241 | FBgn0000723 | CG8874 | 523 | 1E−148 | 37 | 143164_at |
| LocusLink: 225689 | FBgn0030119 | CG2309 | 281 | 5.3E−76 | 50 | 144749_at |
| LocusLink: 22845 | FBgn0034141 | CG8311 | 147 | 1.6E−35 | 31 | 142795_at |
| LocusLink: 22858 | FBgn0032164 | CG4588 | 438 | 8E−123 | 65 | 146112_at |
| LocusLink: 22903 | FBgn0031098 | CG17068 | 137 | 1.9E−32 | 38 | 141427_at |
| LocusLink: 22911 | FBgn0034931 | CG2812 | 358 | 3E−99 | 52 | 147817_at |
| LocusLink: 22938 | FBgn0004856 | CG8264 | 521 | 5E−148 | 62 | 142686_at |
| LocusLink: 23080 | FBgn0030499 | CG11178 | 200 | 3.1E−51 | 30 | 153940_at |
| LocusLink: 231 | FBgn0033101 | CG9436 | 265 | 2.2E−71 | 44 | 142716_at |
| LocusLink: 23205 | FBgn0027348 | CG4501 | 474 | 6E−134 | 41 | 153318_at |
| LocusLink: 23762 | FBgn0020626 | CG6708 | 578 | 5E−165 | 44 | 154587_at |
| LocusLink: 246213 | FBgn0034394 | CG15096 | 133 | 1.2E−31 | 33 | 153069_at |
| LocusLink: 249 | FBgn0033423 | CG1809 | 351 | 5.8E−97 | 44 | 151956_at |
| LocusLink: 2539 | FBgn0004057 | CG12529 | 658 | 0 | 65 | 141547_at |
| LocusLink: 25766 | FBgn0031492 | CG3542 | 325 | 7.5E−89 | 52 | 154288_at |
| LocusLink: 2589 | FBgn0027558 | CG4445 | 440 | 1E−123 | 56 | 152222_at |
| LocusLink: 26085 | FBgn0031249 | CG11911 | 134 | 8.5E−32 | 34 | 141435_at |
| LocusLink: 2618 | FBgn0000053 | CG8761 | 597 | 2E−170 | 47 | 143062_at |
| LocusLink: 2639 | FBgn0031824 | CG9547 | 572 | 1E−163 | 68 | 152078_at |
| LocusLink: 2643 | FBgn0003162 | CG9441 | 259 | 1.3E−69 | 75 | 154812_at |
| LocusLink: 26503 | FBgn0031645 | CG3036 | 299 | 3.2E−81 | 36 | 151989_at |
| LocusLink: 27019 | FBgn0035100 | CG7051 | 143 | 5E−34 | 27 | 151818_at |
| LocusLink: 27244 | FBgn0034897 | CG11299 | 346 | 2.3E−95 | 43 | 154871_at |
| LocusLink: 27294 | FBgn0031417 | CG3597 | 220 | 1.2E−57 | 38 | 145636_at |
| LocusLink: 2752 | FBgn0001142 | CG2718 | 453 | 1E−127 | 58 | 141257_at |
| LocusLink: 2762 | FBgn0031661 | CG8890 | 526 | 1E−149 | 70 | 153281_at |
| LocusLink: 2764 | FBgn0028894 | CG5869 | 159 | 6.9E−40 | 53 | 141567_at |
| LocusLink: 28976 | FBgn0033637 | CG9006 | 197 | 2.4E−50 | 28 | 153329_at |
| LocusLink: 28996 | FBgn0035142 | CG17090 | 468 | 7E−132 | 55 | 151694_at |
| LocusLink: 2931 | FBgn0003371 | CG2621 | 582 | 4E−166 | 78 | 143343_i_at |
| LocusLink: 2932 | FBgn0003371 | CG2621 | 589 | 3E−168 | 75 | 143343_i_at |
| LocusLink: 29959 | FBgn0027497 | CG1098 | 479 | 2E−135 | 53 | 144182_at |
| LocusLink: 29988 | FBgn0034247 | CG6484 | 256 | 2.3E−68 | 34 | 142386_at |
| LocusLink: 3015 | FBgn0001197 | CG5499 | 190 | 2.2E−49 | 100 | 154022_at |
| LocusLink: 3654 | FBgn0010441 | CG5974 | 159 | 4.1E−39 | 34 | 142881_at |
| LocusLink: 3845 | FBgn0003205 | CG9375 | 266 | 4.5E−72 | 87 | 143317_at |
| LocusLink: 3988 | FBgn0032265 | CG18301 | 159 | 2.3E−39 | 29 | 146166_at |
| LocusLink: 4086 | FBgn0011648 | CG12399 | 662 | 0 | 74 | 143670_at |
| LocusLink: 4117 | FBgn0032164 | CG4588 | 430 | 2E−120 | 65 | 146112_at |
| LocusLink: 4125 | FBgn0027611 | CG6206 | 800 | 0 | 45 | 151851_at |
| LocusLink: 4285 | FBgn0033038 | CG7791 | 636 | 0 | 48 | 141715_at |
| LocusLink: 43 | FBgn0015568 | CG1031 | 208 | 6.6E−54 | 31 | 154652_at |
| LocusLink: 4547 | FBgn0032904 | CG9342 | 221 | 2.2E−57 | 25 | 141458_at |
| LocusLink: 4583 | FBgn0030561 | CG5228 | 367 | 2E−101 | 37 | 145061_at |
| LocusLink: 4640 | FBgn0010246 | CG9155 | 720 | 0 | 45 | 151960_at |
| LocusLink: 4677 | FBgn0028492 | CG10687 | 807 | 0 | 73 | 152066_at |
| LocusLink: 4848 | FBgn0017550 | CG2161 | 221 | 8E−58 | 54 | 153321_at |
| LocusLink: 5007 | FBgn0020626 | CG6708 | 549 | 3E−156 | 45 | 154587_at |
| LocusLink: 5066 | FBgn0033466 | CG12130 | 242 | 5.3E−64 | 33 | 154695_at |
| LocusLink: 5081 | FBgn0003145 | CG6716 | 318 | 8.7E−87 | 68 | 152870_at |
| LocusLink: 51116 | FBgn0031639 | CG2937 | 260 | 8.8E−70 | 61 | 145784_at |
| LocusLink: 51181 | FBgn0030968 | CG7322 | 192 | 2.1E−49 | 46 | 145332_at |
| LocusLink: 51200 | FBgn0033774 | CG12374 | 193 | 1.6E−49 | 30 | 147118_at |
| LocusLink: 51390 | FBgn0031245 | CG3625 | 173 | 1.1E−43 | 38 | 141831_at |
| LocusLink: 51533 | FBgn0031091 | CG9576 | 167 | 1.6E−41 | 35 | 155024_at |
| LocusLink: 5189 | FBgn0013563 | CG6760 | 313 | 2.9E−85 | 40 | 155032_at |
| LocusLink: 5225 | FBgn0032049 | CG13095 | 295 | 3.3E−80 | 43 | 152369_at |
| LocusLink: 5286 | FBgn0015278 | CG11621 | 719 | 0 | 36 | 142750_at |
| LocusLink: 5287 | FBgn0015278 | CG11621 | 719 | 0 | 39 | 142750_at |
| LocusLink: 5289 | FBgn0015277 | CG5373 | 520 | 1E−147 | 61 | 151517_at |
| LocusLink: 5331 | FBgn0004611 | CG4574 | 799 | 0 | 47 | 153733_at |
| LocusLink: 5428 | FBgn0004406 | CG8987 | 880 | 0 | 44 | 143008_at |
| LocusLink: 5439 | FBgn0032634 | CG6840 | 188 | 4E−49 | 78 | 146402_at |
| LocusLink: 54437 | FBgn0028679 | CG10913 | 589 | 5E−168 | 37 | 144243_at |
| LocusLink: 54933 | FBgn0030318 | CG1697 | 143 | 1.1E−34 | 34 | 141678_at |
| LocusLink: 5494 | FBgn0035425 | CG17746 | 214 | 5.7E−56 | 40 | 154425_at |
| LocusLink: 55349 | FBgn0001112 | CG1152 | 255 | 7.1E−68 | 34 | 143178_at |
| LocusLink: 55572 | FBgn0033093 | CG3270 | 374 | 6E−104 | 49 | 151882_at |
| LocusLink: 55632 | FBgn0005683 | CG5354 | 177 | 1.3E−44 | 33 | 153746_at |
| LocusLink: 5564 | FBgn0033383 | CG8057 | 255 | 1.8E−68 | 62 | 153026_at |
| LocusLink: 55677 | FBgn0030738 | CG9915 | 269 | 4.8E−72 | 43 | 145179_at |
| LocusLink: 55711 | FBgn0032055 | CG13091 | 220 | 1.5E−57 | 38 | 153064_at |
| LocusLink: 55920 | FBgn0031769 | CG9135 | 407 | 8E−114 | 48 | 154877_at |
| LocusLink: 5613 | FBgn0000489 | CG6117 | 441 | 5E−124 | 62 | 143130_at |
| LocusLink: 5645 | FBgn0032947 | CG17571 | 146 | 1.5E−35 | 37 | 146587_at |
| LocusLink: 5645 | FBgn0010425 | CG18681 | 144 | 5.6E−35 | 38 | 143624_at |
| LocusLink: 56997 | FBgn0030430 | CG4410 | 366 | 3E−101 | 51 | 151663_at |
| LocusLink: 57084 | FBgn0034394 | CG15096 | 144 | 4E−35 | 34 | 153069_at |
| LocusLink: 57122 | FBgn0027868 | CG6743 | 466 | 4E−131 | 33 | 144196_at |
| LocusLink: 57187 | FBgn0031390 | CG4263 | 355 | 6E−98 | 58 | 155165_at |
| LocusLink: 57508 | FBgn0030858 | CG8211 | 409 | 3E−114 | 43 | 153910_at |
| LocusLink: 57599 | FBgn0033607 | CG9062 | 699 | 0 | 56 | 147005_at |
| LocusLink: 5768 | FBgn0033814 | CG4670 | 263 | 2E−70 | 31 | 147135_at |
| LocusLink: 5770 | FBgn0003138 | CG9181 | 298 | 4.7E−81 | 49 | 141300_at |
| LocusLink: 5825 | FBgn0031069 | CG12703 | 719 | 0 | 59 | 145395_at |
| LocusLink: 58516 | FBgn0029738 | CG4068 | 147 | 1.6E−35 | 69 | 144501 _at |
| LocusLink: 5876 | FBgn0028970 | CG18627 | 415 | 2E−116 | 64 | 152961_at |
| LocusLink: 6262 | FBgn0011286 | CG10844 | 464 | 8E−131 | 58 | 143650_at |
| LocusLink: 6263 | FBgn0011286 | CG10844 | 465 | 4E−131 | 57 | 143650_at |
| LocusLink: 6342 | FBgn0032715 | CG17597 | 539 | 1E−153 | 63 | 141671_s_at |
| LocusLink: 6397 | FBgn0031814 | CG9528 | 580 | 1E−165 | 44 | 145899_at |
| LocusLink: 64137 | FBgn0031220 | CG4822 | 375 | 6E−104 | 37 | 143011_at |
| LocusLink: 64137 | FBgn0031516 | CG9663 | 240 | 3.2E−63 | 48 | 152940_at |
| LocusLink: 64172 | FBgn0031060 | CG14231 | 185 | 3E−47 | 37 | 154795_at |
| LocusLink: 6434 | FBgn0003742 | CG10128 | 137 | 7.1E−33 | 50 | 141588_at |
| LocusLink: 64426 | FBgn0031036 | CG14220 | 198 | 6E−51 | 42 | 145379_at |
| LocusLink: 64682 | FBgn0030639 | CG9198 | 251 | 1E−66 | 32 | 154789_at |
| LocusLink: 6515 | FBgn0033047 | CG7882 | 246 | 2.3E−65 | 35 | 146660_at |
| LocusLink: 6519 | FBgn0002570 | CG8696 | 347 | 1.1E−95 | 37 | 143242_at |
| LocusLink: 6519 | FBgn0033296 | CG11669 | 324 | 1.1E−88 | 36 | 146809_at |
| LocusLink: 6519 | FBgn0032382 | CG14935 | 362 | 3E−100 | 40 | 146257_at |
| LocusLink: 6519 | FBgn0033297 | CG8690 | 344 | 9.4E−95 | 38 | 146810_at |
| LocusLink: 6583 | FBgn0019952 | CG6331 | 196 | 2.1E−50 | 36 | 152843_at |
| LocusLink: 6583 | FBgn0033809 | CG4630 | 265 | 8E−71 | 32 | 153066_at |
| LocusLink: 6584 | FBgn0019952 | CG6331 | 196 | 1.6E−50 | 35 | 152843_at |
| LocusLink: 6584 | FBgn0033809 | CG4630 | 261 | 8.8E−70 | 32 | 153066_at |
| LocusLink: 6602 | FBgn0025463 | CG4303 | 587 | 8E−168 | 78 | 153648_at |
| LocusLink: 6652 | FBgn0024289 | CG1982 | 386 | 1E−107 | 55 | 141450_at |
| LocusLink: 6833 | FBgn0028675 | CG5772 | 205 | 3.2E−52 | 24 | 141744_at |
| LocusLink: 7694 | FBgn0034570 | CG10543 | 151 | 3.2E−36 | 34 | 147592_at |
| LocusLink: 79183 | FBgn0032783 | CG10237 | 151 | 6.4E−37 | 35 | 154963_at |
| LocusLink: 79258 | FBgn0027570 | CG9761 | 501 | 5E−142 | 37 | 152128_at |
| LocusLink: 79934 | FBgn0030430 | CG4410 | 372 | 4E−103 | 51 | 151663_at |
| LocusLink: 80013 | FBgn0030973 | CG7332 | 381 | 6E−106 | 42 | 154261_at |
| LocusLink: 80155 | FBgn0031020 | CG12202 | 627 | 8E−180 | 60 | 141774_at |
| LocusLink: 80221 | FBgn0031703 | CG12512 | 429 | 3E−120 | 39 | 145821_at |
| LocusLink: 8106 | FBgn0005648 | CG2163 | 211 | 3.9E−55 | 72 | 143566_i_at |
| LocusLink: 81492 | FBgn0034957 | CG3121 | 147 | 3.1E−35 | 29 | 152491_at |
| LocusLink: 81616 | FBgn0027348 | CG4501 | 520 | 2E−147 | 43 | 153318_at |
| LocusLink: 81796 | FBgn0034716 | CG3380 | 256 | 4.7E−68 | 28 | 142132_at |
| LocusLink: 829 | FBgn0034577 | CG10540 | 376 | 1E−104 | 64 | 152284_at |
| LocusLink: 830 | FBgn0034577 | CG10540 | 369 | 2E−102 | 61 | 152284_at |
| LocusLink: 8310 | FBgn0031813 | CG9527 | 510 | 2E−144 | 42 | 142194_at |
| LocusLink: 83544 | FBgn0028858 | CG10839 | 162 | 1.1E−40 | 52 | 144269_at |
| LocusLink: 836 | FBgn0028381 | CG14902 | 161 | 5.8E−40 | 37 | 144201_at |
| LocusLink: 840 | FBgn0028381 | CG14902 | 167 | 1.1E−41 | 32 | 144201_at |
| LocusLink: 84188 | FBgn0033464 | CG1441 | 316 | 2.1E−86 | 34 | 152521_at |
| LocusLink: 84191 | FBgn0034543 | CG10404 | 156 | 1.1E−38 | 57 | 147569_at |
| LocusLink: 8424 | FBgn0030575 | CG5321 | 256 | 2.6E−68 | 39 | 145074_at |
| LocusLink: 84312 | FBgn0030434 | CG4400 | 156 | 1.6E−38 | 42 | 144972_at |
| LocusLink: 84466 | FBgn0027594 | CG2086 | 280 | 2E−75 | 37 | 151918_s_at |
| LocusLink: 84947 | FBgn0032699 | CG10383 | 154 | 1.4E−37 | 37 | 152901_at |
| LocusLink: 85365 | FBgn0035401 | CG1291 | 398 | 4E−111 | 50 | 153189_at |
| LocusLink: 85415 | FBgn0026374 | CG8497 | 317 | 1.2E−86 | 37 | 144124_at |
| LocusLink: 85465 | FBgn0031948 | CG7149 | 217 | 7.4E−57 | 46 | 152382_at |
| LocusLink: 8708 | FBgn0031988 | CG8668 | 150 | 2.3E−36 | 33 | 154502_at |
| LocusLink: 8882 | FBgn0030096 | CG9060 | 407 | 6E−114 | 48 | 142846_at |
| LocusLink: 89978 | FBgn0030336 | CG1578 | 318 | 6.3E−87 | 60 | 154432_at |
| LocusLink: 4799 | FBgn0001978 | CG3647 | 224 | 0 | 41 | 151662_s_at |
| LocusLink: 9060 | FBgn0020389 | CG8363 | 786 | 0 | 62 | 154327_at |
| LocusLink: 9061 | FBgn0020389 | CG8363 | 788 | 0 | 62 | 154327_at |
| LocusLink: 9079 | FBgn0013764 | CG3924 | 430 | 1E−120 | 62 | 154317_at |
| LocusLink: 9100 | FBgn0035174 | CG13903 | 299 | 5.6E−81 | 40 | 142762_at |
| LocusLink: 9150 | FBgn0035026 | CG12252 | 382 | 7E−106 | 35 | 141451_at |
| LocusLink: 94233 | FBgn0014019 | CG5279 | 187 | 1.3E−47 | 33 | 153085_at |
| LocusLink: 94233 | FBgn0019940 | CG5192 | 194 | 7.9E−50 | 38 | 143905_at |
| LocusLink: 9444 | FBgn0017397 | CG10293 | 277 | 1E−74 | 50 | 143885_at |
| LocusLink: 9535 | FBgn0028894 | CG5869 | 150 | 3.2E−37 | 52 | 141567_at |
| LocusLink: 9619 | FBgn0031220 | CG4822 | 378 | 6E−105 | 37 | 143011_at |
| LocusLink: 9619 | FBgn0031516 | CG9663 | 252 | 8.1E−67 | 42 | 152940_at |
| LocusLink: 9619 | FBgn0003996 | CG2759 | 280 | 1.8E−75 | 32 | 143410_at |
| LocusLink: 9632 | FBgn0031408 | CG10882 | 800 | 0 | 52 | 141363_at |
| LocusLink: 9690 | FBgn0034989 | CG3356 | 673 | 0 | 36 | 141336_at |
| LocusLink: 9717 | FBgn0031814 | CG9528 | 570 | 8E−163 | 43 | 145899_at |
| LocusLink: 9785 | FBgn0030550 | CG1405 | 1354 | 0 | 58 | 154291_at |
| LocusLink: 9924 | FBgn0033352 | CG8232 | 726 | 0 | 39 | 154804_at |
| LocusLink: 994 | FBgn0003525 | CG1395 | 193 | 1.9E−49 | 38 | 141264_at |

Human genes are listed by Locus identification number (www.ncbi.nlm.nih.gov).
Drosophila genes are listed by Flybase gene identification number (FBgn) and its synonymous CG identification number (CG) (www.flybase.org).
The homology between the human and the Drosophila genes are demonstrated by the blast score, blast probability and percentage of protein sequence homology based on BLASP.

### Example 5

Additional Transgene Expression and Total RNA Isolation

[0223] Two additional genes in the insulin signaling pathway, dS6K and dPDK1. See Alessi et al.

[0224] 3-phosphoinositide-dependent protein kinase-1 (PDK1): structural and functional homology with the Drosophila DSTPK61 kinase, Curr Biol, Vol. 7, No. 10, pp. 776-789 (1997) are overexpressed in flies using the UAS-dS6K transgene. See Stewart and Barcelo, Genesis, Vol. 34, pp. 83-85 (2002) and EP(3)3553 (http://flybase.bio.indiana.edu/). UAS-dPDK1 transgenes, and total RNAs were isolated, by the same method as described in the “EXAMPLES” section, above, and illustrated in FIG. 1.

### Example 6

Alternative Method of Microarray Data Analysis

Experimental Flies and Control Flies

[0225] Male progeny flies carrying both hsp-Gal4 and UAS-transgene are served as the experimental flies for each overexpression experiment. Male flies carrying only hsp-Gal4 are served as the control flies for each overexpression experiment.

[0226] Male flies carrying both hsp-Gal4 and UAS-GFP are used to filter out genes whose transcription is affected by the induction of protein unrelated to ISP.

Identification of DEGs

[0227] The GeneChip™ Drosophila genome array used in this study contains 13,966 probe sets representing approximately 13,282 genes (many genes are represented by more than one probe set). The hybridization intensity data is calculated from the images generated by the Gene Array scanner (Affymetrix), using the Affymetrix Microarray Suite (MAS) 5.0. Microarrays are normalized by Affymetrix default settings in a way that the trimmed mean is set to a constant value and that the resulting scale factor is applied to all expression values of each chip. The trimmed mean is the average expression value after removing the 2% lowest and 2% highest observations. As the constant target value an average expression value of 150 is used. For each overexpression experiment, the identification of DEGs is performed on the signals obtained from the 4 samples of the experimental group versus the 4 samples of the control group using an R package [see Schwender (2003)] implementing the SAM algorithm as described in Tusher et al. (2001). The number of random experiment-label permutations is set to 100. The factor “s0” is computed as the minimum co-efficient of variation of the relative distance as a function of the gene specific scatter and turns out to be 0 in most cases. Affymetrix control probe sets and probe sets with “absent” calls in all 8 samples related to one experiment are discarded in the SAM analysis of the respective experiment. The selection criteria of the DEGs for each overexpression experiment are shown in Table 14. Briefly, the initial cut-off criteria is set as SAM q-value of ≦3% and fold change of ≧1.5. Furthermore, to limit the total number of DEGs for the follow-up analysis, the upper bound of the percentage of probe sets passing the SAM q-value and fold-change cutoffs in all the probe sets passing Affy MAS5 absent-call filtering is set at <10% for each experiment. SAM q-values are adjusted to meet this criterion for some experiments. Final numbers of differentially-expressed probe sets from each overexpression experiment are obtained by further filtering-out probe sets affected by GFP overexpression using the respective actually used cut-off criteria (see Table 14).

Gene Ontology Analysis

[0228] Every probe set on the GeneChip™ Drosophila genome array is annotated by integrating the information on the gene ontology (GO) web site (http://www.geneontology.org) with the information available from NetAFFX. See Liu et al. (2003). Each probe set on the chip is associated with its current gene entry (FBgn number). Next, each gene is associated to its available GO annotations for biological processes. The GO tree structure is restored and the number of genes that are annotated as belonging to a particular GO term and its child GO terms are annotated. Next, we calculate binomial probabilities to determine whether there is a strong association between a particular GO term and differential gene expression by the overexpression of an ISP component. For example, when overexpressing dPTEN, there are 493 differentially-expressed probe sets identified, corresponding to 488 genes. This is approximately 3.7% of the genes represented on the chip. We then compare the number of genes associated at and below a specific GO term from the differentially-expressed genes in response to dPTEN overexpression with the analogous number for the entire chip. If the DEGs from dPTEN overexpression experiment comprise 3.7% of the whole genome, then under the null hypothesis of no relationship between differential gene expression regulated by dPTEN overexpression and biological process, we expect (for each GO term) 3.7/100 as many genes from the DEGs in response to dPTEN overexpression as there are on the entire chip. For example, for the GO term protein metabolism, 671 genes are found on the chip, and 52 are represented in the DEGs from dPTEN overexpression experiment (see Table 16). The p-value associated with the null hypothesis of no association is obtained from binomial distribution with 671 tries, 0.037 probability of success, and >52 successes (p=4.84E−08). After multiple test correction by Benjamini and Hochberg false discovery rate [see Benjamini and Hochberg (1995)], we obtain a p-value of 7.00E−06. Thus, in this case, there is a significant association between protein metabolism and differential gene expression by the overexpression of dPTEN.

Identification of ISP-Regulated Genes

[0229] In this alternative analysis, a total of 631, 384, 493, 662, 710, 540 and 837 probe sets are found to be differentially-regulated following dAkt1, Dp110^{CAAX}, dPTEN, Dp110^{D954A}, dfoxo, dPDK1 and dS6K overexpression, respectively (see Table 15). These correspond to approximately 4.52%, 2.75%, 3.53%, 4.74%, 5.08%, 3.87% and 5.99% of the probe sets represented on the array, respectively. The complete DEG lists from different experiments are shown in Tables 18-25.

Biological Process Classification of DEGs

[0230] Molecular genetic studies have demonstrated that ISP in Drosophila regulates growth, cell proliferation, metabolism and aging. We were also interested in finding out what biological processes were affected by the overexpression of the known ISP components in Drosophila at transcription level. We used the annotation project directed by the GO to functionally classify these DEGs.

[0231] Although rapidly evolving, the GO contains information about biological processes on approximately 19% (2,477/13,282) of the genes represented on our array according to this analysis. Several biological processes are significantly over-represented in the sets of DEGs identified from different overexpression experiments (see details in Supplementary). A summary of biological process classification of the ISP-regulated DEGs is presented in Table 17.

Metabolism

[0232] ISP has been shown to regulate cellular metabolism. Therefore it is not surprising to see that certain metabolic processes are overrepresented by overexpression of ISP components. For example, there are significant associations between protein biosynthesis and metabolism and differential gene regulation by dPTEN and Dp110^{D954A}. There are 26 and 31 ribosomal or ribosomal-like proteins differentially-regulated by dPTEN and Dp110^{D954A}, respectively, 22 of them regulated by both genes. These genes are generally down-regulated by dPTEN, Dp110^{D954A} and dfoxo, and relatively no change by dAkt1, Dp110^{CAAX}, dPDK1 and dS6K. Moreover, two genes [Su(var)3-9 and eRF1] involved in translational initiation and termination, respectively, are differentially-regulated by both dPTEN and Dp110^{D954A}, respectively. Three other genes (Paip2, elF3-S8 and elF3-S9) involved in negative regulation of translation and translational initiation are also differentially-regulated by Dp110^{D954A}. Taken together, it clearly shows that protein biosynthesis and the general translational machinery are regulated by ISP components.

[0233] Also interestingly, several kinase-encoding genes involved in protein amino acid phosphorylation are differentially-regulated by either dPTEN or Dp110^{D954A}, or by both genes. For example, SAK, which is up-regulated by Dp110^{D954A}, encodes a protein serine/threonine kinase that is required for appropriate exit from mitosis. See Hudson et al. (2001). MAPk-Ak2, which is up-regulated by Dp110^{D954A}, encodes a MAP kinase activated, protein serine/threonine kinase that phosphorylates small heat-shock proteins. See Rouse et al. (1994); and Larochelle and Suter (1995). CaMKII, which is also up-regulated by Dp110^{D954A}, encodes a calcium/calmodulin-dependent, protein serine/threonine kinase that is one of the major protein kinases coordinating cellular responses to neurotransmitters and hormones. See Ohsako et al. (1993); and Griffith et al. (1993). Wee, which is up-regulated by both dPTEN and Dp110^{D954A}, encodes a protein tyrosine kinase that is a Cdc2 inhibitory kinase required for preventing premature activation of the mitotic program. See Campbell et al. (1995). Interestingly, generally speaking, these genes are up-regulated by dPTEN, Dp110^{D954A} and dfoxo, and relatively no change or slightly down-regulated by dAkt1, Dp110^{CAAX}, dPDK1 and dS6K.

[0234] PI3K-PKB-Forkhead signaling has been shown to protect quiescent cells from oxidative stress in mammalian systems. See Kops et al. (2002). Reactive oxygen species are a primary cause of cellular damage that leads to cell death. PKB-regulated Forkhead transcription factor FOXO3a has been shown to be able to protect quiescent cells from oxidative stress by directly increasing their quantities of manganese superoxide dismutase (MnSOD, encoded by SOD2) mRNA and protein. Consistent with this observation from mammalian study, the fly homolog of human SOD2 is also up-regulated by dfoxo overexpression, and the biological process “superoxide metabolism” is over-represented (multiple test adjusted p=0.077). Also interestingly, electron transport process is over-represented by dfoxo overexpression, with CoVa, CG4769, Cyt-c-p (encode a cytochrome c oxidase, a Cytochrome_C1-like electron transporter and an electron transporter, respectively) up-regulated whereas Cyt-b5 and Trxr-1 (encode an electron transporter and a thioredoxin reductase) down-regulated.

[0235] IMP metabolism/biosynthesis was found to be significantly associated with differential gene expression by dS6K overexpression. Three genes ade2, ade3 and Prat, encoding a phosphoribosylformylglycinamidine synthase, a phosphoribosylamine-glycine ligase, and a amidophosphoribosyltransferase, respectively, are up-regulated by dS6K overexpression.

TABLE 14
Overview of the Filter and Cut-Offs Used to Identify Differentially-Expressed
Probe Sets for Each Overexpression Experiment

| | Probe Sets Passing | Cut-Off Criteria | | | |
|---|---|---|---|---|---|
| Overexpression | Affy MAS5 Absent- | SAM | | | Probe Sets Passing |
| Experiment | Call Filtering^{a} | q-value | Fold | %^{b} | Cut-Offs^{c} |
| dPDK1 | 9568 | ≦3% | ≧1.5 | 5.6 | 540 |
| dS6K | 9548 | ≦3% | ≧1.5 | 8.8 | 837 |
| Dp110^{CAAX} | 7166 | ≦3% | ≧1.5 | 5.4 | 384 |
| dAkt1 | 7275 | ≦3% | ≧1.5 | 8.7 | 631 |
| Dp110^{D954A} | 7926 | ≦2% | ≧1.5 | 8.4 | 662 |
| dPTEN | 7412 | ≦1.5% | ≧1.5 | 6.7 | 493 |
| dfoxo | 7648 | ≦0.59% | ≧1.5 | 9.3 | 710 |
| ^{a}Probe sets with MAS5 absent calls in all samples of each experiment were discarded. | | | | | |
| ^{b}Represents percentage of probe sets passing the SAM q-value and fold-change cut-offs in all the probe sets passing Affy MAS5 absent-call filtering for each experiment. The SAM q-value and fold-change cutoffs were | | | | | |
| # initially set at 3% and 1.5, respectively. Furthermore, the upper bound of the percentage of probe sets passing the SAM q-value and fold-change cut-offs in all the probe sets passing Affy MAS5 absent-call filtering was set | | | | | |
| # at 10% for each experiment. SAM q-values were adjusted to meet this criterion. | | | | | |

^{c}Final numbers of differentially-expressed probe sets from each overexpression experiment were obtained by filtering out probe sets affected by GFP overexpression using the respective actually used cut-off criteria.

[0236] TABLE 15
Overview of the Numbers of Probe Sets Differentially-Expressed
Following Overexpression of Major ISP Components

| Overexpression | | Up- | Down- |
|---|---|---|---|
| Experiment | Total | Regulated | Regulated |
| dAkt1 | 631 | 243 | 388 |
| Dp110^{CAAX} | 384 | 187 | 197 |
| dfoxo | 710 | 321 | 389 |
| dPTEN | 493 | 192 | 301 |
| Dp110^{D954A} | 662 | 275 | 387 |
| dPDK1 | 540 | 292 | 248 |
| dS6K | 837 | 482 | 355 |

[0237] TABLE 16
Numbers of Overlapped Differentially-Regulated Genes Between
Different Overexpression Experiments

| | Dp110^{CAAX} | (384) | dfoxo | (710) | dPTEN | (493) | Dp110^{D954A} | (662) | dPDK1 | (540) | dS6K | (837) |
|---|---|---|---|---|---|---|---|---|---|---|---|---|
| | ↑ | ↓ | ↑ | ↓ | ↑ | ↓ | ↑ | ↓ | ↑ | ↓ | ↑ | ↓ |
| | (187) | (197) | (321) | (389) | (192) | (301) | (275) | (387) | (292) | (248) | (482) | (355) |
| dAkt1 (631) | | | | | | | | | | | | |
| ↑ (243) | 0 | | 10 | | 6 | | 10 | | 15 | 14 | 4 | 51 |
| ↓ (388) | 1 | 105 | 9 | 128 | 4 | 102 | 4 | 98 | 54 | 12 | 104 | 7 |
| Dp110^{CAAX} (384) | | | | | | | | | | | | |
| ↑ (187) | | | 27 | | 6 | | 15 | | 8 | 25 | 7 | 43 |
| ↓ (197) | | | 9 | 82 | 1 | 51 | 1 | 54 | 55 | 6 | 80 | 9 |
| dfoxo (710) | | | | | | | | | | | | |
| ↑ (321) | | | | | 1 | | 2 | | 20 | 6 | 34 | 10 |
| ↓ (389) | | | | | 0 | 182 | 1 | 169 | 58 | 18 | 78 | 30 |
| dPTEN (493) | | | | | | | | | | | | |
| ↑ (192) | | | | | | | 1 | | 8 | 15 | 9 | 7 |
| ↓ (301) | | | | | | | 0 | 192 | 30 | 13 | 50 | 9 |
| Dp110^{D954A} (662) | | | | | | | | | | | | |
| ↑ (275) | | | | | | | | | 13 | 13 | 23 | 5 |
| ↓ (387) | | | | | | | | | 25 | 29 | 41 | 30 |
| dPDK1 (540) | | | | | | | | | | | | |
| ↑ (292) | | | | | | | | | | | 135 | 5 |
| ↓ (248) | | | | | | | | | | | 17 | 60 |

Overview of the numbers of overlapped genes that were differentially-expressed following overexpression of ISP components.
↑ = up-regulation following overexpression
↓ = down-regulation following overexpression
Numbers in parentheses represent the number of differentially-regulated genes in each category.

[0238] TABLE 17
Biological Process Classification of Genes Significantly Differentially-Regulated
Following Overexpression of ISP Components Using GO

| Process Ontology | GO ID | Chip | dPTEN | Dp110^{D954A} | dS6K | dfoxo | Dp110^{CAAX} | dAKT1 | dPDK1 |
|---|---|---|---|---|---|---|---|---|---|
| Metabolism | GO: 0008152 | 1347 | 75** | 95** | | | | | |
| Biosynthesis | GO: 0009058 | 305 | 29** | 42** | | | | | |
| Macromolecule | GO: 0009059 | 213 | 29** | 37** | | | | | |
| biosynthesis | | | | | | | | | |
| Protein biosynthesis | GO: 0006412 | 213 | 29** | 37** | | | | | |
| Protein metabolism | GO: 0019538 | 671 | 52** | 64** | | | | | |
| Hormone metabolism | GO: 0042445 | 9 | 3* | | | | | | |
| Hormone catabolism | GO: 0042447 | 2 | 2* | | | | | | |
| Lipid catabolism | GO: 0016042 | 2 | 2* | | | | | | |
| Isoprenoid catabolism | GO: 0008300 | 2 | 2* | | | | | | |
| Polyisoprenoid | GO: 0016097 | 2 | 2* | | | | | | |
| catabolism | | | | | | | | | |
| Terpenoid catabolism | GO: 0016115 | 2 | 2* | | | | | | |
| Sesquiterpenoid | GO: 0016107 | 2 | 2* | | | | | | |
| catabolism | | | | | | | | | |
| Juvenile hormone | GO: 0006719 | 2 | 2* | | | | | | |
| catabolism | | | | | | | | | |
| Polyisoprenoid | GO: 0016096 | 2 | 2* | | | | | | |
| metabolism | | | | | | | | | |
| Terpenoid metabolism | GO: 0006721 | 2 | 2* | | | | | | |
| Sesquiterpenoid | GO: 0006714 | 2 | 2* | | | | | | |
| metabolism | | | | | | | | | |
| Juvenile hormone | GO: 0006716 | 2 | 2* | | | | | | |
| metabolism | | | | | | | | | |
| Terpene metabolism | GO: 0042214 | 2 | 2* | | | | | | |
| Terpene catabolism | GO: 0046247 | 2 | 2* | | | | | | |
| Nucleobase, nucleoside, | | | | | | | | | |
| nucleotide and nucleic | | | | | | | | | |
| acid metabolism | | | | | | | | | |
| Nucleotide metabolism | | | | | | | | | |
| Nucleoside | GO: 0009123 | 5 | | | 3* | | | | |
| monophosphate | | | | | | | | | |
| metabolism | | | | | | | | | |
| Nucleoside | GO: 0009124 | 5 | | | 3* | | | | |
| monophosphate | | | | | | | | | |
| biosynthesis | | | | | | | | | |
| Purine nucleoside | GO: 0009127 | 5 | | | 3* | | | | |
| monophosphate | | | | | | | | | |
| biosynthesis | | | | | | | | | |
| Purine nucleoside | GO: 0009126 | 5 | | | 3* | | | | |
| monophosphate | | | | | | | | | |
| metabolism | | | | | | | | | |
| Ribonucleoside | GO: 0009161 | 5 | | | 3* | | | | |
| monophosphate | | | | | | | | | |
| metabolism | | | | | | | | | |
| Ribonucleoside | GO: 0009156 | 5 | | | 3* | | | | |
| monophosphate | | | | | | | | | |
| biosynthesis | | | | | | | | | |
| Purine ribonucleoside | GO: 0009167 | 5 | | | 3* | | | | |
| monophosphate | | | | | | | | | |
| metabolism | | | | | | | | | |
| Purine ribonucleoside | GO: 0009168 | 5 | | | 3* | | | | |
| monophosphate | | | | | | | | | |
| biosynthesis | | | | | | | | | |
| IMP metabolism | GO: 0046040 | 4 | | | 3* | | | | |
| IMP biosynthesis | GO: 0006188 | 4 | | | 3* | | | | |
| De novo IMP biosynthesis | GO: 0006189 | 4 | | | 3* | | | | |
| Electron transport | GO: 0006118 | 16 | | | | 5* | | | |
| Cell growth and/or | | | | | | | | | |
| maintenance | | | | | | | | | |
| Cell growth | | | | | | | | | |
| Regulation of cell growth | | | | | | | | | |
| Positive regulation of | GO: 0030307 | 7 | 3* | | | | | | |
| cell growth | | | | | | | | | |
| Transport | | | | | | | | | |
| Lipid transport | GO: 0006869 | 2 | 2* | | | | | | |
| Hydrogen transport | GO: 0006818 | 14 | | | | 5* | | | |
| Response to external | GO: 0009605 | 272 | | | 31* | 30** | 17* | 34** | |
| stimulus | | | | | | | | | |
| Response to abiotic | | | | | | | | | |
| stimulus | | | | | | | | | |
| Response to chemical | | | | | | | | | |
| substance | | | | | | | | | |
| Response to toxin | GO: 0009636 | 14 | 4* | | | | | | |
| Response to insecticide | GO: 0017085 | 12 | 4* | | | | | | |
| Response to temperature | GO: 0009266 | 22 | 5* | 7** | | 6* | | 9** | |
| Response to heat | GO: 0009408 | 21 | 5* | 7** | | | | 8** | |
| Response to biotic | GO: 0009607 | 116 | | | 17* | 18** | 13* | 19** | |
| stimulus | | | | | | | | | |
| Defense response | GO: 0006952 | 101 | | | 17* | 17** | 12* | 17** | |
| Immune response | GO: 0006955 | 54 | | | 11* | 11** | 7* | 10* | |
| Humoral immune response | GO: 0006959 | 45 | | | 11* | 10** | 7* | 8* | |
| Antimicrobial humoral | GO: 0019730 | 43 | | | 10* | 9* | 7* | | |
| response | | | | | | | | | |
| Humoral defense | GO: 0016065 | 36 | | | 10* | 9** | 6* | 7* | |
| mechanism (sensu | | | | | | | | | |
| Invertebrata) | | | | | | | | | |
| Antimicrobial humoral | GO: 0006960 | 34 | | | 9* | 8* | 6* | | |
| response (sensu | | | | | | | | | |
| Invertebrata) | | | | | | | | | |
| Response to | GO: 0009613 | 49 | | | 12* | 11** | 7* | 9* | |
| pest/pathogen/parasite | | | | | | | | | |
| Response to stress | GO: 0006950 | 96 | | 15** | 17* | 18** | 9* | 20** | |
| Homeostasis | GO: 0042592 | 15 | | | | | | | 6** |
| Cell homeostasis | GO: 0019725 | 15 | | | | | | | 6** |
| Development | | | | | | | | | |
| Oogenesis (sensu Insecta) | GO: 0009993 | 113 | | 15* | | | | | |

GO IDs and terms are provided for the pathways that show significant over-representation in the sets of DEGs identified from different overexpression experiments.
Data comprise the number of genes in each GO category present on the entire chip and the number present in the set of DEGs from each overexpression experiment.
**= a higher significant association between the functional group and overexpression of an insulin pathway component (p < 0.05, multiple test correction by Benjamini and Hochberg false discovery rate).
*= a significant association between the functional group and overexpression of an insulin pathway component (p < 0.005, multiple test correction by Benjamini and Hochberg false discovery rate).

[0239] TABLE 18
The Top 20 Down-Regulated and Top 20 Up-Regulated Genes in Response to dAKT1 Overexpression Ranked by Fold Change

| | SAM | Fold | | Gene | | | |
|---|---|---|---|---|---|---|---|
| Probe Set | q-value | Change | FBgn | Symbol | EC Number | Biological Process (GO) | Molecular Function (GO) |
| 152766_at | 0.011 | 47.8 | FBgn0002563 | Lsp1&bgr; | — | | nutrient reservoir activity |
| 146819_at | 0.015 | 20.8 | FBgn0033307 | CG14752 | — | | |
| 143239_at | 0.010 | 19.4 | FBgn0002565 | Lsp2 | — | | nutrient reservoir activity |
| 141264_at | 0.020 | 11.9 | FBgn0003525 | stg | EC: 3.1.3.48 | tracheal cell fate | protein tyrosine |
| | | | | | | determination | phosphatase activity |
| | | | | | | (sensu Insecta) | |
| 146958_at | 0.021 | 11.4 | FBgn0033541 | CG12934 | — | | |
| 142220_at | 0.017 | 9.8 | FBgn0033367 | CG8193 | EC: 1.14.18.1 | defense response | monophenol |
| | | | | | | | monooxygenase activity |
| 152245_at | 0.011 | 9.3 | FBgn0033857 | CG13335 | — | | |
| 152078_at | 0.011 | 9.1 | FBgn0031824 | CG9547 | EC: 1.3.99.7 | | acyl-CoA dehydrogenase |
| | | | | | | | activity |
| 142733_at | 0.013 | 8.1 | FBgn0036948 | CG7298 | — | | chitin binding activity |
| 147430_at | 0.012 | 7.8 | FBgn0034328 | CG15066 | — | | |
| 149371_at | 0.013 | 7.7 | FBgn0037405 | CG1077 | — | | |
| 152687_at | 0.011 | 6.5 | FBgn0030688 | CG8952 | EC: 3.4.21 | | serine-type endopeptidase |
| | | | | | | | activity |
| 143112_at | 0.030 | 6.2 | FBgn0000360 | Cp38 | — | insect chorion | structural constituent of |
| | | | | | | formation | chorion (sensu Insecta) |
| 151927_at | 0.019 | 6.1 | FBgn0036619 | CG4784 | — | | |
| 141389_at | 0.024 | 6.1 | FBgn0034582 | CG10531 | EC: 3.2.1.14 | | hydrolase activity |
| 145820_at | 0.027 | 6.0 | FBgn0031701 | TotM | — | humoral defense | |
| | | | | | | mechanism (sensu | |
| | | | | | | Invertebrata) | |
| 146096_at | 0.027 | 5.7 | FBgn0032132 | CG4382 | EC: 3.1.1.1 | | carboxylic ester hydrolase |
| | | | | | | | activity |
| 149304_at | 0.015 | 5.7 | FBgn0037289 | CG2016 | — | | |
| 142217_at | 0.014 | 5.5 | FBgn0011276 | HLH3B | — | | transcription factor activity |
| 152747_at | 0.029 | 5.1 | FBgn0011828 | Pxn | EC: 1.11.1.7 | | peroxidase activity |
| 141292_at | 0.016 | 5.0 | FBgn0037370 | CG1236 | EC: 1.1.1.95 | | phosphoglycerate |
| | | | | | | | dehydrogenase activity |
| 147118_at | 0.011 | −4.6 | FBgn0033774 | CG12374 | EC: 3.4.17.1 | | carboxypeptidase A activity |
| 143295_at | 0.011 | −4.8 | FBgn0003046 | Pcp | — | | structural constituent of |
| | | | | | | | pupal cuticle (sensu |
| | | | | | | | Insecta) activity |
| 150937_at | 0.011 | −4.8 | FBgn0039840 | CG11340 | — | | extracellular ligand-gated |
| | | | | | | | ion channel activity |
| 148963_at | 0.012 | −5.1 | FBgn0036737 | CG6298 | EC: 3.4.21.1 | | trypsin activity |
| 154976_at | 0.016 | −5.2 | FBgn0004901 | Prat | EC: 2.4.2.14 | metabolism | amidophosphoribosyl- |
| | | | | | | | transferase activity |
| 152313_at | 0.025 | −5.3 | FBgn0015714 | Cyp6a17 | EC: 1.14.14.1 | electron transport | cytochrome P450 activity |
| 149767_at | 0.011 | −5.4 | FBgn0038033 | CG10097 | — | | |
| 143835_at | 0.010 | −5.4 | FBgn0015657 | DnaJ-1 | — | | chaperone activity |
| 151932_at | 0.010 | −5.6 | FBgn0000406 | Cyt-b5-r | — | electron transport | electron transporter activity |
| 143468_at | 0.011 | −5.9 | FBgn0004429 | LysP | EC: 3.2.1.17 | antimicrobial | lysozyme activity |
| | | | | | | humoral response | |
| | | | | | | (sensu | |
| | | | | | | Invertebrata) | |
| 141450_at | 0.010 | −7.9 | FBgn0024289 | Sodh-1 | EC: 1.1.1.14 | | L-iditol 2-dehydrogenase |
| | | | | | | | activity |
| 150574_at | 0.010 | −8.6 | FBgn0039309 | CG11891 | — | | |
| 145061_at | 0.017 | −8.8 | FBgn0030561 | CG5228 | — | | |
| 146257_at | 0.011 | −8.9 | FBgn0032382 | CG14935 | EC: 3.2.1.20 | | alpha-amylase activity |
| 151781_at | 0.016 | −9.1 | FBgn0039342 | CG5107 | — | | |
| 143038_at | 0.010 | −9.6 | FBgn0037207 | Mes2 | — | | |
| 151967_at | 0.011 | −9.8 | FBgn0032287 | CG6415 | EC: 2.1.2.10 | | aminomethyltransferase |
| | | | | | | | activity |
| 150206_at | 0.010 | −11.2 | FBgn0038718 | CG17752 | — | | transporter activity |
| 150699_at | 0.010 | −14.7 | FBgn0039471 | CG6295 | EC: 3.1.1.3 | | enzyme activity |
| 143789_at | 0.010 | −18.9 | FBgn0015279 | Pi3K92E | EC: 2.7.1.137 | phosphorylation | phosphatidylinositol 3- |
| | | | | | | | kinase activity |

[0240] TABLE 19
The Top 20 Down-Regulated and Top 20 Up-Regulated Genes in Response
to Dp110^{CAAX} Overexpression Ranked by Fold Change

| | SAM | Fold | | Gene | | Biological | |
|---|---|---|---|---|---|---|---|
| Probe Set | q-value | Change | FBgn | Symbol | EC Number | Process (GO) | Molecular Function (GO) |
| 152766_at | 0.022 | 12.6 | FBgn0002563 | Lsp1&bgr; | — | | nutrient reservoir activity |
| 144058_at | 0.020 | 11.9 | FBgn0025390 | EG: 56G7.1 | — | | chitin binding activity |
| 146819_at | 0.024 | 9.6 | FBgn0033307 | CG14752 | — | | |
| 143470_at | 0.024 | 9.2 | FBgn0004431 | LysX | EC: 3.2.1.17 | antimicrobial | lysozyme activity |
| | | | | | | humoral response | |
| | | | | | | (sensu | |
| | | | | | | Invertebrata) | |
| 143239_at | 0.021 | 7.8 | FBgn0002565 | Lsp2 | — | | nutrient reservoir activity |
| 149371_at | 0.024 | 6.9 | FBgn0037405 | CG1077 | — | | |
| 149304_at | 0.023 | 6.6 | FBgn0037289 | CG2016 | — | | |
| 149808_at | 0.021 | 6.6 | FBgn0038095 | Cyp304a1 | — | electron transport | cytochrome P450 activity |
| 146141_at | 0.027 | 6.3 | FBgn0032221 | CG5375 | — | | |
| 143112_at | 0.029 | 6.2 | FBgn0000360 | Cp38 | — | insect chorion | structural constituent of |
| | | | | | | formation | chorion (sensu Insecta) |
| 142220_at | 0.022 | 5.6 | FBgn0033367 | CG8193 | EC: 1.14.18.1 | defense response | monophenol |
| | | | | | | | monooxygenase activity |
| 152078_at | 0.028 | 5.4 | FBgn0031824 | CG9547 | EC: 1.3.99.7 | | acyl-CoA dehydrogenase |
| | | | | | | | activity |
| 154291_at | 0.023 | 5.1 | FBgn0030550 | CG1405 | — | | |
| 141331_at | 0.020 | 4.9 | FBgn0033137 | Tsp42Ep | — | | |
| 152687_at | 0.021 | 4.8 | FBgn0030688 | CG8952 | EC: 3.4.21 | | serine-type |
| | | | | | | | endopeptidase activity |
| 144238_at | 0.025 | 4.7 | FBgn0028573 | prc | — | heart development | |
| 141389_at | 0.020 | 4.6 | FBgn0034582 | CG10531 | EC: 3.2.1.14 | | hydrolase activity |
| 146780_at | 0.024 | 4.6 | FBgn0033242 | CG2916 | — | | |
| 150760_at | 0.020 | 4.5 | FBgn0039564 | CG5527 | — | | endothelin-converting |
| | | | | | | | enzyme activity |
| 141292_at | 0.028 | 4.4 | FBgn0037370 | CG1236 | EC: 1.1.1.95 | | phosphoglycerate |
| | | | | | | | dehydrogenase activity |
| 148400_at | 0.024 | 4.3 | FBgn0035886 | CG7118 | EC: 3.4.21 | | trypsin activity |
| 150702_at | 0.024 | −4.3 | FBgn0039474 | CG6283 | EC: 3.1.1.3 | | enzyme activity |
| 152351_at | 0.022 | −4.3 | FBgn0035950 | CG5288 | EC: 2.7.1.6 | | galactokinase activity |
| 143385_at | 0.021 | −4.3 | FBgn0003863 | &agr; Try | EC: 3.4.21.4 | proteolysis and | trypsin activity |
| | | | | | | peptidolysis | |
| 149914_at | 0.021 | −4.4 | FBgn0038257 | smp-30 | — | | |
| 151091_at | 0.020 | −4.5 | FBgn0040606 | CG6503 | — | | |
| 150031_at | 0.022 | −4.6 | FBgn0038450 | CG17560 | — | | |
| 151797_at | 0.025 | −4.8 | FBgn0032820 | fbp | EC: 3.1.3.11 | | fructose-bisphosphatase |
| | | | | | | | activity |
| 150699_at | 0.021 | −4.9 | FBgn0039471 | CG6295 | EC: 3.1.1.3 | | enzyme activity |
| 143468_at | 0.021 | −5.0 | FBgn0004429 | LysP | EC: 3.2.1.17 | antimicrobial | lysozyme activity |
| | | | | | | humoral response | |
| | | | | | | (sensu | |
| | | | | | | Invertebrata) | |
| 150403_at | 0.022 | −5.0 | FBgn0039030 | CG6660 | — | | |
| 151490_s_at | 0.021 | −5.3 | GH04896.3 | CG12138 | — | | |
| | | | prime-hit | | | | |
| 153064_at | 0.021 | −5.5 | FBgn0032055 | CG13091 | — | | |
| 148253_at | 0.022 | −5.7 | FBgn0035664 | CG6467 | EC: 3.4.21 | | serine-type |
| | | | | | | | endopeptidase activity |
| 147459_at | 0.021 | −7.0 | FBgn0034382 | CG18609 | — | | |
| 146569_at | 0.022 | −7.1 | FBgn0032913 | CG9259 | — | | |
| 151776_at | 0.020 | −7.6 | FBgn0037763 | CG16904 | — | | |
| 151781_at | 0.027 | −8.4 | FBgn0039342 | CG5107 | — | | |
| 150206_at | 0.021 | −8.8 | FBgn0038718 | CG17752 | — | | transporter activity |
| 152623_at | 0.023 | −9.3 | FBgn0015570 | Est2 | EC: 3.1.1.1 | | carboxylesterase activity |
| 147334_at | 0.023 | −9.7 | FBgn0034160 | CG5550 | — | | |
| 149767_at | 0.021 | −9.9 | FBgn0038033 | CG10097 | — | | |
| 152313_at | 0.026 | −10.1 | FBgn0015714 | Cyp6a17 | EC: 1.14.14.1 | electron transport | cytochrome P450 activity |

[0241] TABLE 20
The Top 20 Down-Regulated and Top 20 Up-Regulated Genes in
Response to dPTEN Overexpression Ranked by Fold Change

| | SAM | Fold | | Gene | | Biological Process | |
|---|---|---|---|---|---|---|---|
| Probe Set | q-value | change | FBgn | Symbol | EC Number | (GO) | Molecular Function (GO) |
| 144474_at | 0.012 | 8.7 | FBgn0029703 | CG12692 | — | | |
| 143239_at | 0.012 | 8.0 | FBgn0002565 | Lsp2 | — | | nutrient reservoir activity |
| 153741_at | 0.012 | 6.5 | FBgn0028509 | cenG1A | — | small GTPase | ARF GTPase activator |
| | | | | | | mediated signal | activity |
| | | | | | | transduction | |
| 148259_at | 0.011 | 6.0 | FBgn0035673 | CG6602 | — | | |
| 151514_at | 0.012 | 5.3 | GH12677.3 | — | — | | |
| | | | prime-hit | | | | |
| 142040_at | 0.014 | 5.0 | LD33980.3 | CG10623 | — | | |
| | | | prime-hit | | | | |
| 142259_at | 0.013 | 4.6 | FBgn0000028 | acj6 | — | synaptic target | RNA polymerase II |
| | | | | | | recognition | transcription factor activity |
| 151899_at | 0.013 | 4.5 | FBgn0036992 | CG11796 | EC: 1.13.11.27 | | 4-hydroxyphenylpyruvate |
| | | | | | | | dioxygenase activity |
| 151644_at | 0.012 | 4.5 | LD16427.3 | — | — | | |
| | | | prime-hit | | | | |
| 154969_at | 0.014 | 4.2 | FBgn0037644 | CG11964 | — | | |
| 152021_at | 0.013 | 4.2 | FBgn0004237 | Hrb87F | — | | RNA binding activity |
| 153539_at | 0.013 | 4.2 | FBgn0026077 | Gasp | — | | structural constituent of |
| | | | | | | | peritrophic membrane |
| | | | | | | | (sensu Insecta) |
| 142441_at | 0.012 | 4.1 | FBgn0001122 | G-o&agr; | EC: 3.6.1.46 | G-protein coupled | heterotrimeric G-protein |
| | | | | 47A | | receptor protein | GTPase activity |
| | | | | | | signaling pathway | |
| 147491_at | 0.012 | 3.8 | FBgn0034435 | CG9975 | — | | |
| 147598_at | 0.014 | 3.7 | FBgn0034581 | CG3986 | — | | |
| 143858_at | 0.014 | 3.7 | FBgn0015924 | crq | — | defense response | scavenger receptor activity |
| 154590_at | 0.013 | 3.6 | FBgn0036378 | CG10046 | — | | |
| 142202_at | 0.014 | 3.5 | FBgn0034664 | CG4377 | — | | |
| 153758_at | 0.012 | 3.5 | FBgn0000338 | cnc | — | regulation of pole | RNA polymerase II |
| | | | | | | plasm oskar mRNA | transcription factor activity |
| | | | | | | localization | |
| 143588_at | 0.012 | 3.5 | FBgn0010228 | HmgZ | — | | DNA binding activity |
| 146646_at | 0.012 | 3.5 | FBgn0033028 | CG11665 | — | | monocarboxylic acid |
| | | | | | | | transporter activity |
| 152129_at | 0.014 | 3.3 | FBgn0027569 | BcDNA: | EC: 2.7.1.37 | | protein serine |
| | | | | GH07688 | | | |
| 149230_at | 0.013 | −5.5 | FBgn0037163 | CG11440 | EC: 3.1.3.4 | dephosphorylation | phosphatidate phosphatase |
| | | | | | | | activity |
| 150206_at | 0.012 | −5.5 | FBgn0038718 | CG17752 | — | | transporter activity |
| 149206_at | 0.012 | −5.7 | FBgn0037126 | CG14567 | — | | |
| 152137_at | 0.012 | −5.9 | FBgn0039754 | CG9747 | — | | acyl-CoA delta(11)- |
| | | | | | | | desaturase activity |
| 142139_at | 0.013 | −6.0 | FBgn0029549 | CG3699 | — | | |
| 150947_at | 0.014 | −6.1 | FBgn0039853 | CG11518 | — | | |
| 148056_at | 0.012 | −6.1 | FBgn0035358 | CG14949 | — | | |
| 149329_at | 0.012 | −6.4 | FBgn0037323 | CG2663 | — | | tocopherol binding activity |
| 151094_at | 0.012 | −6.4 | FBgn0040609 | CG3348 | — | | |
| 143295_at | 0.012 | −6.6 | FBgn0003046 | Pcp | — | | structural constituent of |
| | | | | | | | pupal cuticle (sensu |
| | | | | | | | Insecta) activity |
| 145474_at | 0.012 | −6.9 | FBgn0031176 | CG1678 | — | | |
| 147409_at | 0.012 | −7.1 | FBgn0034294 | CG5765 | — | | |
| 154890_at | 0.012 | −7.1 | FBgn0036289 | CG10657 | — | | retinal binding activity |
| 148553_at | 0.012 | −7.1 | FBgn0036129 | CG6261 | — | | |
| 141450_at | 0.011 | −7.2 | FBgn0024289 | Sodh-1 | EC: 1.1.1.14 | | L-iditol 2-dehydrogenase |
| | | | | | | | activity |
| 153258_at | 0.012 | −7.6 | FBgn0037999 | CG4860 | EC: 1.3.99.3 | | butyryl-CoA dehydrogenase |
| | | | | | | | activity |
| 152049_at | 0.013 | −7.8 | FBgn0028493 | BcDNA: | — | | |
| | | | | GH06048 | | | |
| 143038_at | 0.012 | −8.1 | FBgn0037207 | Mes2 | — | | |
| 143437_at | 0.013 | −8.8 | FBgn0004181 | Peb | — | | |
| 147520_at | 0.012 | −8.9 | FBgn0034474 | Obp56g | — | | odorant binding activity |
| 143789_at | 0.012 | −9.4 | FBgn0015279 | Pi3K92E | EC: 2.7.1.137 | phosphorylation | phosphatidylinositol |
| | | | | | | | 3-kinase activity |
| 147334_at | 0.012 | −32.1 | FBgn0034160 | CG5550 | — | | |

[0242] TABLE 21
The Top 20 Down-Regulated and Top 20 Up-Regulated Genes in Response
to Dp110^{D954A} Overexpression Ranked by Fold Change

| | SAM | Fold | | Gene | | Biological Process | |
|---|---|---|---|---|---|---|---|
| Probe Set | q-value | change | FBgn | Symbol | EC Number | (GO) | Molecular Function (GO) |
| 143239_at | 0.005 | 11.3 | FBgn0002565 | Lsp2 | — | | nutrient reservoir activity |
| 148259_at | 0.007 | 7.0 | FBgn0035673 | CG6602 | — | | |
| 146054_at | 0.015 | 5.4 | FBgn0032080 | CG9525 | — | | |
| 153741_at | 0.007 | 4.6 | FBgn0028509 | cenG1A | — | small GTPase | ARF GTPase activator |
| | | | | | | mediated signal | activity |
| | | | | | | transduction | |
| 152747_at | 0.006 | 4.4 | FBgn0011828 | Pxn | EC: 1.11.1.7 | | peroxidase activity |
| 151598_at | 0.018 | 4.2 | HL01868.3 | CG10077 | — | | |
| | | | prime-hit | | | | |
| 153758_at | 0.003 | 3.7 | FBgn0000338 | cnc | — | regulation of pole | RNA polymerase II |
| | | | | | | plasm oskar mRNA | transcription factor activity |
| | | | | | | localization | |
| 143162_at | 0.020 | 3.6 | FBgn0000711 | flw | EC: 3.1.3.16 | muscle attachment | protein phosphatase type 1, |
| | | | | | | | catalyst activity |
| 153539_at | 0.010 | 3.6 | FBgn0026077 | Gasp | — | | structural constituent |
| | | | | | | | of peritrophic membrane |
| | | | | | | | (sensu Insecta) |
| 153370_at | 0.005 | 3.5 | FBgn0035467 | CG1079 | — | | |
| 154944_at | 0.017 | 3.5 | FBgn0030856 | CG8267 | — | | |
| 152093_at | 0.016 | 3.4 | FBgn0031674 | CG5822 | — | | |
| 145018_at | 0.012 | 3.2 | FBgn0030498 | CG15759 | — | | |
| 153383_at | 0.012 | 3.1 | FBgn0037277 | CG17735 | — | | ligand-dependent nuclear |
| | | | | | | | receptor interactor activity |
| 151899_at | 0.014 | 3.0 | FBgn0036992 | CG11796 | EC: 1.13.11.27 | | 4-hydroxyphenylpyruvate |
| | | | | | | | dioxygenase activity |
| 151499_at | 0.011 | 3.0 | GH08192.3 | — | — | | |
| | | | prime-hit | | | | |
| 153833_at | 0.016 | 2.9 | FBgn0029873 | CG3918 | — | | nucleic acid binding activity |
| 152189_at | 0.013 | 2.9 | FBgn0038475 | Keap1 | — | | actin binding activity |
| 154042_at | 0.003 | 2.9 | FBgn0027835 | Dp1 | — | | single-stranded DNA |
| | | | | | | | binding activity |
| 152303_at | 0.005 | 2.8 | FBgn0030183 | CG15309 | — | | |
| 143145_at | 0.007 | 2.8 | FBgn0000562 | egl | — | oocyte cell fate | nucleic acid binding activity |
| | | | | | | determination | |
| 142793_at | 0.005 | 2.8 | FBgn0004624 | CaMKII | EC: 2.7.1.123 | neuromuscular | protein serine |
| | | | | | | junction | |
| | | | | | | development | |
| 153724_at | 0.006 | −5.1 | FBgn0039244 | CG11069 | EC: 3.6.3 | | ATP-binding cassette (ABC) |
| | | | | | | | transporter activity |
| 146331_at | 0.003 | −5.2 | FBgn0032505 | CG16826 | — | | |
| 148640_at | 0.004 | −5.2 | FBgn0036264 | CG11529 | EC: 3.4.21 | | trypsin activity |
| 144320_at | 0.006 | −5.3 | FBgn0028936 | BG: | — | | |
| | | | | DS00180.9 | | | |
| 150717_at | 0.003 | −5.5 | FBgn0039495 | CG5909 | EC: 3.4.21 | | serine-type endopeptidase |
| | | | | | | | activity |
| 153258_at | 0.005 | −5.5 | FBgn0037999 | CG4860 | EC: 1.3.99.3 | | butyryl-CoA dehydrogenase |
| | | | | | | | activity |
| 148553_at | 0.004 | −5.7 | FBgn0036129 | CG6261 | — | | |
| 147520_at | 0.006 | −6.1 | FBgn0034474 | Obp56g | — | | odorant binding activity |
| 147409_at | 0.005 | −6.2 | FBgn0034294 | CG5765 | — | | |
| 148056_at | 0.005 | −6.2 | FBgn0035358 | CG14949 | — | | |
| 144239_at | 0.003 | −6.2 | FBgn0028583 | Ics | — | | |
| 147903_at | 0.005 | −6.3 | FBgn0035089 | CG9358 | — | | |
| 143295_at | 0.005 | −6.6 | FBgn0003046 | Pcp | — | | structural constituent of |
| | | | | | | | pupal cuticle (sensu |
| | | | | | | | Insecta) activity |
| 145474_at | 0.003 | −6.8 | FBgn0031176 | CG1678 | — | | |
| 151094_at | 0.005 | −7.3 | FBgn0040609 | CG3348 | — | | |
| 149206_at | 0.006 | −7.4 | FBgn0037126 | CG14567 | — | | |
| 154890_at | 0.005 | −8.4 | FBgn0036289 | CG10657 | — | | retinal binding activity |
| 149791_at | 0.005 | −9.1 | FBgn0038070 | CG6753 | EC: 3.1.1.3 | | triacylglycerol lipase activity |
| 150947_at | 0.006 | −12.7 | FBgn0039853 | CG11518 | — | | |
| 147334_at | 0.005 | −14.1 | FBgn0034160 | CG5550 | — | | |

[0243] TABLE 22
The Top 20 Down-Regulated and Top 20 Up-Regulated Genes in Response to dfoxo Overexpression Ranked by Fold Change

| | SAM | Fold | | Gene | | Biological Process | |
|---|---|---|---|---|---|---|---|
| Probe Set | q-value | Change | FBgn | Symbol | EC Number | (GO) | Molecular Function (GO) |
| 146850_at | 0.005 | 27.0 | FBgn0033355 | CG13748 | — | | serine protease |
| | | | | | | | inhibitor activity |
| 143942_at | 0.006 | 24.2 | FBgn0020765 | Acp65Aa | — | | structural constituent of adult |
| | | | | | | | cuticle (sensu Insecta) |
| | | | | | | | activity |
| 154014_at | 0.005 | 23.8 | FBgn0032130 | CG3838 | — | | DNA binding activity |
| 146180_at | 0.005 | 19.5 | FBgn0032281 | CG17107 | — | | |
| 150552_at | 0.005 | 19.0 | FBgn0039273 | CG9996 | — | | transferase activity, |
| | | | | | | | transferring hexosyl groups |
| 148259_at | 0.005 | 14.5 | FBgn0035673 | CG6602 | — | | |
| 149394_at | 0.006 | 13.3 | FBgn0037429 | CG15189 | — | | |
| 153029_at | 0.006 | 11.2 | FBgn0005633 | fln | — | | |
| 143747_at | 0.006 | 10.3 | FBgn0014033 | Sr-Cl | — | response to bacteria | scavenger receptor activity |
| 153761_at | 0.005 | 10.1 | FBgn0039241 | CG11089 | EC: 2.1.2.3 | | phosphoribosylamino- |
| | | | | | | | imidazole-carboxamide |
| | | | | | | | formyltransferase activity |
| 141426_at | 0.006 | 8.5 | FBgn0036996 | CG5932 | EC: 3.1.1.3 | | triacylglycerol lipase activity |
| 146645_at | 0.005 | 8.4 | FBgn0033027 | CG12408 | — | | calcium ion binding activity |
| 151899_at | 0.005 | 7.3 | FBgn0036992 | CG11796 | EC: 1.13.11.27 | | 4-hydroxyphenylpyruvate |
| | | | | | | | dioxygenase activity |
| 142318_at | 0.006 | 7.1 | FBgn0037433 | CG17919 | — | | phosphatidylethanolamine |
| | | | | | | | binding activity |
| 141213_at | 0.006 | 6.5 | FBgn0033728 | CG8505 | — | | structural constituent of |
| | | | | | | | cuticle (sensu Insecta) |
| | | | | | | | activity |
| 141353_at | 0.005 | 6.5 | FBgn0038299 | CG6687 | — | | serpin |
| 146256_at | 0.005 | 6.2 | FBgn0032381 | CG14934 | EC: 3.2.1.20 | | alpha-amylase activity |
| 143605_at | 0.005 | 5.8 | FBgn0010381 | Drs | — | antifungal humoral | antifungal peptide activity |
| | | | | | | response (sensu | |
| | | | | | | Invertebrata) | |
| 142969_at | 0.005 | 5.7 | FBgn0004629 | Cys | — | | cysteine protease |
| | | | | | | | inhibitor activity |
| 154884_at | 0.005 | 5.5 | FBgn0035763 | CG8602 | — | | transporter activity |
| 153741_at | 0.006 | 5.5 | FBgn0028509 | cenG1A | — | small GTPase | ARF GTPase activator |
| | | | | | | mediated signal | activity |
| | | | | | | transduction | |
| 148253_at | 0.005 | −11.1 | FBgn0035664 | CG6467 | EC: 3.4.21 | | serine-type endopeptidase |
| | | | | | | | activity |
| 147118_at | 0.005 | −11.6 | FBgn0033774 | CG12374 | EC: 3.4.17.1 | | carboxypeptidase A activity |
| 152644_at | 0.006 | −12.4 | FBgn0038398 | CG4979 | EC: 3.1.1.32 | | phosphatidylserine-specific |
| | | | | | | | phospholipase A1 activity |
| 143437_at | 0.006 | −12.4 | FBgn0004181 | Peb | — | | |
| 142538_at | 0.005 | −13.2 | FBgn0034341 | CG17531 | EC: 2.5.1.18 | | glutathione transferase |
| | | | | | | | activity |
| 147334_at | 0.006 | −14.6 | FBgn0034160 | CG5550 | — | | |
| 148048_at | 0.006 | −15.1 | FBgn0035343 | CG16762 | — | | |
| 151776_at | 0.005 | −15.3 | FBgn0037763 | CG16904 | — | | |
| 152448_at | 0.005 | −20.1 | FBgn0031860 | CG11236 | EC: 1.4.3.1 | | oxidoreductase activity |
| 149230_at | 0.006 | −22.7 | FBgn0037163 | CG11440 | EC: 3.1.3.4 | dephosphorylation | phosphatidate phosphatase |
| | | | | | | | activity |
| 149767_at | 0.005 | −22.9 | FBgn0038033 | CG10097 | — | | |
| 146902_at | 0.005 | −24.1 | FBgn0033444 | CG1652 | — | | |
| 143984_at | 0.005 | −24.2 | FBgn0023415 | Acp32CD | — | negative regulation | hormone activity |
| | | | | | | of female receptivity, | |
| | | | | | | post-mating | |
| 152849_at | 0.006 | −25.4 | FBgn0033445 | CG1656 | — | | |
| 144006_at | 0.005 | −28.5 | FBgn0023550 | EG: | — | | |
| | | | | 103B4.2 | | | |
| 150699_at | 0.005 | −28.5 | FBgn0039471 | CG6295 | EC: 3.1.1.3 | | enzyme activity |
| 150575_at | 0.006 | −29.4 | FBgn0039310 | CG11878 | — | | |
| 154985_at | 0.005 | −37.1 | FBgn0035077 | CG9083 | — | | |
| 147520_at | 0.006 | −39.3 | FBgn0034474 | Obp56g | — | | odorant binding activity |
| 150574_at | 0.005 | −43.5 | FBgn0039309 | CG11891 | — | | |
| 142419_at | 0.005 | −48.0 | FBgn0030098 | CG12057 | — | | |

[0244] TABLE 23
The top 20 Down-regulated and top 20 up-regulated genes in response to dPDK1 over-expression ranked by fold change

| | SAM | Fold | | Gene | | Biological Process | |
|---|---|---|---|---|---|---|---|
| Probe Set | q-value | Change | FBgn | Symbol | EC Number | (GO) | Molecular Function (GO) |
| 143781_at | 0.020 | 20.3 | FBgn0015035 | Cyp4e3 | — | electron transport | cytochrome P450 activity |
| 149938_at | 0.015 | 7.9 | FBgn0038291 | CG3984 | — | | |
| 150261_at | 0.020 | 7.5 | FBgn0038795 | CG4335 | EC: 1.14.11.1 | | gamma-butyrobetaine, |
| | | | | | | | 2-oxoglutarate |
| | | | | | | | dioxygenase activity |
| 141374_at | 0.015 | 6.8 | FBgn0012042 | AttA | — | antibacterial humoral | antibacterial peptide activity |
| | | | | | | response (sensu | |
| | | | | | | Invertebrata) | |
| 152313_at | 0.015 | 6.4 | FBgn0015714 | Cyp6a17 | EC: 1.14.14.1 | electron transport | cytochrome P450 activity |
| 142677_s_at | 0.018 | 5.3 | FBgn0020386 | Pk61C | EC: 2.7.1.37 | protein amino acid | protein serine |
| | | | | | | phosphorylation | |
| 146461_at | 0.017 | 4.8 | FBgn0032726 | CG10621 | EC: 2.1.1 | | homocysteine |
| | | | | | | | S-methyltransferase activity |
| 143470_at | 0.015 | 4.4 | FBgn000443l | LysX | EC: 3.2.1.17 | antimicrobial humoral | lysozyme activity |
| | | | | | | response (sensu | |
| | | | | | | Invertebrata) | |
| 143807_at | 0.015 | 4.3 | FBgn0015402 | ksr | EC: 2.7.1.37 | protein amino acid | protein serine |
| | | | | | | phosphorylation | |
| 150588_at | 0.017 | 4.3 | FBgn0039330 | CG11909 | EC: 3.2.1.20 | | hydrolase activity, |
| | | | | | | | hydrolyzing O-glycosyl |
| | | | | | | | compounds |
| 143770_at | 0.015 | 3.9 | FBgn0014865 | Mtk | — | antifungal humoral | Gram-positive antibacterial |
| | | | | | | response (sensu | peptide activity |
| | | | | | | Invertebrata) | |
| 148310_i_at | 0.015 | 3.8 | FBgn0035744 | CG8628 | — | cell acyl-CoA | acyl-CoA binding activity |
| | | | | | | homeostasis | |
| 148352_at | 0.019 | 3.7 | FBgn0035806 | PGRP-SD | — | immune response | N-acetylmuramoyl-L-alanine |
| | | | | | | | amidase activity |
| 150398_at | 0.016 | 3.7 | FBgn0039022 | CG4725 | — | | endothelin-converting |
| | | | | | | | enzyme activity |
| 145647_at | 0.015 | 3.5 | FBgn0031432 | Cyp309a1 | — | electron transport | cytochrome P450 activity |
| 143699_at | 0.018 | 3.4 | FBgn0011834 | Ser6 | EC: 3.4.16 | | serine-type endopeptidase |
| | | | | | | | activity |
| 150050_at | 0.022 | 3.4 | FBgn0038481 | CG17475 | EC: 3.4.21 | | trypsin activity |
| 149808_at | 0.015 | 3.3 | FBgn0038095 | Cyp304a1 | — | electron transport | cytochrome P450 activity |
| 144220_at | 0.015 | 3.2 | FBgn0028510 | BG: | — | negative regulation | protein biosynthesis |
| | | | | DS07851.3 | | of protein | inhibitor activity |
| | | | | | | biosynthesis | |
| 145253_at | 0.017 | 3.2 | FBgn0030859 | CG12990 | — | | transferase activity, |
| | | | | | | | transferring groups other |
| | | | | | | | than amino-acyl groups |
| 148573_at | 0.018 | 3.2 | FBgn0036157 | CG7560 | EC: 1.5.1.20 | | methylenetetrahydrofolate |
| | | | | | | | reductase (NADPH) activity |
| 145847_at | 0.016 | −2.4 | FBgn0031741 | CG11034 | EC: 3.4.14.5 | | dipeptidyl-peptidase |
| | | | | | | | IV activity |
| 143476_at | 0.030 | −2.4 | FBgn0004513 | Mdr65 | EC: 3.6.3.44 | | multidrug transporter activity |
| 142217_at | 0.017 | −2.4 | FBgn0011276 | HLH3B | — | | transcription factor activity |
| 153476_at | 0.021 | −2.5 | FBgn0036907 | CG8533 | — | | glutamate-gated ion |
| | | | | | | | channel activity |
| 143272_at | 0.028 | −2.6 | FBgn0002855 | Acp26Aa | — | oviposition | hormone activity |
| 153085_at | 0.023 | −2.6 | FBgn0014019 | Rh5 | — | G-protein coupled | short-wave-sensitive opsin |
| | | | | | | receptor protein | |
| | | | | | | signaling pathway | |
| 142279_at | 0.016 | −2.8 | FBgn0000241 | bw | EC: 3.6.3 | pteridine | ATP-binding cassette (ABC) |
| | | | | | | biosynthesis | transporter activity |
| 143485_at | 0.023 | −2.9 | FBgn0004575 | Syn | — | neurotransmitter | |
| | | | | | | secretion | |
| 141511_at | 0.025 | −2.9 | FBgn0016794 | dos | — | sevenless receptor | SH3 |
| | | | | | | signaling pathway | |
| 145319_at | 0.027 | −3.0 | FBgn0030948 | Cyp306a1 | — | electron transport | cytochrome P450 activity |
| 143787_at | 0.021 | −3.0 | FBgn0015271 | Orc5 | — | mitotic chromosome | DNA binding activity |
| | | | | | | condensation | |
| 143320_at | 0.025 | −3.1 | FBgn0003248 | Rh2 | — | G-protein coupled | opsin |
| | | | | | | receptor protein | |
| | | | | | | signaling pathway | |
| 154188_at | 0.015 | −3.5 | FBgn0030817 | CG4991 | — | | amino acid-polyamine |
| | | | | | | | transporter activity |
| 148150_at | 0.021 | −3.5 | FBgn0035505 | CG15004 | — | | sodium channel auxiliary |
| | | | | | | | protein activity |
| 149775_at | 0.018 | −3.7 | FBgn0038045 | Neu5Ac | — | carbohydrate | N-acetylneuraminic acid |
| | | | | | | biosynthesis | phosphate synthase activity |
| 154692_at | 0.019 | −3.8 | FBgn0033577 | CG18239 | — | | |
| 146780_at | 0.016 | −3.9 | FBgn0033242 | CG2916 | — | | |
| 145820_at | 0.015 | −4.5 | FBgn0031701 | TotM | — | humoral defense | |
| | | | | | | mechanism (sensu | |
| | | | | | | Invertebrata) | |
| 154548_at | 0.022 | −4.6 | FBgn0034098 | CG15707 | — | | nucleic acid binding activity |
| 154821_at | 0.019 | −5.3 | FBgn0037699 | CG8147 | — | | |
| 148087_at | 0.015 | −5.7 | FBgn0035412 | CG14957 | — | | chitin binding activity |
| 151740_at | 0.015 | −6.1 | SD02216.3 | — | — | | |
| | | | prime-hit | | | | |
| 151630_at | 0.023 | −10.3 | LD10776.3 | — | — | | |
| | | | prime-hit | | | | |

[0245] TABLE 24
The Top 20 Down-Regulated and Top 20 Up-Regulated Genes in Response to dS6K Overexpression Ranked by Fold Change

| | SAM | Fold | | Gene | | Biological Process | |
|---|---|---|---|---|---|---|---|
| Probe Set | q-value | Change | FBgn | Symbol | EC Number | (GO) | Molecular Function (GO) |
| 143942_at | 0.005 | 46.7 | FBgn0020765 | Acp65Aa | — | | structural constituent |
| | | | | | | | of adult cuticle (sensu |
| | | | | | | | Insecta) activity |
| 148762_at | 0.006 | 27.2 | FBgn0036440 | CG17177 | — | | |
| 149624_at | 0.014 | 18.7 | FBgn0037801 | CG3999 | EC: 1.4.4.2 | | glycine dehydrogenase |
| | | | | | | | (decarboxylating) activity |
| 150273_at | 0.005 | 14.1 | FBgn0038819 | CG5494 | — | | structural constituent |
| | | | | | | | of cuticle (sensu |
| | | | | | | | Insecta) activity |
| 150206_at | 0.005 | 13.8 | FBgn0038718 | CG17752 | — | | transporter activity |
| 145450_at | 0.005 | 12.6 | FBgn0031141 | CG1304 | EC: 3.4.21 | | trypsin activity |
| 152313_at | 0.005 | 9.2 | FBgn0015714 | Cyp6a17 | EC: 1.14.14.1 | electron transport | cytochrome P450 activity |
| 143944_at | 0.006 | 8.8 | FBgn0020906 | Ser4 | EC: 3.4.21 | | serine-type endopeptidase |
| | | | | | | | activity |
| 145236_at | 0.006 | 8.6 | FBgn0030829 | CG12998 | — | | |
| 148870_at | 0.005 | 8.2 | FBgn0036597 | CG4962 | — | | |
| 147237_at | 0.006 | 8.0 | FBgn0034003 | CG8094 | — | | |
| 149799_at | 0.011 | 7.0 | FBgn0038083 | CG5999 | EC: 2.4.1.17 | | glucuronosyltransferase |
| | | | | | | | activity |
| 150205_at | 0.006 | 6.8 | FBgn0038717 | CG17751 | — | | transporter activity |
| 141213_at | 0.006 | 5.9 | FBgn0033728 | CG8505 | — | | structural constituent |
| | | | | | | | of cuticle (sensu |
| | | | | | | | Insecta) activity |
| 145795_at | 0.006 | 5.9 | FBgn0031653 | CG8871 | EC: 3.4.21.1 | | trypsin activity |
| 143759_at | 0.006 | 5.6 | FBgn0014454 | Acp1 | — | | structural constituent |
| | | | | | | | of adult cuticle (sensu |
| | | | | | | | Insecta) activity |
| 150261_at | 0.015 | 5.1 | FBgn0038795 | CG4335 | EC: 1.14.11.1 | | gamma-butyrobetaine,2- |
| | | | | | | | oxoglutarate dioxygenase |
| | | | | | | | activity |
| 151932_at | 0.006 | 4.9 | FBgn0000406 | Cyt-b5-r | — | electron transport | electron transporter activity |
| 143781_at | 0.007 | 4.8 | FBgn0015035 | Cyp4e3 | — | electron transport | cytochrome P450 activity |
| 143876_at | 0.006 | 4.3 | FBgn0016675 | Lectin- | — | defense response | galactose binding activity |
| | | | | galC1 | | | |
| 141450_at | 0.005 | 4.3 | FBgn0024289 | Sodh-1 | EC: 1.1.1.14 | | L-iditol 2-dehydrogenase |
| | | | | | | | activity |
| 152766_at | 0.005 | −3.0 | FBgn0002563 | Lsp1&bgr; | — | | nutrient reservoir activity |
| 144332_at | 0.014 | −3.3 | FBgn0028950 | BG: | EC: 3.4.24 | | metalloendopeptidase |
| | | | | BACR44L22.1 | | | activity |
| 143603_i_at | 0.005 | −3.3 | FBgn0010359 | &ggr; Try | EC: 3.4.21.4 | proteolysis and | trypsin activity |
| | | | | | | peptidolysis | |
| 141435_at | 0.006 | −3.5 | FBgn0031249 | CG11911 | EC: 3.4.21 | | trypsin activity |
| 148401_at | 0.006 | −3.5 | FBgn0035887 | CG7170 | EC: 3.4.21.1 | | chymotrypsin activity |
| 152026_at | 0.016 | −3.6 | FBgn0027584 | BcDNA: | EC: 3.1.1.1 | | carboxylesterase activity |
| | | | | GH05741 | | | |
| 148150_at | 0.010 | −3.7 | FBgn0035505 | CG15004 | — | | sodium channel auxiliary |
| | | | | | | | protein activity |
| 141389_at | 0.014 | −3.7 | FBgn0034582 | CG10531 | EC: 3.2.1.14 | | hydrolase activity |
| 154188_at | 0.006 | −3.9 | FBgn0030817 | CG4991 | — | | amino acid-polyamine |
| | | | | | | | transporter activity |
| 143470_at | 0.006 | −4.6 | FBgn0004431 | LysX | EC: 3.2.1.17 | antimicrobial | lysozyme activity |
| | | | | | | humoral response | |
| | | | | | | (sensu Invertebrata) | |
| 143112_at | 0.006 | −4.7 | FBgn0000360 | Cp38 | — | insect chorion | structural constituent of |
| | | | | | | formation | chorion (sensu Insecta) |
| 142217_at | 0.005 | −4.7 | FBgn0011276 | HLH3B | — | | transcription factor activity |
| 142220_at | 0.006 | −5.0 | FBgn0033367 | CG8193 | EC: 1.14.18.1 | defense response | monophenol |
| | | | | | | | monooxygenase activity |
| 155132_at | 0.026 | −5.3 | FBgn0000520 | dwg | — | | transcription factor activity |
| 141245_at | 0.012 | −6.3 | FBgn0014861 | Mcm2 | — | cell proliferation | chromatin binding activity |
| 149491_at | 0.009 | −7.0 | FBgn0037577 | CG7443 | — | | |
| 148309_at | 0.006 | −7.1 | FBgn0035743 | CG15829 | — | cell acyl-CoA | acyl-CoA binding activity |
| | | | | | | homeostasis | |
| 144590_at | 0.016 | −8.2 | FBgn0029860 | CG15891 | — | | |
| 146093_at | 0.009 | −8.8 | FBgn0032127 | CG13114 | — | | |
| 142368_at | 0.012 | −10.3 | FBgn0037196 | CG8220 | — | | |
| 148400_at | 0.005 | −10.3 | FBgn0035886 | CG7118 | EC: 3.4.21 | | trypsin activity |

[0246] TABLE 25
Human Homologs of Drosophila Genes Regulated by ISP

| Human gene | FlyBase | | | | Affy chip |
|---|---|---|---|---|---|
| Locus ID | GeneID | FlyGene CG | Blast Prob | Pct Ident | Probe Set |
| 6767 | FBgn0029676 | CG2947 | 6E−72 | 40 | 141203_at |
| 79903 | FBgn0036039 | CG18177 | 5E−57 | 50 | 141205_at |
| 5447 | FBgn0015623 | CG11567 | 0 | 59 | 141208_at |
| 537 | FBgn0004868 | CG4422 | 1E−177 | 67 | 141214_at |
| 26528 | FBgn0004838 | CG10377 | 4E−62 | 36 | 141218_at |
| 2975 | FBgn0032517 | CG7099 | 3E−40 | 21 | 141219_at |
| 51154 | FBgn0033485 | CG1381 | 4E−70 | 54 | 141230_at |
| 5408 | FBgn0029831 | CG5966 | 9E−63 | 35 | 141233_at |
| 4171 | FBgn0014861 | CG7538 | 0 | 64 | 141245_at |
| 7508 | FBgn0004698 | CG8153 | 1E−100 | 38 | 141256_at |
| 54504 | FBgn0038738 | CG4572 | 1E−103 | 44 | 141260_at |
| 994 | FBgn0003525 | CG1395 | 3E−52 | 37 | 141264_at |
| 9380 | FBgn0037370 | CG1236 | 2E−90 | 53 | 141292_at |
| 55186 | FBgn0031359 | CG18317 | 8E−85 | 49 | 141322_at |
| 1738 | FBgn0036762 | CG7430 | 0 | 67 | 141356_at |
| 6204 | FBgn0031035 | CG14206 | 7E−52 | 63 | 141358_at |
| 1209 | FBgn0031590 | CG3702 | 0 | 56 | 141359_at |
| 3938 | FBgn0036659 | CG9701 | 1E−125 | 47 | 141360_at |
| 5298 | FBgn0004373 | CG7004 | 1E−171 | 42 | 141383_at |
| 63826 | FBgn0037684 | CG8129 | 3E−43 | 36 | 141406_at |
| 23406 | FBgn0030955 | CG6891 | 6E−29 | 43 | 141412_at |
| 1058 | FBgn0037971 | CG10007 | 2E−50 | 35 | 141417_at |
| 10134 | FBgn0035165 | CG13887 | 1E−41 | 39 | 141434_at |
| 51380 | FBgn0000153 | CG7811 | 1E−151 | 52 | 141440_at |
| 6652 | FBgn0024289 | CG1982 | 4E−84 | 54 | 141450_at |
| 4547 | FBgn0032904 | CG9342 | 7E−60 | 24 | 141458_at |
| 212 | FBgn0020764 | CG3017 | 1E−155 | 56 | 141461_at |
| 9846 | FBgn0016794 | CG1044 | 1E−24 | 39 | 141511_at |
| 64699 | FBgn0023479 | CG4821 | 1E−44 | 36 | 141527_at |
| 60487 | FBgn0037250 | CG1074 | 5E−97 | 41 | 141546_at |
| 2539 | FBgn0004057 | CG12529 | 0 | 65 | 141547_at |
| 90850 | FBgn0035024 | CG11414 | 1E−103 | 29 | 141554_at |
| 25912 | FBgn0034172 | CG6665 | 4E−27 | 39 | 141562_at |
| 54676 | FBgn0037391 | CG2017 | 1E−148 | 51 | 141564_at |
| 2764 | FBgn0028894 | CG5869 | 6E−40 | 53 | 141567_at |
| 9909 | FBgn0025864 | CG12737 | 1E−130 | 37 | 141584_at |
| 2354 | FBgn0001297 | CG15509 | 7E−18 | 42 | 141592_at |
| 347734 | FBgn0038524 | CG7623 | 1E−101 | 48 | 141596_at |
| 80303 | FBgn0032731 | CG10641 | 3E−56 | 59 | 141598_at |
| 5829 | FBgn0051794 | CG31794 | 1E−140 | 76 | 141605_at |
| 55697 | FBgn0038058 | CG5608 | 1E−112 | 41 | 141609_at |
| 60412 | FBgn0037373 | CG2095 | 1E−155 | 34 | 141611_at |
| 3843 | FBgn0011341 | CG1059 | 0 | 52 | 141618_at |
| 10999 | FBgn0021953 | CG7400 | 1E−162 | 47 | 141619_at |
| 23301 | FBgn0034180 | CG15609 | 1E−63 | 27 | 141621_at |
| 1173 | FBgn0024832 | CG7057 | 0 | 87 | 141628_at |
| 206358 | FBgn0032036 | CG13384 | 5E−79 | 43 | 141633_at |
| 1653 | FBgn0015075 | CG9054 | 0 | 59 | 141634_at |
| 84706 | FBgn0030478 | CG1640 | 1E−156 | 55 | 141639_at |
| 55622 | FBgn0036772 | CG5290 | 4E−78 | 33 | 141652_at |
| 3329 | FBgn0015245 | CG12101 | 0 | 73 | 141664_at |
| 6935 | FBgn0004606 | CG1322 | 7E−75 | 28 | 141676_at |
| 10642 | FBgn0030235 | CG1691 | 2E−89 | 41 | 141681_at |
| 7469 | FBgn0038872 | CG5874 | 2E−66 | 37 | 141683_at |
| 10390 | FBgn0033844 | CG6016 | 1E−120 | 54 | 141694_at |
| 81502 | FBgn0031260 | CG11840 | 1E−130 | 62 | 141698_at |
| 112724 | FBgn0033205 | CG2064 | 2E−86 | 54 | 141701_at |
| 23524 | FBgn0035253 | CG7971 | 6E−85 | 28 | 141708_at |
| 7278 | FBgn0003885 | CG2512 | 0 | 97 | 141710_r_at |
| 4285 | FBgn0033038 | CG7791 | 0 | 49 | 141715_at |
| 55278 | FBgn0027658 | CG6007 | 1E−147 | 52 | 141724_at |
| 8399 | FBgn0039655 | CG14507 | 0.000000000000001 | 35 | 141728_at |
| 50999 | FBgn0030606 | CG9053 | 5E−42 | 41 | 141747_at |
| 80206 | FBgn0052030 | CG32030 | 1E−173 | 50 | 141748_at |
| 5426 | FBgn0020756 | CG6768 | 0 | 55 | 141750_at |
| 116541 | FBgn0034579 | CG9353 | 2E−18 | 45 | 141755_at |
| 9128 | FBgn0036733 | CG6322 | 1E−157 | 50 | 141764_at |
| 57143 | FBgn0035039 | CG3608 | 1E−129 | 47 | 141773_at |
| 54677 | FBgn0039543 | CG12428 | 2E−96 | 31 | 141776_at |
| 10000 | FBgn0010379 | CG4006 | 0 | 63 | 141791_at |
| 10129 | CG32045 | CG32045 | 0 | 46 | 141794_at |
| 112 | FBgn0052158 | CG32158 | 0 | 50 | 141806_at |
| 9520 | FBgn0035226 | CG1009 | 0 | 59 | 141811_at |
| 51390 | FBgn0031245 | CG3625 | 8E−44 | 38 | 141831_at |
| 292 | FBgn0003360 | CG16944 | 1E−139 | 81 | 141933_at |
| 8667 | FBgn0022023 | CG9124 | 3E−77 | 46 | 141937_at |
| 5170 | FBgn0020386 | CG1210 | 3E−43 | 42 | 141986_at |
| 375 | FBgn0010348 | CG8385 | 3E−99 | 96 | 142008_at |
| 4199 | FBgn0002719 | CG10120 | 0 | 58 | 142016_at |
| 22848 | FBgn0015772 | CG10637 | 1E−117 | 52 | 142040_at |
| 113278 | FBgn0039882 | CG11576 | 2E−76 | 36 | 142134_at |
| 4125 | FBgn0032068 | CG9466 | 0 | 40 | 142147_at |
| 51390 | FBgn0031245 | CG3625 | 8E−44 | 38 | 142165_at |
| 57577 | FBgn0031496 | CG17258 | 1E−29 | 26 | 142166_at |
| 677 | FBgn0011837 | CG4070 | 8E−38 | 46 | 142170_at |
| 81796 | FBgn0032123 | CG3811 | 1E−137 | 37 | 142176_at |
| 6886 | FBgn0011276 | CG2655 | 1E−21 | 73 | 142217_at |
| 3631 | FBgn0030553 | CG1846 | 7E−62 | 38 | 142224_at |
| 91050 | FBgn0038330 | CG14868 | 0.0000000000002 | 39 | 142229_at |
| 5592 | FBgn0000721 | CG10033 | 0 | 65 | 142251_at |
| 5458 | FBgn0000028 | CG9151 | 3E−81 | 53 | 142259_at |
| 7417 | FBgn0004363 | CG6647 | 1E−101 | 62 | 142269_at |
| 63971 | FBgn0019968 | CG8183 | 0 | 57 | 142277_at |
| 26047 | FBgn0013997 | CG6827 | 1E−180 | 32 | 142283_at |
| 117247 | FBgn0001296 | CG12286 | 6E−97 | 44 | 142293_at |
| 8774 | FBgn0028552 | CG3988 | 5E−55 | 38 | 142296_at |
| 3745 | FBgn0003383 | CG1066 | 0 | 70 | 142312_at |
| 3612 | FBgn0037063 | CG9391 | 1E−66 | 46 | 142335_at |
| 2184 | FBgn0016013 | CG14993 | 1E−144 | 60 | 142340_at |
| 8394 | FBgn0034789 | CG3682 | 1E−151 | 61 | 142409_at |
| 124936 | FBgn0030099 | CG12056 | 2E−38 | 38 | 142420_at |
| 2775 | FBgn0001122 | CG2204 | 1E−174 | 83 | 142441_at |
| 2286 | FBgn0037930 | CG14715 | 6E−37 | 57 | 142486_at |
| 292 | FBgn0003360 | CG16944 | 1E−139 | 81 | 142494_at |
| 517 | FBgn0039830 | CG1746 | 1E−41 | 64 | 142498_at |
| 8667 | FBgn0022023 | CG9124 | 3E−77 | 46 | 142505_at |
| 1655 | FBgn0035720 | CG10077 | 1E−177 | 56 | 142516_at |
| 146880 | FBgn0036511 | CG6498 | 0 | 40 | 142528_at |
| 9532 | FBgn0036505 | CG7945 | 3E−23 | 36 | 142529_s_at |
| 6117 | FBgn0010173 | CG9633 | 1E−139 | 42 | 142545_at |
| 10269 | FBgn0034176 | CG9000 | 1E−118 | 49 | 142548_at |
| 22919 | FBgn0027066 | CG3265 | 5E−82 | 78 | 142558_s_at |
| 4830 | FBgn0000150 | CG2210 | 3E−65 | 77 | 142560_at |
| 5520 | FBgn0004889 | CG6235 | 0 | 79 | 142582_at |
| 6780 | FBgn0003520 | CG5753 | 2E−63 | 31 | 142592_at |
| 55011 | FBgn0032455 | CG5792 | 4E−26 | 28 | 142601_at |
| 8799 | FBgn0034058 | CG8315 | 4E−33 | 32 | 142653_at |
| 10437 | FBgn0039099 | CG10157 | 0.000000000002 | 41 | 142672_at |
| 254122 | FBgn0032005 | CG8282 | 1E−120 | 55 | 142674_at |
| 5170 | FBgn0020386 | CG1210 | 3E−43 | 42 | 142677_s_at |
| 5255 | FBgn0030087 | CG7766 | 0 | 48 | 142687_at |
| 64754 | FBgn0011566 | CG13761 | 1E−47 | 27 | 142710_at |
| 55751 | FBgn0032172 | CG5850 | 2E−93 | 46 | 142714_at |
| 53371 | FBgn0033737 | CG8831 | 2E−95 | 39 | 142722_at |
| 3157 | FBgn0010611 | CG4311 | 1E−169 | 64 | 142736_s_at |
| 4199 | FBgn0002719 | CG10120 | 0 | 58 | 142746_at |
| 91689 | FBgn0034303 | CG17680 | 6E−16 | 58 | 142776_at |
| 57128 | FBgn0013432 | CG3717 | 1E−18 | 50 | 142778_at |
| 23327 | FBgn0036736 | CG7555 | 0 | 67 | 142789_at |
| 817 | FBgn0004624 | CG18069 | 0 | 77 | 142793_at |
| 2872 | FBgn0017581 | CG17342 | 1E−117 | 54 | 142794_at |
| 22845 | FBgn0034141 | CG8311 | 5E−47 | 31 | 142795_at |
| 7088 | FBgn0001139 | CG8384 | 0 | 61 | 142820_at |
| 8882 | FBgn0030096 | CG9060 | 1E−119 | 48 | 142846_at |
| 3704 | FBgn0031663 | CG8891 | 1E−69 | 66 | 142851_at |
| 51397 | FBgn0030323 | CG2371 | 0.0000000000002 | 28 | 142870_s_at |
| 10102 | FBgn0032646 | CG6412 | 2E−45 | 39 | 142875_at |
| 2678 | FBgn0030932 | CG6461 | 1E−109 | 45 | 142878_at |
| 3654 | FBgn0010441 | CG5974 | 2E−39 | 32 | 142881_at |
| 129138 | FBgn0036052 | CG10809 | 3E−25 | 38 | 142905_at |
| 6804 | CG31136 | CG31136 | 1E−112 | 70 | 142907_at |
| 8801 | FBgn0029118 | CG10622 | 1E−128 | 59 | 142911_at |
| 7465 | FBgn0011737 | CG4488 | 1E−104 | 43 | 142924_at |
| 2065 | FBgn0003731 | CG10079 | 1E−179 | 34 | 142966_at |
| 8470 | FBgn0033504 | CG18408 | 2E−67 | 46 | 142967_at |
| 4640 | FBgn0011673 | CG7438 | 0 | 45 | 142975_at |
| 10576 | FBgn0030086 | CG7033 | 0 | 71 | 142977_at |
| 90993 | FBgn0004396 | CG7450 | 5E−37 | 50 | 143003_at |
| 10058 | FBgn0038376 | CG4225 | 0 | 50 | 143022_at |
| 10845 | FBgn0038745 | CG4538 | 1E−177 | 58 | 143035_at |
| 60 | FBgn0000043 | CG12051 | 0 | 97 | 143059_at |
| 60 | FBgn0000047 | CG5178 | 0 | 95 | 143061_at |
| 55252 | FBgn0000142 | CG8787 | 1E−36 | 29 | 143080_at |
| 1746 | FBgn0000157 | CG3629 | 1E−37 | 40 | 143081_at |
| 56288 | FBgn0000163 | CG5055 | 3E−83 | 31 | 143083_at |
| 847 | FBgn0000261 | CG6871 | 0 | 66 | 143093_at |
| 54205 | FBgn0000409 | CG17903 | 1E−45 | 78 | 143115_at |
| 5966 | FBgn0000462 | CG6667 | 1E−72 | 46 | 143125_at |
| 5613 | FBgn0000489 | CG6117 | 1E−124 | 62 | 143130_at |
| 2128 | FBgn0000606 | CG2328 | 7E−39 | 42 | 143153_at |
| 5500 | FBgn0000711 | CG2096 | 1E−178 | 91 | 143162_at |
| 2597 | FBgn0001092 | CG8893 | 1E−147 | 76 | 143175_at |
| 2752 | FBgn0001145 | CG1743 | 1E−150 | 65 | 143181_at |
| 3320 | FBgn0001233 | CG1242 | 0 | 78 | 143198_at |
| 4212 | FBgn0001235 | CG17117 | 1E−111 | 57 | 143199_at |
| 7023 | FBgn0001994 | CG7664 | 3E−27 | 40 | 143223_at |
| 4001 | FBgn0002525 | CG6944 | 1E−111 | 36 | 143231_at |
| 6176 | FBgn0002593 | CG4087 | 2E−34 | 61 | 143247_at |
| 6161 | FBgn0002626 | CG7939 | 6E−58 | 77 | 143250_at |
| 5105 | FBgn0003067 | CG17725 | 0 | 68 | 143299_at |
| 5187 | FBgn0003068 | CG2647 | 5E−29 | 25 | 143300_at |
| 5501 | FBgn0003134 | CG6593 | 1E−172 | 88 | 143310_at |
| 3845 | FBgn0003205 | CG9375 | 2E−82 | 79 | 143317_at |
| 94233 | FBgn0003248 | CG16740 | 2E−53 | 38 | 143320_at |
| 6181 | FBgn0003274 | CG4918 | 3E−32 | 60 | 143326_at |
| 6647 | FBgn0003462 | CG11793 | 3E−50 | 61 | 143358_at |
| 1959 | FBgn0003499 | CG7847 | 4E−63 | 42 | 143365_at |
| 3921 | FBgn0003517 | CG14792 | 2E−94 | 61 | 143369_at |
| 6950 | FBgn0003676 | CG5374 | 0 | 73 | 143374_at |
| 4297 | FBgn0003862 | CG8651 | 5E−98 | 23 | 143384_at |
| 7280 | FBgn0003887 | CG9277 | 0 | 97 | 143390_at |
| 7280 | FBgn0003888 | CG3401 | 0 | 89 | 143392_r_at |
| 5793 | FBgn0004369 | CG2005 | 1E−161 | 46 | 143448_at |
| 11127 | FBgn0004380 | CG10642 | 0 | 58 | 143453_at |
| 6208 | FBgn0004404 | CG1527 | 3E−71 | 86 | 143461_at |
| 6231 | FBgn0004413 | CG10305 | 2E−47 | 82 | 143462_at |
| 5244 | FBgn0004513 | CG10181 | 0 | 43 | 143476_at |
| 6853 | FBgn0004575 | CG3985 | 1E−107 | 47 | 143485_at |
| 579 | FBgn0004862 | CG7902 | 2E−29 | 74 | 143523_at |
| 6218 | FBgn0005533 | CG3922 | 5E−52 | 81 | 143542_at |
| 811 | FBgn0005585 | CG9429 | 1E−163 | 66 | 143547_at |
| 5218 | FBgn0005640 | CG10579 | 1E−124 | 65 | 143565_at |
| 506 | FBgn0010217 | CG11154 | 0 | 89 | 143586_at |
| 166929 | FBgn0010383 | CG6816 | 1E−82 | 34 | 143606_at |
| 6142 | FBgn0010409 | CG6510 | 3E−68 | 68 | 143616_at |
| 6157 | FBgn0010410 | CG15442 | 4E−60 | 69 | 143617_at |
| 6222 | FBgn0010411 | CG8900 | 1E−69 | 77 | 143618_at |
| 6230 | FBgn0010413 | CG6684 | 4E−40 | 70 | 143620_at |
| 9296 | FBgn0010426 | CG8210 | 3E−47 | 72 | 143625_at |
| 6742 | FBgn0010438 | CG4337 | 3E−25 | 41 | 143628_at |
| 10952 | FBgn0010638 | CG10130 | 7E−31 | 67 | 143631_at |
| 1730 | FBgn0011202 | CG1768 | 0 | 40 | 143636_at |
| 6137 | FBgn0011272 | CG4651 | 1E−68 | 63 | 143642_at |
| 6261 | FBgn0011286 | CG10844 | 0 | 50 | 143650_at |
| 11140 | FBgn0011573 | CG12019 | 1E−105 | 51 | 143662_at |
| 5888 | FBgn0011700 | CG7948 | 1E−123 | 71 | 143679_at |
| 3385 | FBgn0011769 | CG4205 | 6E−46 | 61 | 143690_at |
| 81888 | FBgn0011770 | CG2227 | 8E−46 | 35 | 143691_at |
| 54433 | FBgn0011824 | CG4038 | 4E−70 | 59 | 143696_at |
| 1781 | FBgn0013761 | CG18000 | 0 | 50 | 143720_at |
| 56171 | FBgn0013810 | CG5526 | 0 | 59 | 143725_at |
| 8294 | FBgn0013981 | CG3379 | 4E−54 | 99 | 143733_at |
| 9261 | FBgn0013987 | CG3086 | 1E−132 | 63 | 143735_at |
| 4638 | FBgn0013988 | CG18255 | 1E−119 | 41 | 143736_at |
| 5034 | FBgn0014002 | CG6988 | 1E−155 | 60 | 143739_at |
| 4217 | FBgn0014006 | CG4720 | 0 | 41 | 143740_at |
| 6130 | FBgn0014026 | CG3314 | 1E−102 | 68 | 143746_at |
| 1820 | FBgn0004795 | CG5403 | 8E−59 | 43 | 143753_at |
| 3020 | FBgn0014857 | CG5825 | 7E−72 | 100 | 143766_i_at |
| 5001 | FBgn0015271 | CG7833 | 6E−71 | 35 | 143787_at |
| 5291 | FBgn0015279 | CG4141 | 0 | 37 | 143789_at |
| 5898 | FBgn0015286 | CG2849 | 2E−83 | 79 | 143790_at |
| 283455 | FBgn0015402 | CG2899 | 2E−87 | 50 | 143807_at |
| 6227 | FBgn0015521 | CG2986 | 2E−30 | 73 | 143812_at |
| 63973 | FBgn0015550 | CG7659 | 7E−20 | 37 | 143817_at |
| 324 | FBgn0015589 | CG1451 | 1E−133 | 53 | 143828_at |
| 11080 | FBgn0015657 | CG10578 | 1E−102 | 55 | 143835_at |
| 6133 | FBgn0015756 | CG6141 | 1E−66 | 65 | 143838_at |
| 8766 | FBgn0015790 | CG5771 | 1E−101 | 85 | 143843_at |
| 6198 | FBgn0015806 | CG10539 | 1E−158 | 72 | 143848_at |
| 358 | FBgn0015872 | CG9023 | 5E−50 | 41 | 143854_at |
| 122786 | FBgn0004583 | CG4114 | 2E−17 | 33 | 143858_at |
| 10419 | FBgn0015925 | CG3730 | 1E−120 | 40 | 143859_at |
| 1282 | FBgn0016075 | CG16858 | 0 | 42 | 143868_at |
| 522 | FBgn0016119 | CG4412 | 0.000000000000007 | 40 | 143870_at |
| 10476 | FBgn0016120 | CG6030 | 2E−36 | 45 | 143871_at |
| 3628 | FBgn0016672 | CG3028 | 2E−65 | 38 | 143875_at |
| 6159 | FBgn0016726 | CG10071 | 0.00000000000007 | 46 | 143880_at |
| 6014 | FBgn0017549 | CG8418 | 4E−65 | 66 | 143893_at |
| 9045 | FBgn0017579 | CG6253 | 7E−30 | 42 | 143898_at |
| 9377 | FBgn0019624 | CG14724 | 6E−31 | 52 | 143899_at |
| 6224 | FBgn0019936 | CG15693 | 5E−50 | 81 | 143904_at |
| 868 | FBgn0020224 | CG7037 | 1E−178 | 72 | 143910_at |
| 509 | FBgn0020235 | CG7610 | 2E−85 | 58 | 143911_at |
| 10417 | FBgn0020269 | CG10145 | 2E−43 | 34 | 143915_at |
| 2678 | FBgn0023167 | CG8427 | 3E−49 | 80 | 143973_at |
| 23312 | FBgn0023458 | CG3585 | 0 | 38 | 143986_at |
| 58508 | FBgn0023518 | CG3848 | 1E−173 | 53 | 143994_at |
| 83657 | FBgn0024196 | CG10751 | 3E−38 | 75 | 144010_at |
| 9611 | FBgn0024308 | CG4013 | 6E−73 | 30 | 144015_at |
| 6132 | FBgn0024939 | CG1263 | 1E−119 | 80 | 144032_at |
| 48 | FBgn0024957 | CG6342 | 0 | 67 | 144037_at |
| 7355 | FBgn0024994 | CG2675 | 9E−84 | 51 | 144045_at |
| 10425 | FBgn0025186 | CG5709 | 1E−165 | 53 | 144051_at |
| 8804 | FBgn0025456 | CG5413 | 2E−23 | 34 | 144063_at |
| 64080 | FBgn0025640 | CG13369 | 8E−64 | 44 | 144081_at |
| 4088 | FBgn0025800 | CG2262 | 1E−165 | 61 | 144094_at |
| 4257 | FBgn0025814 | CG1742 | 4E−27 | 45 | 144097_at |
| 10733 | FBgn0026371 | CG7186 | 3E−99 | 56 | 144123_at |
| 5728 | FBgn0026379 | CG5671 | 9E−77 | 44 | 144125_at |
| 6507 | FBgn0026439 | CG3747 | 1E−111 | 45 | 144146_at |
| 8404 | FBgn0026562 | CG6378 | 5E−28 | 31 | 144147_at |
| 10273 | FBgn0027052 | CG5203 | 2E−91 | 57 | 144169_at |
| 26521 | FBgn0027359 | CG1728 | 7E−23 | 58 | 144179_at |
| 23493 | FBgn0027788 | CG11194 | 7E−42 | 45 | 144192_at |
| 9567 | FBgn0027836 | CG5729 | 0 | 71 | 144194_at |
| 57122 | FBgn0027868 | CG6743 | 1E−131 | 33 | 144196_at |
| 10247 | FBgn0028510 | CG15261 | 4E−34 | 46 | 144220_at |
| 1992 | FBgn0028983 | CG10913 | 2E−61 | 36 | 144243_at |
| 1787 | FBgn0028707 | CG10692 | 8E−62 | 34 | 144249_at |
| 57019 | FBgn0001977 | CG4180 | 2E−45 | 38 | 144311_at |
| 1112 | FBgn0029504 | CG12690 | 2E−31 | 36 | 144337_at |
| 26580 | FBgn0040336 | CG9904 | 1E−50 | 40 | 144412_at |
| 55761 | FBgn0029713 | CG11436 | 4E−18 | 21 | 144481_at |
| 10436 | FBgn0029714 | CG3527 | 4E−76 | 63 | 144482_at |
| 58516 | FBgn0029738 | CG4068 | 6E−38 | 34 | 144501_at |
| 51337 | FBgn0029838 | CG4666 | 5E−27 | 35 | 144572_at |
| 10785 | FBgn0029857 | CG15897 | 2E−31 | 31 | 144588_at |
| 4714 | FBgn0029888 | CG3192 | 6E−22 | 38 | 144608_at |
| 2271 | FBgn0029889 | CG4095 | 0 | 70 | 144609_at |
| 223082 | FBgn0029911 | CG14435 | 3E−31 | 34 | 144622_at |
| 51144 | FBgn0029975 | CG1444 | 2E−68 | 54 | 144664_at |
| 2729 | FBgn0040319 | CG2259 | 0 | 59 | 144677_at |
| 3074 | FBgn0041629 | CG1787 | 2E−62 | 34 | 144712_at |
| 513 | FBgn0030184 | CG2968 | 6E−33 | 48 | 144787_at |
| 25796 | FBgn0030239 | CG17333 | 3E−46 | 43 | 144831_at |
| 114771 | FBgn0030310 | CG11709 | 5E−38 | 44 | 144882_at |
| 55836 | FBgn0030311 | CG11699 | 6E−16 | 34 | 144883_at |
| 79154 | FBgn0030332 | CG9360 | 2E−47 | 40 | 144893_at |
| 23423 | FBgn0030341 | CG1967 | 1E−49 | 50 | 144899_at |
| 124801 | FBgn0030364 | CG15735 | 2E−21 | 33 | 144912_at |
| 11073 | FBgn0002878 | CG11156 | 8E−67 | 24 | 145028_at |
| 83877 | FBgn0030522 | CG11103 | 6E−56 | 56 | 145032_at |
| 6898 | FBgn0030558 | CG1461 | 1E−127 | 51 | 145058_at |
| 4713 | FBgn0030605 | CG5548 | 6E−28 | 54 | 145097_at |
| 51228 | FBgn0030641 | CG6299 | 5E−17 | 31 | 145121_at |
| 7381 | FBgn0030733 | CG3560 | 2E−33 | 62 | 145177_at |
| 51084 | FBgn0030737 | CG9914 | 1E−79 | 50 | 145178_at |
| 7327 | FBgn0015374 | CG4443 | 3E−78 | 81 | 145193_at |
| 10094 | FBgn0030818 | CG8936 | 2E−61 | 60 | 145228_at |
| 2267 | FBgn0030880 | CG6788 | 8E−42 | 42 | 145267_at |
| 23413 | FBgn0030897 | CG5744 | 3E−75 | 71 | 145279_at |
| 51181 | FBgn0030968 | CG7322 | 8E−55 | 49 | 145332_at |
| 51207 | FBgn0030976 | CG7378 | 4E−34 | 47 | 145337_at |
| 2671 | FBgn0031068 | CG12534 | 2E−35 | 43 | 145394_at |
| 5825 | FBgn0031069 | CG12703 | 0 | 59 | 145395_at |
| 9325 | FBgn0031115 | CG11710 | 2E−84 | 39 | 145428_at |
| 21 | FBgn0031170 | CG1718 | 0 | 37 | 145471_at |
| 3960 | FBgn0031213 | CG11372 | 4E−29 | 30 | 145507_at |
| 55773 | FBgn0031304 | CG4552 | 1E−162 | 45 | 145558_at |
| 8241 | FBgn0031318 | CG4887 | 3E−99 | 30 | 145565_at |
| 25822 | FBgn0031322 | CG5001 | 1E−104 | 53 | 145566_at |
| 7386 | FBgn0021906 | CG7361 | 5E−77 | 68 | 145592_at |
| 10577 | FBgn0031381 | CG7291 | 5E−24 | 37 | 145612_at |
| 25901 | FBgn0031395 | CG10874 | 4E−18 | 36 | 145623_at |
| 27294 | FBgn0031418 | CG3609 | 2E−68 | 42 | 145637_at |
| 55967 | FBgn0031436 | CG3214 | 4E−27 | 42 | 145650_at |
| 7866 | FBgn0051694 | CG31694 | 2E−66 | 36 | 145680_at |
| 130617 | FBgn0031535 | CG12795 | 4E−47 | 41 | 145713_at |
| 51659 | FBgn0031599 | CG18013 | 5E−45 | 45 | 145755_at |
| 64747 | FBgn0031636 | CG12194 | 1E−142 | 54 | 145783_at |
| 8780 | FBgn0031643 | CG3008 | 1E−106 | 42 | 145788_at |
| 9526 | FBgn0031662 | CG3792 | 9E−62 | 48 | 145801_at |
| 6168 | FBgn0028696 | CG5827 | 1E−38 | 76 | 145808_at |
| 6293 | FBgn0031710 | CG7371 | 0 | 50 | 145825_at |
| 1803 | FBgn0031741 | CG11034 | 1E−115 | 33 | 145847_at |
| 10093 | FBgn0031781 | CG5972 | 8E−75 | 82 | 145872_at |
| 9693 | FBgn0031798 | CG9491 | 1E−128 | 52 | 145888_at |
| 5784 | FBgn0031799 | CG9493 | 1E−106 | 26 | 145889_at |
| 84844 | FBgn0031822 | CG9548 | 8E−63 | 96 | 145902_at |
| 135228 | FBgn0041182 | CG7052 | 1E−177 | 31 | 145971_at |
| 6166 | FBgn0031980 | CG7424 | 9E−44 | 76 | 146006_at |
| 4125 | FBgn0032069 | CG9468 | 0 | 40 | 146050_at |
| 967 | FBgn0032074 | CG9494 | 1E−33 | 32 | 146052_at |
| 51764 | FBgn0028433 | CG3694 | 0.000000000004 | 41 | 146078_at |
| 217 | FBgn0032114 | CG3752 | 0 | 71 | 146084_at |
| 1540 | FBgn0032210 | CG5603 | 1E−121 | 45 | 146137_at |
| 29970 | FBgn0032221 | CG5375 | 0.00000000004 | 24 | 146141_at |
| 64285 | FBgn0041723 | CG5364 | 1E−112 | 40 | 146149_at |
| 27079 | FBgn0051719 | CG31719 | 1E−118 | 47 | 146163_at |
| 3988 | FBgn0032264 | CG6113 | 8E−73 | 37 | 146165_at |
| 9354 | FBgn0010612 | CG6105 | 2E−25 | 54 | 146216_at |
| 219771 | FBgn0032378 | CG14939 | 1E−104 | 64 | 146253_at |
| 3652 | FBgn0032485 | CG9426 | 1E−109 | 37 | 146316_at |
| 80308 | FBgn0032522 | CG16848 | 1E−47 | 43 | 146337_at |
| 8649 | FBgn0032642 | CG5110 | 2E−28 | 45 | 146407_at |
| 56996 | FBgn0032689 | CG10413 | 0 | 42 | 146441_at |
| 64755 | FBgn0032700 | CG10338 | 1E−69 | 40 | 146445_at |
| 6156 | FBgn0015745 | CG10652 | 2E−46 | 81 | 146467_at |
| 54902 | FBgn0032744 | CG15173 | 8E−21 | 25 | 146470_at |
| 5829 | FBgn0051794 | CG31794 | 1E−140 | 76 | 146489_at |
| 6317 | FBgn0028986 | CG9334 | 5E−58 | 34 | 146555_at |
| 51202 | FBgn0032919 | CG9253 | 0 | 71 | 146573_at |
| 5274 | FBgn0028985 | CG9453 | 3E−61 | 35 | 146699_at |
| 55840 | FBgn0033166 | CG11166 | 8E−26 | 48 | 146736_at |
| 81577 | FBgn0033174 | CG11125 | 0.00000000002 | 31 | 146743_at |
| 57708 | FBgn0033183 | CG1620 | 1E−49 | 30 | 146745_at |
| 1528 | FBgn0033189 | CG2140 | 3E−30 | 48 | 146746_at |
| 54834 | FBgn0042135 | CG18812 | 1E−105 | 39 | 146764_at |
| 54855 | FBgn0050497 | CG30497 | 1E−110 | 61 | 146765_at |
| 63874 | FBgn0033226 | CG1882 | 2E−94 | 49 | 146771_at |
| 8993 | FBgn0043575 | CG14745 | 5E−41 | 47 | 146832_at |
| 60682 | FBgn0033349 | CG8243 | 6E−55 | 33 | 146846_at |
| 9939 | FBgn0033378 | CG8781 | 2E−56 | 63 | 146865_at |
| 84137 | FBgn0033380 | CG8069 | 6E−27 | 30 | 146867_at |
| 10567 | FBgn0033468 | CG1418 | 1E−24 | 36 | 146913_at |
| 7247 | FBgn0033528 | CG11761 | 8E−59 | 52 | 146953_at |
| 55505 | FBgn0033548 | CG7637 | 4E−20 | 66 | 146963_at |
| 4700 | FBgn0033570 | CG7712 | 1E−31 | 48 | 146973_at |
| 57599 | FBgn0033607 | CG9062 | 0 | 56 | 147005_at |
| 80218 | FBgn0024188 | CG12352 | 6E−70 | 70 | 147018_at |
| 8446 | FBgn0033647 | CG13197 | 3E−43 | 38 | 147032_at |
| 79648 | FBgn0033664 | CG8981 | 0.0000000000003 | 39 | 147046_at |
| 23480 | FBgn0033691 | CG8860 | 4E−29 | 86 | 147060_at |
| 8729 | FBgn0033714 | CG8487 | 0 | 45 | 147079_at |
| 2799 | FBgn0033836 | CG18278 | 1E−112 | 45 | 147151_at |
| 9145 | FBgn0033876 | CG10808 | 1E−43 | 40 | 147172_at |
| 444 | FBgn0034075 | CG8421 | 1E−109 | 35 | 147279_at |
| 6209 | FBgn0034138 | CG8332 | 2E−59 | 76 | 147317_at |
| 8662 | FBgn0034237 | CG4878 | 0 | 51 | 147373_at |
| 5105 | FBgn0034356 | CG10924 | 0 | 65 | 147444_at |
| 1036 | FBgn0034364 | CG5493 | 4E−56 | 52 | 147450_at |
| 2052 | FBgn0034405 | CG15102 | 1E−95 | 42 | 147472_at |
| 26090 | FBgn0034419 | CG15111 | 2E−64 | 37 | 147479_at |
| 8491 | FBgn0034421 | CG7097 | 1E−138 | 75 | 147480_at |
| 135138 | FBgn0034454 | CG15120 | 5E−44 | 57 | 147502_at |
| 10914 | FBgn0015949 | CG9854 | 0 | 52 | 147511_at |
| 25828 | FBgn0034472 | CG8517 | 9E−28 | 48 | 147518_at |
| 80344 | FBgn0034527 | CG9945 | 3E−82 | 37 | 147558_at |
| 10559 | FBgn0034532 | CG13436 | 1E−20 | 21 | 147559_at |
| 84191 | FBgn0050152 | CG30152 | 5E−39 | 57 | 147569_at |
| 11157 | FBgn0034564 | CG9344 | 1E−33 | 85 | 147588_at |
| 126328 | FBgn0034576 | CG9350 | 8E−16 | 35 | 147595_at |
| 6217 | FBgn0034743 | CG4046 | 2E−69 | 88 | 147686_at |
| 79643 | FBgn0034744 | CG4071 | 6E−21 | 41 | 147687_at |
| 5479 | FBgn0034753 | CG2852 | 3E−76 | 73 | 147691_at |
| 10588 | FBgn0034851 | CG11079 | 2E−32 | 35 | 147768_at |
| 1984 | FBgn0034967 | CG3186 | 2E−57 | 68 | 147834_at |
| 6136 | FBgn0002611 | CG3195 | 6E−75 | 79 | 147835_at |
| 79657 | FBgn0015544 | CG13570 | 8E−31 | 25 | 147842_at |
| 4702 | FBgn0035046 | CG3683 | 6E−38 | 46 | 147881_at |
| 4323 | FBgn0035049 | CG4859 | 1E−92 | 38 | 147882_at |
| 79020 | FBgn0035163 | CG13886 | 6E−55 | 34 | 147941_at |
| 51691 | FBgn0035271 | CG2021 | 2E−34 | 69 | 148002_at |
| 1130 | FBgn0035296 | CG11814 | 1E−126 | 36 | 148016_at |
| 6150 | FBgn0035335 | CG1320 | 4E−28 | 43 | 148041_at |
| 50488 | FBgn0010909 | CG16973 | 1E−178 | 46 | 148051_at |
| 219670 | FBgn0035354 | CG16984 | 3E−22 | 31 | 148053_at |
| 55856 | FBgn0035356 | CG16986 | 1E−21 | 39 | 148055_at |
| 3423 | FBgn0035445 | CG12014 | 1E−118 | 44 | 148109_at |
| 9669 | FBgn0026259 | CG10840 | 0 | 65 | 148111_r_at |
| 51072 | FBgn0035491 | CG11591 | 0.0000000000005 | 39 | 148143_at |
| 755 | FBgn0035497 | CG14995 | 3E−37 | 53 | 148145_at |
| 129831 | FBgn0035526 | CG1316 | 8E−74 | 35 | 148165_at |
| 2230 | FBgn0035529 | CG1319 | 4E−35 | 57 | 148166_at |
| 25809 | FBgn0052238 | CG32238 | 1E−166 | 67 | 148193_at |
| 23658 | FBgn0035675 | CG6610 | 5E−36 | 85 | 148261_at |
| 130589 | FBgn0035679 | CG10467 | 7E−75 | 44 | 148265_at |
| 55245 | FBgn0035722 | CG10075 | 5E−36 | 37 | 148291_at |
| 1628 | FBgn0035753 | CG8615 | 3E−71 | 69 | 148318_at |
| 142891 | FBgn0052380 | CG32380 | 1E−108 | 67 | 148329_at |
| 2052 | FBgn0035827 | CG8268 | 0.00000000000004 | 41 | 148367_at |
| 23144 | FBgn0035900 | CG6694 | 1E−32 | 28 | 148406_at |
| 6059 | FBgn0035946 | CG5651 | 0 | 77 | 148436_at |
| 64699 | FBgn0023479 | CG4821 | 1E−44 | 36 | 148446_at |
| 51151 | FBgn0035968 | CG4484 | 1E−73 | 30 | 148450_at |
| 5631 | FBgn0036030 | CG6767 | 1E−161 | 88 | 148484_at |
| 51571 | FBgn0052066 | CG32066 | 1E−92 | 54 | 148527_at |
| 4698 | FBgn0036100 | CG6463 | 1E−28 | 50 | 148532_at |
| 51647 | FBgn0036107 | CG7949 | 3E−59 | 71 | 148536_at |
| 51069 | FBgn0036135 | CG7636 | 4E−36 | 54 | 148557_at |
| 4524 | FBgn0036157 | CG7560 | 4E−21 | 27 | 148573_at |
| 23464 | FBgn0036208 | CG10361 | 1E−152 | 66 | 148605_at |
| 4711 | FBgn0011455 | CG9762 | 9E−31 | 49 | 148634_at |
| 51386 | FBgn0036258 | CG5642 | 1E−169 | 52 | 148635_at |
| 55586 | FBgn0036262 | CG6910 | 7E−88 | 56 | 148639_at |
| 203 | FBgn0022709 | CG17146 | 4E−46 | 48 | 148641_at |
| 210 | FBgn0036271 | CG10335 | 1E−109 | 61 | 148647_at |
| 6611 | FBgn0036272 | CG4300 | 3E−76 | 43 | 148648_at |
| 11065 | FBgn0027936 | CG10682 | 4E−53 | 60 | 148664_at |
| 51364 | FBgn0036338 | CG11253 | 2E−65 | 31 | 148692_at |
| 28988 | FBgn0036372 | CG10083 | 5E−62 | 30 | 148717_at |
| 55578 | FBgn0036374 | CG17689 | 8E−32 | 28 | 148719_at |
| 2029 | FBgn0036401 | CG6513 | 2E−19 | 45 | 148739_at |
| 5507 | FBgn0036428 | CG9238 | 2E−35 | 42 | 148753_at |
| 81550 | FBgn0036450 | CG13472 | 5E−47 | 31 | 148768_at |
| 283375 | FBgn0036461 | CG10006 | 6E−50 | 36 | 148775_at |
| 286053 | FBgn0036730 | CG13732 | 0.00000000003 | 25 | 148959_at |
| 80153 | FBgn0036735 | CG6311 | 5E−48 | 32 | 148962_at |
| 977 | FBgn0036769 | CG5492 | 4E−30 | 28 | 148983_at |
| 79017 | FBgn0036787 | CG4306 | 2E−26 | 37 | 148995_at |
| 6154 | FBgn0036825 | CG6846 | 9E−60 | 72 | 149019_at |
| 10282 | FBgn0036855 | CG14084 | 1E−17 | 39 | 149035_at |
| 55324 | FBgn0036888 | CG9330 | 0 | 56 | 149061_at |
| 84669 | FBgn0036913 | CG8334 | 1E−101 | 47 | 149075_at |
| 10101 | FBgn0037011 | CG4858 | 1E−84 | 55 | 149138_at |
| 8661 | FBgn0037249 | CG9805 | 0 | 44 | 149279_at |
| 9827 | FBgn0037297 | CG1116 | 4E−57 | 36 | 149311_at |
| 51097 | FBgn0037298 | CG2604 | 1E−81 | 39 | 149312_at |
| 9451 | FBgn0037327 | CG2087 | 1E−86 | 35 | 149333_at |
| 6165 | FBgn0037328 | CG2099 | 2E−35 | 61 | 149334_at |
| 3141 | FBgn0037332 | CG14670 | 9E−70 | 31 | 149335_at |
| 152007 | CG31482 | CG31482 | 5E−31 | 50 | 149411_at |
| 9317 | FBgn0037683 | CG18473 | 1E−89 | 45 | 149552_s_at |
| 6164 | FBgn0037686 | CG9354 | 9E−30 | 58 | 149554_at |
| 4857 | FBgn0026188 | CG8144 | 3E−95 | 43 | 149559_at |
| 89782 | FBgn0002478 | CG3953 | 1E−136 | 42 | 149618_at |
| 2731 | FBgn0037801 | CG3999 | 0 | 64 | 149624_at |
| 50 | FBgn0037862 | CG4706 | 0 | 70 | 149664_at |
| 25819 | CG31299 | CG31299 | 3E−72 | 47 | 149672_at |
| 6391 | FBgn0037873 | CG6666 | 1E−25 | 41 | 149673_at |
| 25994 | FBgn0037890 | CG17734 | 7E−17 | 52 | 149681_at |
| 83874 | FBgn0037917 | CG5344 | 5E−85 | 45 | 149694_at |
| 83733 | FBgn0037969 | CG18347 | 3E−87 | 53 | 149719_at |
| 8464 | FBgn0037981 | CG3169 | 1E−21 | 31 | 149726_at |
| 54187 | FBgn0038045 | CG5232 | 9E−91 | 47 | 149775_at |
| 79157 | FBgn0038053 | CG18549 | 1E−101 | 43 | 149779_at |
| 3312 | FBgn0038059 | CG6489 | 0 | 76 | 149782_at |
| 27232 | FBgn0038074 | CG6188 | 1E−91 | 57 | 149794_at |
| 54788 | FBgn0038195 | CG3061 | 2E−81 | 42 | 149868_at |
| 94121 | FBgn0038263 | CG7343 | 3E−87 | 43 | 149919_at |
| 11235 | FBgn0038331 | CG5073 | 2E−46 | 48 | 149953_at |
| 80070 | FBgn0038341 | CG14869 | 1E−152 | 30 | 149959_at |
| 97 | FBgn0038363 | CG18505 | 4E−20 | 45 | 149974_at |
| 29985 | FBgn0038412 | CG6898 | 8E−27 | 28 | 150003_at |
| 8293 | FBgn0038421 | CG17931 | 0.000000000001 | 57 | 150009_at |
| 51573 | FBgn0038432 | CG14883 | 0.0000000000001 | 23 | 150018_at |
| 158 | FBgn0038467 | CG3590 | 0 | 67 | 150041_at |
| 64963 | FBgn0038474 | CG5184 | 7E−26 | 49 | 150046_at |
| 5831 | FBgn0038516 | CG5840 | 2E−59 | 50 | 150080_at |
| 4191 | FBgn0038587 | CG7998 | 1E−114 | 59 | 150121_at |
| 83942 | FBgn0038630 | CG14305 | 2E−64 | 46 | 150150_at |
| 51692 | FBgn0038636 | CG7698 | 0 | 67 | 150154_at |
| 54840 | FBgn0038704 | CG5316 | 1E−31 | 47 | 150195_at |
| 9818 | FBgn0038722 | CG7360 | 4E−49 | 29 | 150209_at |
| 10257 | FBgn0038740 | CG4562 | 0 | 45 | 150223_at |
| 35 | FBgn0038742 | CG4703 | 1E−160 | 69 | 150225_at |
| 5523 | FBgn0038744 | CG4733 | 1E−141 | 56 | 150227_at |
| 22933 | FBgn0038788 | CG5085 | 1E−96 | 49 | 150255_at |
| 55217 | FBgn0038795 | CG4335 | 6E−41 | 32 | 150261_at |
| 6727 | FBgn0038808 | CG5417 | 5E−16 | 37 | 150266_at |
| 51592 | FBgn0023097 | CG5206 | 4E−94 | 26 | 150269_at |
| 2197 | FBgn0038834 | CG15697 | 5E−32 | 55 | 150281_at |
| 81889 | FBgn0038858 | CG5793 | 3E−53 | 49 | 150297_at |
| 1175 | FBgn0043012 | CG6056 | 3E−76 | 95 | 150308_at |
| 11267 | FBgn0038908 | CG6637 | 2E−69 | 50 | 150331_at |
| 403 | FBgn0038916 | CG6560 | 5E−65 | 65 | 150337_at |
| 670 | FBgn0038974 | CG5377 | 3E−65 | 45 | 150370_at |
| 8626 | FBgn0039044 | CG10873 | 0.00000000002 | 26 | 150416_at |
| 26973 | FBgn0029503 | CG6198 | 3E−84 | 43 | 150490_at |
| 5441 | FBgn0039218 | CG13628 | 8E−34 | 92 | 150520_at |
| 11285 | FBgn0039258 | CG11780 | 7E−77 | 52 | 150544_at |
| 51441 | FBgn0039261 | CG6422 | 6E−78 | 41 | 150546_at |
| 9147 | FBgn0039281 | CG11847 | 0 | 45 | 150553_at |
| 7436 | CG31092 | CG31092 | 0 | 42 | 150606_at |
| 1800 | FBgn0039420 | CG6154 | 3E−98 | 51 | 150654_at |
| 90522 | FBgn0039450 | CG5484 | 8E−66 | 43 | 150680_at |
| 9203 | FBgn0010328 | CG5965 | 1E−108 | 37 | 150721_at |
| 7468 | FBgn0039559 | CG4976 | 1E−133 | 31 | 150758_at |
| 7280 | FBgn0039567 | CG4869 | 0 | 73 | 150762_at |
| 1937 | FBgn0029176 | CG11901 | 1E−141 | 56 | 150815_at |
| 135 | FBgn0039747 | CG9753 | 7E−53 | 36 | 150872_at |
| 6128 | FBgn0039857 | CG11522 | 7E−58 | 47 | 150949_at |
| 4720 | FBgn0039909 | CG1970 | 0 | 76 | 150980_at |
| 6529 | FBgn0039915 | CG1732 | 0 | 61 | 150984_at |
| 29855 | FBgn0005596 | CG14513 | 2E−37 | 24 | 151107_r_at |
| 4695 | FBgn0040705 | CG15434 | 1E−17 | 50 | 151182_at |
| 10287 | FBgn0005613 | CG8404 | 7E−36 | 51 | 151227_f_at |
| 150678 | FBgn0040754 | CG17059 | 0.00000000001 | 52 | 151231_at |
| 153339 | FBgn0040890 | CG14199 | 1E−26 | 73 | 151363_at |
| 140838 | FBgn0029801 | CG15771 | 1E−31 | 41 | 151499_at |
| 1609 | CG31140 | CG31140 | 1E−131 | 36 | 151514_at |
| 5581 | FBgn0003093 | CG1954 | 0 | 57 | 151525_at |
| 1778 | FBgn0010349 | CG7507 | 0 | 73 | 151529_at |
| 6519 | FBgn0050359 | CG30359 | 1E−104 | 37 | 151539_at |
| 23428 | FBgn0039844 | CG1607 | 1E−141 | 49 | 151567_at |
| 23137 | FBgn0052438 | CG32438 | 4E−45 | 27 | 151585_at |
| 1655 | FBgn0035720 | CG10077 | 1E−177 | 56 | 151598_at |
| 25769 | FBgn0028704 | CG18660 | 1E−166 | 53 | 151600_at |
| 23046 | FBgn0032243 | CG5300 | 0 | 41 | 151611_at |
| 10422 | FBgn0028372 | CG11025 | 2E−29 | 28 | 151625_at |
| 5625 | FBgn0003423 | CG1417 | 1E−147 | 50 | 151627_s_at |
| 64083 | FBgn0031402 | CG7085 | 1E−117 | 70 | 151629_at |
| 6450 | FBgn0035772 | CG8582 | 2E−17 | 32 | 151636_at |
| 6780 | FBgn0003520 | CG5753 | 2E−63 | 31 | 151638_s_at |
| 5287 | FBgn0015278 | CG11621 | 0 | 37 | 151675_s_at |
| 64779 | FBgn0037245 | CG14648 | 2E−43 | 28 | 151683_at |
| 817 | FBgn0004624 | CG18069 | 0 | 77 | 151686_s_at |
| 28996 | FBgn0035142 | CG17090 | 0 | 51 | 151694_at |
| 7170 | FBgn0003721 | CG4898 | 3E−82 | 56 | 151700_at |
| 10904 | FBgn0040239 | CG4867 | 2E−22 | 62 | 151711_at |
| 84988 | FBgn0036801 | CG6896 | 9E−93 | 41 | 151721_at |
| 4907 | FBgn0050104 | CG30104 | 1E−111 | 40 | 151726_at |
| 7094 | FBgn0035910 | CG6831 | 0 | 47 | 151754_at |
| 4520 | FBgn0040305 | CG3743 | 5E−75 | 44 | 151761_at |
| 10797 | FBgn0010222 | CG18466 | 4E−93 | 57 | 151767_at |
| 9512 | FBgn0038271 | CG3731 | 0 | 70 | 151769_at |
| 11069 | FBgn0033102 | CG3427 | 0 | 50 | 151791_at |
| 57515 | FBgn0028399 | CG4672 | 1E−110 | 43 | 151794_at |
| 3417 | FBgn0013617 | CG7176 | 1E−177 | 72 | 151795_at |
| 2203 | FBgn0051692 | CG31692 | 1E−120 | 64 | 151797_at |
| 10527 | FBgn0026252 | CG7935 | 0 | 54 | 151799_at |
| 8722 | FBgn0037303 | CG12163 | 5E−75 | 45 | 151801_at |
| 5862 | FBgn0014009 | CG3269 | 1E−107 | 89 | 151803_at |
| 84263 | FBgn0039537 | CG5590 | 2E−53 | 43 | 151807_at |
| 55968 | FBgn0033179 | CG11139 | 7E−68 | 37 | 151810_at |
| 117283 | FBgn0034644 | CG10082 | 9E−45 | 48 | 151811_at |
| 10445 | FBgn0035489 | CG1135 | 1E−111 | 55 | 151816_at |
| 6576 | CG31305 | CG31305 | 2E−81 | 68 | 151826_at |
| 4942 | FBgn0036898 | CG8782 | 1E−179 | 70 | 151832_at |
| 9531 | FBgn0052130 | CG32130 | 3E−16 | 23 | 151834_at |
| 10418 | FBgn0033710 | CG17739 | 1E−109 | 31 | 151836_at |
| 706 | FBgn0031263 | CG2789 | 1E−36 | 47 | 151838_at |
| 7347 | FBgn0010288 | CG4265 | 1E−60 | 50 | 151849_at |
| 4125 | FBgn0027611 | CG6206 | 0 | 47 | 151851_at |
| 1468 | FBgn0027610 | CG8790 | 3E−85 | 58 | 151853_at |
| 54968 | FBgn0035805 | CG7506 | 3E−26 | 35 | 151858_at |
| 339 | CG31170 | CG31170 | 5E−88 | 77 | 151866_at |
| 6648 | FBgn0010213 | CG8905 | 1E−74 | 62 | 151875_at |
| 9777 | FBgn0028541 | CG7364 | 0 | 64 | 151878_at |
| 55572 | FBgn0033093 | CG3270 | 1E−107 | 49 | 151882_at |
| 2194 | FBgn0042627 | CG3524 | 0 | 45 | 151887_at |
| 23585 | FBgn0035528 | CG15012 | 3E−26 | 38 | 151896_at |
| 2730 | FBgn0039001 | CG4919 | 5E−27 | 30 | 151897_at |
| 23633 | FBgn0024889 | CG8548 | 0 | 62 | 151898_at |
| 3242 | FBgn0036992 | CG11796 | 1E−140 | 63 | 151899_at |
| 11162 | FBgn0030668 | CG8128 | 2E−34 | 38 | 151908_at |
| 26227 | FBgn0032350 | CG6287 | 2E−93 | 52 | 151909_at |
| 84466 | FBgn0027594 | CG2086 | 0 | 37 | 151918_s_at |
| 9351 | FBgn0010620 | CG10939 | 1E−19 | 40 | 151959_at |
| 4640 | FBgn0010246 | CG9155 | 0 | 49 | 151960_at |
| 275 | FBgn0032287 | CG6415 | 1E−100 | 52 | 151967_at |
| 51160 | FBgn0021814 | CG12770 | 3E−78 | 64 | 151970_at |
| 10989 | FBgn0019960 | CG6455 | 2E−62 | 37 | 151979_at |
| 7866 | FBgn0037747 | CG8481 | 2E−18 | 39 | 151982_at |
| 126326 | FBgn0034797 | CG12781 | 2E−31 | 34 | 151996_at |
| 57118 | FBgn0016126 | CG1495 | 1E−119 | 61 | 151997_at |
| 10048 | FBgn0033522 | CG11763 | 1E−144 | 49 | 152018_at |
| 3178 | FBgn0004237 | CG12749 | 1E−99 | 50 | 152021_at |
| 10550 | FBgn0032704 | CG10373 | 1E−28 | 36 | 152035_at |
| 54539 | FBgn0027785 | CG6008 | 0.00000000001 | 32 | 152036_at |
| 84064 | FBgn0032032 | CG17294 | 1E−60 | 49 | 152042_at |
| 57130 | FBgn0027582 | CG6230 | 0 | 55 | 152048_at |
| 91768 | FBgn0027581 | CG6191 | 5E−58 | 37 | 152052_at |
| 5091 | FBgn0027580 | CG1516 | 0 | 71 | 152059_at |
| 4677 | FBgn0028492 | CG10687 | 0 | 72 | 152066_at |
| 2639 | FBgn0031824 | CG9547 | 1E−163 | 68 | 152078_at |
| 11112 | FBgn0034390 | CG15093 | 1E−79 | 46 | 152083_at |
| 57678 | FBgn0027579 | CG5508 | 2E−82 | 30 | 152088_at |
| 9200 | FBgn0032394 | CG6746 | 5E−39 | 33 | 152090_at |
| 51239 | FBgn0051919 | CG31919 | 9E−36 | 45 | 152093_at |
| 59353 | FBgn0025712 | CG13920 | 1E−24 | 37 | 152097_at |
| 28970 | FBgn0035189 | CG9119 | 2E−76 | 47 | 152102_at |
| 51 | FBgn0027572 | CG5009 | 1E−151 | 43 | 152121_s_at |
| 2194 | FBgn0027571 | CG3523 | 0 | 48 | 152126_at |
| 10087 | FBgn0027569 | CG7207 | 1E−139 | 42 | 152129_at |
| 10113 | FBgn0031779 | CG9175 | 8E−54 | 31 | 152142_at |
| 36 | FBgn0036824 | CG3902 | 1E−141 | 62 | 152151_at |
| 26065 | FBgn0045828 | CG10686 | 2E−40 | 30 | 152168_at |
| 6723 | FBgn0037723 | CG8327 | 8E−93 | 55 | 152178_at |
| 5162 | FBgn0039635 | CG11876 | 1E−135 | 67 | 152185_at |
| 9817 | FBgn0038475 | CG3962 | 1E−160 | 49 | 152189_at |
| 10745 | FBgn0028579 | CG3268 | 2E−76 | 43 | 152190_at |
| 821 | FBgn0015622 | CG11958 | 1E−162 | 48 | 152192_at |
| 55033 | FBgn0010470 | CG9847 | 3E−45 | 45 | 152208_at |
| 4729 | FBgn0030853 | CG5703 | 2E−90 | 71 | 152209_at |
| 56267 | FBgn0037955 | CG6950 | 1E−129 | 54 | 152211_at |
| 80224 | FBgn0032986 | CG3262 | 3E−63 | 44 | 152214_at |
| 9990 | FBgn0025698 | CG5594 | 0 | 58 | 152231_at |
| 10352 | FBgn0036763 | CG7441 | 1E−92 | 52 | 152250_at |
| 6557 | CG31547 | CG31547 | 0 | 41 | 152262_at |
| 149465 | FBgn0034745 | CG4329 | 2E−60 | 27 | 152270_at |
| 25873 | FBgn0002579 | CG7622 | 2E−33 | 62 | 152271_at |
| 6506 | FBgn0026438 | CG3159 | 1E−121 | 42 | 152272_at |
| 2108 | FBgn0010516 | CG8996 | 1E−123 | 70 | 152276_at |
| 9851 | FBgn0003218 | CG11111 | 0 | 45 | 152278_at |
| 829 | FBgn0034577 | CG10540 | 1E−105 | 64 | 152284_at |
| 8721 | FBgn0026208 | CG4143 | 1E−49 | 65 | 152287_at |
| 6009 | FBgn0041191 | CG1081 | 2E−62 | 63 | 152298_at |
| 79031 | FBgn0036237 | CG18593 | 8E−65 | 49 | 152300_at |
| 8803 | FBgn0037643 | CG11963 | 1E−140 | 59 | 152304_at |
| 2820 | FBgn0034048 | CG8256 | 0 | 63 | 152312_at |
| 1777 | FBgn0000477 | CG7780 | 3E−46 | 32 | 152336_at |
| 2585 | FBgn0035950 | CG5288 | 5E−95 | 43 | 152351_at |
| 79989 | FBgn0038358 | CG4525 | 1E−166 | 52 | 152353_at |
| 26235 | FBgn0030555 | CG1839 | 3E−78 | 32 | 152361_at |
| 5222 | FBgn0032049 | CG13095 | 2E−87 | 43 | 152369_at |
| 1152 | FBgn0052031 | CG32031 | 9E−76 | 44 | 152383_at |
| 793 | FBgn0004580 | CG6702 | 2E−58 | 46 | 152384_at |
| 4666 | FBgn0017565 | CG8759 | 9E−60 | 61 | 152402_at |
| 31 | FBgn0033246 | CG11198 | 0 | 63 | 152407_at |
| 9772 | FBgn0022153 | CG3054 | 1E−64 | 36 | 152413_at |
| 5702 | FBgn0028684 | CG10370 | 0 | 86 | 152417_at |
| 2326 | FBgn0033079 | CG3174 | 2E−33 | 36 | 152425_at |
| 1727 | FBgn0036211 | CG5946 | 4E−94 | 62 | 152426_at |
| 83723 | FBgn0028480 | CG17841 | 2E−25 | 30 | 152431_at |
| 56241 | CG31004 | CG31004 | 5E−80 | 30 | 152434_at |
| 84067 | FBgn0025681 | CG3558 | 9E−95 | 41 | 152450_at |
| 5832 | FBgn0037146 | CG7470 | 0 | 58 | 152455_at |
| 23636 | FBgn0034118 | CG6251 | 2E−64 | 37 | 152469_at |
| 55277 | FBgn0035484 | CG11594 | 1E−152 | 49 | 152482_at |
| 83861 | FBgn0052392 | CG32392 | 7E−54 | 39 | 152495_at |
| 90 | FBgn0003317 | CG1891 | 1E−143 | 54 | 152507_at |
| 80148 | FBgn0031897 | CG13784 | 1E−31 | 58 | 152508_at |
| 11181 | FBgn0003748 | CG9364 | 1E−140 | 44 | 152512_at |
| 9819 | FBgn0010460 | CG5461 | 1E−41 | 26 | 152525_at |
| 4953 | FBgn0013307 | CG8721 | 3E−87 | 46 | 152531_at |
| 6311 | FBgn0038338 | CG5166 | 2E−54 | 23 | 152532_at |
| 6389 | FBgn0017539 | CG17246 | 0 | 73 | 152538_at |
| 128866 | FBgn0033385 | CG8055 | 5E−64 | 57 | 152547_at |
| 5547 | FBgn0032864 | CG2493 | 1E−116 | 46 | 152568_at |
| 54363 | FBgn0050019 | CG30019 | 2E−98 | 48 | 152569_at |
| 8991 | FBgn0038115 | CG7966 | 1E−140 | 51 | 152571_at |
| 11319 | FBgn0035324 | CG5714 | 2E−41 | 31 | 152574_at |
| 2109 | FBgn0039697 | CG7834 | 1E−94 | 70 | 152584_at |
| 55858 | FBgn0038297 | CG4196 | 3E−73 | 60 | 152602_at |
| 3295 | FBgn0030731 | CG3415 | 1E−175 | 52 | 152603_at |
| 140690 | FBgn0035769 | CG8591 | 4E−88 | 41 | 152607_at |
| 132 | FBgn0036337 | CG11255 | 5E−97 | 52 | 152613_at |
| 9293 | FBgn0035538 | CG18314 | 2E−25 | 26 | 152630_at |
| 4659 | FBgn0052156 | CG32156 | 1E−120 | 30 | 152655_at |
| 4522 | FBgn0020385 | CG4067 | 0 | 61 | 152669_at |
| 2952 | FBgn0030484 | CG1681 | 1E−33 | 38 | 152675_at |
| 9374 | FBgn0032358 | CG4851 | 3E−59 | 40 | 152684_at |
| 5207 | FBgn0027621 | CG3400 | 1E−153 | 61 | 152692_at |
| 22884 | FBgn0038617 | CG12333 | 1E−120 | 50 | 152706_at |
| 7450 | FBgn0029167 | CG7002 | 1E−168 | 30 | 152708_at |
| 5471 | FBgn0041194 | CG10078 | 1E−177 | 61 | 152709_at |
| 10973 | FBgn0038344 | CG5205 | 0 | 58 | 152730_at |
| 7353 | FBgn0036136 | CG6233 | 6E−93 | 55 | 152735_at |
| 22872 | FBgn0033339 | CG8266 | 0 | 34 | 152754_at |
| 23175 | FBgn0033269 | CG8709 | 1E−130 | 33 | 152755_at |
| 5226 | FBgn0004654 | CG3724 | 0 | 71 | 152781_at |
| 51110 | FBgn0031987 | CG12375 | 6E−68 | 45 | 152792_at |
| 2806 | FBgn0031380 | CG4233 | 1E−155 | 64 | 152801_at |
| 22 | FBgn0035244 | CG7955 | 0 | 58 | 152811_at |
| 9390 | FBgn0019952 | CG6331 | 1E−92 | 35 | 152843_at |
| 54764 | FBgn0037734 | CG9448 | 1E−157 | 42 | 152844_at |
| 166012 | FBgn0051743 | CG31743 | 7E−52 | 41 | 152851_at |
| 79823 | FBgn0032857 | CG10947 | 2E−27 | 42 | 152852_at |
| 81034 | FBgn0033391 | CG8026 | 5E−92 | 53 | 152861_at |
| 2744 | FBgn0033765 | CG8772 | 1E−169 | 54 | 152880_at |
| 9371 | FBgn0004381 | CG7293 | 1E−175 | 45 | 152894_at |
| 7111 | FBgn0011716 | CG1539 | 2E−61 | 36 | 152898_at |
| 84947 | FBgn0032699 | CG10383 | 4E−41 | 37 | 152901_at |
| 51011 | FBgn0038924 | CG6028 | 9E−68 | 54 | 152903_at |
| 6319 | FBgn0043044 | CG5887 | 1E−102 | 58 | 152911_at |
| 9382 | FBgn0037998 | CG4848 | 1E−49 | 24 | 152916_at |
| 8525 | FBgn0003217 | CG10966 | 0 | 41 | 152920_at |
| 26960 | FBgn0003244 | CG6775 | 0 | 67 | 152922_at |
| 840 | FBgn0019972 | CG7788 | 8E−55 | 43 | 152941_at |
| 7317 | FBgn0023143 | CG1782 | 0 | 59 | 152946_at |
| 5579 | FBgn0004784 | CG6518 | 0 | 53 | 152951_at |
| 5876 | FBgn0028970 | CG18627 | 1E−123 | 64 | 152961_at |
| 3284 | FBgn0036698 | CG7724 | 5E−29 | 28 | 152966_at |
| 221 | FBgn0010548 | CG11140 | 1E−135 | 50 | 152970_at |
| 175 | FBgn0033431 | CG1827 | 1E−93 | 55 | 152972_at |
| 590 | FBgn0000024 | CG17907 | 1E−110 | 36 | 152974_at |
| 28962 | FBgn0035440 | CG14969 | 4E−20 | 26 | 152988_at |
| 622 | FBgn0033679 | CG8888 | 2E−42 | 33 | 152990_at |
| 7078 | FBgn0025879 | CG6281 | 0.0000000000003 | 26 | 153002_at |
| 90864 | FBgn0040280 | CG14041 | 1E−32 | 35 | 153005_at |
| 3420 | FBgn0038922 | CG6439 | 1E−119 | 60 | 153008_at |
| 5799 | FBgn0051795 | CG31795 | 1E−134 | 51 | 153019_at |
| 5564 | FBgn0033383 | CG8057 | 2E−68 | 62 | 153026_at |
| 6559 | FBgn0036279 | CG4357 | 0 | 47 | 153037_at |
| 189 | FBgn0014031 | CG3926 | 1E−95 | 45 | 153046_at |
| 64374 | FBgn0039296 | CG10420 | 4E−33 | 30 | 153052_at |
| 22905 | FBgn0028582 | CG8532 | 1E−104 | 38 | 153065_at |
| 64699 | FBgn0023479 | CG4821 | 1E−44 | 36 | 153070_at |
| 905 | FBgn0025455 | CG6292 | 5E−90 | 34 | 153091_at |
| 8407 | FBgn0035499 | CG14996 | 1E−32 | 42 | 153092_at |
| 64422 | FBgn0036813 | CG6877 | 1E−119 | 62 | 153099_at |
| 84928 | FBgn0036710 | CG6479 | 2E−46 | 27 | 153108_at |
| 4245 | FBgn0034521 | CG13431 | 1E−126 | 53 | 153109_at |
| 1743 | FBgn0037891 | CG5214 | 1E−133 | 62 | 153115_at |
| 23646 | FBgn0032923 | CG9248 | 1E−103 | 48 | 153117_at |
| 4728 | FBgn0017567 | CG3944 | 1E−85 | 82 | 153134_at |
| 6139 | FBgn0029897 | CG3203 | 4E−72 | 70 | 153138_at |
| 29968 | FBgn0014427 | CG11899 | 1E−127 | 63 | 153150_at |
| 10190 | FBgn0037843 | CG4511 | 7E−65 | 53 | 153166_at |
| 4716 | FBgn0021967 | CG8844 | 2E−21 | 31 | 153168_at |
| 167227 | FBgn0036534 | CG6169 | 3E−25 | 46 | 153180_at |
| 5694 | FBgn0010590 | CG8392 | 1E−69 | 57 | 153183_at |
| 85365 | FBgn0035401 | CG1291 | 1E−111 | 51 | 153189_at |
| 10240 | FBgn0036557 | CG5904 | 6E−35 | 35 | 153207_at |
| 6147 | FBgn0026372 | CG7977 | 3E−52 | 62 | 153215_at |
| 64129 | FBgn0034709 | CG3074 | 1E−94 | 42 | 153218_at |
| 84895 | FBgn0030037 | CG12125 | 2E−74 | 33 | 153237_at |
| 3422 | FBgn0038876 | CG5919 | 1E−57 | 49 | 153240_at |
| 55854 | FBgn0033317 | CG8635 | 1E−115 | 53 | 153244_at |
| 55969 | FBgn0033209 | CG12107 | 7E−36 | 64 | 153246_at |
| 55669 | FBgn0029870 | CG3869 | 0 | 46 | 153256_at |
| 2762 | FBgn0031661 | CG8890 | 1E−150 | 70 | 153281_at |
| 54976 | FBgn0035896 | CG6983 | 0.000000000000008 | 30 | 153282_at |
| 515 | FBgn0019644 | CG8189 | 4E−49 | 46 | 153283_at |
| 51263 | FBgn0034089 | CG8446 | 3E−56 | 38 | 153289_at |
| 51477 | FBgn0025885 | CG11143 | 0 | 61 | 153296_at |
| 81614 | FBgn0032451 | CG12292 | 1E−96 | 51 | 153299_at |
| 4704 | FBgn0037001 | CG6020 | 7E−76 | 44 | 153309_at |
| 9410 | FBgn0031229 | CG3436 | 1E−121 | 61 | 153310_at |
| 3313 | FBgn0001220 | CG8542 | 0 | 77 | 153311_at |
| 23521 | FBgn0037351 | CG1475 | 3E−68 | 58 | 153316_at |
| 4848 | FBgn0017550 | CG2161 | 2E−66 | 51 | 153321_at |
| 4329 | FBgn0023537 | CG17896 | 0 | 68 | 153323_at |
| 3065 | FBgn0015805 | CG7471 | 0 | 77 | 153325_at |
| 4723 | FBgn0031771 | CG9140 | 0 | 85 | 153326_at |
| 11333 | FBgn0029715 | CG11444 | 5E−33 | 43 | 153333_at |
| 1615 | FBgn0002069 | CG3821 | 0 | 68 | 153336_at |
| 2819 | FBgn0001128 | CG9042 | 1E−128 | 66 | 153347_at |
| 1537 | FBgn0035600 | CG4769 | 3E−95 | 59 | 153348_at |
| 7905 | FBgn0033906 | CG8331 | 1E−45 | 52 | 153351_at |
| 51068 | FBgn0023542 | CG3460 | 1E−155 | 53 | 153358_at |
| 7001 | FBgn0040309 | CG1633 | 5E−77 | 71 | 153359_at |
| 1371 | FBgn0021944 | CG3433 | 1E−130 | 59 | 153362_at |
| 2592 | FBgn0031845 | CG9232 | 1E−119 | 57 | 153364_at |
| 7086 | FBgn0037607 | CG8036 | 0 | 59 | 153373_at |
| 9320 | FBgn0037277 | CG17735 | 0 | 54 | 153383_at |
| 79969 | FBgn0035989 | CG3967 | 3E−36 | 42 | 153386_at |
| 10228 | FBgn0037084 | CG7736 | 2E−57 | 41 | 153387_at |
| 10287 | FBgn0028544 | CG16884 | 0.0000000000008 | 33 | 153391_at |
| 9049 | FBgn0030345 | CG1847 | 2E−65 | 40 | 153402_at |
| 57727 | FBgn0024542 | CG8614 | 6E−25 | 30 | 153420_at |
| 528 | FBgn0020611 | CG8048 | 1E−146 | 65 | 153422_at |
| 10606 | FBgn0020513 | CG3989 | 1E−140 | 59 | 153428_at |
| 55034 | FBgn0002641 | CG1692 | 6E−95 | 42 | 153431_at |
| 1979 | FBgn0022073 | CG8846 | 5E−18 | 39 | 153432_at |
| 3248 | FBgn0011693 | CG4899 | 9E−36 | 36 | 153433_at |
| 5053 | FBgn0001208 | CG7399 | 1E−157 | 62 | 153434_at |
| 498 | FBgn0011211 | CG3612 | 0 | 81 | 153435_at |
| 8508 | FBgn0030724 | CG9212 | 5E−70 | 49 | 153450_at |
| 1020 | FBgn0013762 | CG8203 | 1E−134 | 79 | 153451_at |
| 10444 | FBgn0043458 | CG12084 | 1E−124 | 37 | 153456_at |
| 481 | FBgn0015776 | CG9258 | 2E−33 | 33 | 153468_at |
| 8027 | FBgn0027363 | CG6521 | 1E−104 | 39 | 153478_at |
| 6633 | FBgn0037434 | CG1249 | 4E−55 | 88 | 153483_at |
| 64771 | FBgn0030838 | CG5445 | 5E−26 | 37 | 153484_at |
| 11124 | FBgn0034068 | CG8400 | 1E−106 | 34 | 153493_at |
| 6396 | FBgn0024509 | CG6773 | 1E−106 | 58 | 153498_at |
| 56888 | FBgn0037655 | CG11984 | 6E−86 | 52 | 153500_at |
| 2079 | FBgn0011586 | CG1871 | 2E−44 | 79 | 153502_at |
| 9342 | FBgn0034913 | CG11173 | 5E−28 | 31 | 153505_at |
| 5530 | FBgn0011826 | CG9842 | 0 | 83 | 153523_at |
| 10981 | FBgn0015788 | CG8024 | 3E−79 | 67 | 153524_at |
| 158584 | FBgn0033717 | CG8839 | 1E−124 | 46 | 153538_at |
| 84376 | FBgn0001202 | CG10653 | 1E−109 | 33 | 153540_at |
| 56910 | FBgn0032513 | CG6565 | 2E−36 | 27 | 153542_at |
| 55082 | FBgn0051712 | CG31712 | 2E−56 | 47 | 153569_at |
| 231 | FBgn0036182 | CG6084 | 1E−106 | 59 | 153576_at |
| 1399 | FBgn0024811 | CG1587 | 4E−65 | 44 | 153622_at |
| 23291 | FBgn0023423 | CG3412 | 0 | 82 | 153633_at |
| 11143 | FBgn0031911 | CG5229 | 1E−136 | 44 | 153634_at |
| 1642 | FBgn0027049 | CG7769 | 0 | 62 | 153636_at |
| 7443 | FBgn0027889 | CG6386 | 2E−67 | 37 | 153644_at |
| 1968 | FBgn0003600 | CG6476 | 0 | 83 | 153645_at |
| 9779 | FBgn0038129 | CG8449 | 1E−72 | 38 | 153652_at |
| 9053 | FBgn0035500 | CG14998 | 2E−42 | 27 | 153658_at |
| 5165 | FBgn0017558 | CG8808 | 1E−123 | 58 | 153665_at |
| 8539 | FBgn0027885 | CG6582 | 1E−122 | 46 | 153667_at |
| 26127 | FBgn0031871 | CG10158 | 2E−25 | 32 | 153669_at |
| 51719 | FBgn0017572 | CG4083 | 1E−132 | 70 | 153674_at |
| 7913 | FBgn0010567 | CG5935 | 4E−29 | 42 | 153681_at |
| 8452 | FBgn0001980 | CG11861 | 0 | 69 | 153701_at |
| 10049 | FBgn0034091 | CG8448 | 2E−50 | 45 | 153707_at |
| 6342 | FBgn0015808 | CG17320 | 0 | 59 | 153713_at |
| 27089 | FBgn0039244 | CG11069 | 4E−58 | 30 | 153724_at |
| 51029 | FBgn0033551 | CG7222 | 1E−66 | 62 | 153730_at |
| 116987 | CG31811 | CG31811 | 0 | 49 | 153741_at |
| 5347 | FBgn0003124 | CG12306 | 1E−175 | 52 | 153742_at |
| 55632 | FBgn0005683 | CG5354 | 2E−46 | 34 | 153746_at |
| 2885 | FBgn0004638 | CG6033 | 2E−76 | 65 | 153747_at |
| 4779 | FBgn0000338 | CG17894 | 1E−39 | 36 | 153758_at |
| 10856 | FBgn0040075 | CG9750 | 0 | 78 | 153759_at |
| 55902 | FBgn0012034 | CG9390 | 0 | 66 | 153769_at |
| 10541 | FBgn0034282 | CG5784 | 4E−51 | 47 | 153773_at |
| 196463 | FBgn0016031 | CG10645 | 1E−32 | 31 | 153774_at |
| 7360 | FBgn0035978 | CG4347 | 1E−170 | 62 | 153782_at |
| 9441 | FBgn0039923 | CG1793 | 0.00000000000002 | 51 | 153799_at |
| 6628 | FBgn0010083 | CG5352 | 3E−67 | 62 | 153800_at |
| 255919 | FBgn0036090 | CG8009 | 4E−23 | 54 | 153807_at |
| 2580 | FBgn0037218 | CG1107 | 1E−147 | 41 | 153829_at |
| 285672 | FBgn0029873 | CG3918 | 8E−28 | 39 | 153833_at |
| 9406 | FBgn0034750 | CG3732 | 3E−58 | 45 | 153834_at |
| 116039 | FBgn0004893 | CG10021 | 4E−77 | 75 | 153835_at |
| 10231 | FBgn0020250 | CG6072 | 6E−39 | 43 | 153839_at |
| 8560 | FBgn0001941 | CG9078 | 1E−124 | 61 | 153842_at |
| 51166 | FBgn0036117 | CG6321 | 3E−18 | 23 | 153845_at |
| 51247 | FBgn0038100 | CG12358 | 0.00000000001 | 39 | 153850_at |
| 54715 | FBgn0052062 | CG32062 | 2E−41 | 65 | 153863_at |
| 396 | FBgn0036921 | CG7823 | 3E−52 | 51 | 153882_at |
| 863 | FBgn0005636 | CG3385 | 9E−64 | 30 | 153902_at |
| 55737 | FBgn0034708 | CG5625 | 0 | 59 | 153904_at |
| 10139 | FBgn0030088 | CG7039 | 1E−71 | 63 | 153905_at |
| 167153 | FBgn0030353 | CG15737 | 1E−55 | 39 | 153926_at |
| 9706 | FBgn0036313 | CG10967 | 1E−101 | 42 | 153938_at |
| 28514 | FBgn0000463 | CG3619 | 1E−161 | 48 | 153950_at |
| 7511 | FBgn0026150 | CG6291 | 1E−168 | 48 | 153980_at |
| 6229 | FBgn0034751 | CG3751 | 7E−55 | 77 | 153994_at |
| 84946 | FBgn0027525 | CG7686 | 1E−89 | 40 | 154018_at |
| 23534 | FBgn0031456 | CG2848 | 0 | 41 | 154021_at |
| 4673 | FBgn0015268 | CG5330 | 3E−92 | 45 | 154024_at |
| 3069 | FBgn0027835 | CG5170 | 0 | 46 | 154042_at |
| 23761 | FBgn0039143 | CG5991 | 7E−76 | 48 | 154048_at |
| 84219 | FBgn0027518 | CG7609 | 1E−146 | 41 | 154050_at |
| 6879 | FBgn0024909 | CG2670 | 2E−48 | 44 | 154051_at |
| 7296 | FBgn0020653 | CG2151 | 1E−149 | 55 | 154053_at |
| 79591 | FBgn0037638 | CG8379 | 1E−149 | 43 | 154054_at |
| 151742 | FBgn0027515 | CG7115 | 7E−56 | 57 | 154059_at |
| 24137 | FBgn0011606 | CG8590 | 1E−173 | 34 | 154060_at |
| 55299 | FBgn0052253 | CG32253 | 4E−88 | 48 | 154073_at |
| 23381 | FBgn0019890 | CG8954 | 4E−24 | 24 | 154083_at |
| 1491 | FBgn0000566 | CG5345 | 1E−140 | 63 | 154085_at |
| 56261 | FBgn0031566 | CG2818 | 1E−103 | 40 | 154114_at |
| 10946 | FBgn0014366 | CG2925 | 0 | 65 | 154122_at |
| 54778 | FBgn0037944 | CG6923 | 5E−32 | 28 | 154123_at |
| 10933 | FBgn0027378 | CG6363 | 9E−76 | 39 | 154132_at |
| 9135 | FBgn0034585 | CG4030 | 9E−32 | 24 | 154147_at |
| 2107 | FBgn0036974 | CG5605 | 0 | 85 | 154148_at |
| 4580 | FBgn0037710 | CG9393 | 5E−31 | 29 | 154154_at |
| 9942 | FBgn0038463 | CG3534 | 1E−123 | 43 | 154175_at |
| 6888 | FBgn0023477 | CG2827 | 8E−44 | 60 | 154176_at |
| 7184 | FBgn0039562 | CG5520 | 0 | 60 | 154182_at |
| 5723 | FBgn0023129 | CG3705 | 4E−56 | 50 | 154184_at |
| 8841 | FBgn0025825 | CG2128 | 1E−177 | 65 | 154196_at |
| 22985 | FBgn0032745 | CG10473 | 1E−70 | 28 | 154197_at |
| 10480 | FBgn0033902 | CG8309 | 1E−94 | 47 | 154198_at |
| 3068 | FBgn0039743 | CG7946 | 3E−16 | 34 | 154202_at |
| 6206 | FBgn0014027 | CG11271 | 2E−43 | 67 | 154203_at |
| 6683 | FBgn0039141 | CG5977 | 1E−135 | 45 | 154205_at |
| 246269 | FBgn0033734 | CG8520 | 4E−95 | 44 | 154207_at |
| 10921 | FBgn0037707 | CG16788 | 3E−56 | 39 | 154209_at |
| 6045 | FBgn0020911 | CG5595 | 1E−66 | 47 | 154217_at |
| 2746 | FBgn0001098 | CG5320 | 0 | 74 | 154218_at |
| 6207 | FBgn0010265 | CG13389 | 2E−74 | 87 | 154219_at |
| 6187 | FBgn0004867 | CG5920 | 1E−118 | 82 | 154228_at |
| 38 | FBgn0029969 | CG10932 | 1E−149 | 65 | 154229_at |
| 9578 | FBgn0023081 | CG4012 | 0 | 40 | 154234_at |
| 51118 | FBgn0030063 | CG1789 | 2E−41 | 39 | 154236_at |
| 9058 | FBgn0036816 | CG3979 | 1E−107 | 37 | 154241_at |
| 3911 | FBgn0002526 | CG10236 | 0 | 32 | 154252_at |
| 5837 | FBgn0004507 | CG7254 | 0 | 73 | 154262_at |
| 1933 | FBgn0028737 | CG6341 | 7E−71 | 58 | 154264_at |
| 53354 | FBgn0011205 | CG5725 | 1E−136 | 64 | 154272_at |
| 558 | FBgn0050122 | CG30122 | 1E−53 | 29 | 154274_at |
| 79568 | FBgn0035088 | CG3776 | 0.000000000002 | 25 | 154280_at |
| 55660 | FBgn0031492 | CG3542 | 1E−177 | 43 | 154288_at |
| 6610 | FBgn0035421 | CG12034 | 3E−46 | 35 | 154300_at |
| 23592 | FBgn0034962 | CG3167 | 2E−25 | 24 | 154305_at |
| 83939 | FBgn0037135 | CG7414 | 1E−113 | 36 | 154306_at |
| 37 | FBgn0034432 | CG7461 | 0 | 57 | 154311_at |
| 9079 | FBgn0013764 | CG3924 | 1E−131 | 65 | 154317_at |
| 3727 | FBgn0001291 | CG2275 | 6E−33 | 31 | 154320_at |
| 11052 | FBgn0035872 | CG7185 | 1E−108 | 45 | 154322_at |
| 4722 | FBgn0035404 | CG12079 | 2E−89 | 64 | 154334_at |
| 8650 | FBgn0002973 | CG3779 | 2E−89 | 54 | 154346_at |
| 23192 | FBgn0031298 | CG4428 | 6E−83 | 46 | 154359_at |
| 51616 | FBgn0000617 | CG6474 | 3E−37 | 46 | 154366_at |
| 9825 | FBgn0041582 | CG4057 | 0.00000000002 | 28 | 154372_at |
| 55122 | FBgn0035773 | CG8580 | 1E−30 | 40 | 154373_at |
| 9352 | FBgn0035631 | CG5495 | 6E−81 | 49 | 154374_at |
| 55756 | FBgn0036570 | CG5222 | 0 | 51 | 154376_at |
| 81556 | FBgn0031314 | CG4785 | 5E−60 | 31 | 154378_at |
| 64786 | FBgn0031233 | CG11490 | 1E−88 | 47 | 154389_at |
| 57102 | FBgn0039589 | CG9986 | 4E−86 | 35 | 154402_at |
| 5496 | FBgn0033021 | CG10417 | 1E−99 | 38 | 154404_at |
| 2582 | FBgn0035147 | CG12030 | 1E−115 | 56 | 154410_at |
| 79882 | FBgn0028471 | CG5720 | 2E−36 | 27 | 154413_at |
| 143187 | FBgn0035156 | CG3279 | 1E−36 | 37 | 154415_at |
| 10130 | FBgn0025678 | CG5809 | 1E−148 | 60 | 154419_at |
| 84858 | FBgn0005771 | CG4491 | 7E−37 | 29 | 154420_at |
| 1456 | FBgn0011253 | CG6963 | 1E−180 | 72 | 154428_at |
| 27255 | FBgn0037240 | CG1084 | 1E−134 | 30 | 154446_at |
| 9343 | FBgn0039566 | CG4849 | 0 | 75 | 154447_at |
| 3276 | FBgn0037834 | CG6554 | 1E−145 | 65 | 154448_at |
| 23223 | FBgn0030504 | CG2691 | 1E−158 | 29 | 154451_at |
| 55207 | FBgn0037551 | CG7891 | 2E−95 | 88 | 154468_at |
| 26249 | FBgn0001301 | CG7210 | 0 | 60 | 154485_at |
| 27341 | FBgn0031764 | CG9107 | 4E−32 | 34 | 154505_at |
| 140890 | FBgn0024285 | CG4602 | 2E−68 | 35 | 154506_at |
| 55176 | FBgn0026571 | CG9539 | 0 | 91 | 154508_at |
| 63935 | FBgn0037021 | CG11399 | 1E−167 | 44 | 154518_at |
| 1496 | FBgn0010215 | CG17947 | 0 | 65 | 154527_at |
| 26355 | FBgn0036887 | CG9231 | 3E−18 | 43 | 154531_at |
| 6182 | FBgn0031450 | CG2903 | 1E−154 | 41 | 154536_at |
| 10159 | FBgn0037671 | CG8444 | 5E−27 | 26 | 154539_at |
| 123169 | FBgn0019637 | CG1433 | 1E−104 | 35 | 154540_at |
| 9963 | FBgn0037807 | CG6293 | 1E−143 | 44 | 154546_at |
| 55210 | FBgn0040237 | CG6815 | 0 | 62 | 154554_at |
| 221079 | FBgn0035866 | CG7197 | 4E−77 | 72 | 154562_at |
| 1021 | FBgn0016131 | CG5072 | 9E−76 | 46 | 154563_at |
| 5875 | FBgn0037293 | CG12007 | 4E−75 | 37 | 154565_at |
| 56954 | FBgn0037687 | CG8132 | 1E−82 | 53 | 154567_at |
| 1120 | FBgn0027842 | CG12891 | 0 | 51 | 154586_at |
| 5007 | FBgn0020626 | CG6708 | 0 | 47 | 154587_at |
| 11189 | FBgn0036379 | CG12478 | 1E−105 | 54 | 154590_at |
| 27352 | FBgn0038304 | CG12241 | 0 | 65 | 154604_at |
| 51635 | FBgn0051937 | CG31937 | 5E−45 | 34 | 154613_at |
| 10808 | FBgn0026418 | CG6603 | 0 | 44 | 154626_at |
| 9372 | FBgn0026369 | CG15667 | 1E−163 | 40 | 154629_at |
| 8500 | FBgn0031852 | CG11199 | 0 | 50 | 154634_at |
| 10651 | FBgn0036920 | CG8004 | 1E−58 | 44 | 154636_at |
| 57679 | FBgn0037116 | CG7158 | 3E−53 | 25 | 154640_at |
| 11321 | FBgn0040346 | CG3704 | 1E−92 | 48 | 154641_at |
| 2033 | FBgn0015624 | CG15319 | 0 | 49 | 154642_at |
| 8694 | FBgn0051991 | CG31991 | 1E−108 | 44 | 154661_at |
| 9931 | FBgn0036451 | CG9425 | 0 | 40 | 154668_at |
| 10652 | FBgn0029978 | CG1515 | 3E−66 | 61 | 154675_at |
| 5529 | FBgn0027492 | CG5643 | 0 | 76 | 154680_at |
| 5066 | FBgn0033466 | CG12130 | 1E−63 | 33 | 154695_at |
| 329 | FBgn0015247 | CG8293 | 1E−69 | 29 | 154697_at |
| 178 | FBgn0034618 | CG9485 | 0 | 46 | 154730_at |
| 8604 | FBgn0028646 | CG2139 | 0 | 58 | 154731_at |
| 25839 | FBgn0032258 | CG7456 | 1E−157 | 38 | 154734_at |
| 10257 | FBgn0051793 | CG31793 | 0 | 45 | 154740_at |
| 10096 | FBgn0011744 | CG7558 | 0 | 80 | 154742_at |
| 9517 | FBgn0002524 | CG4162 | 1E−163 | 56 | 154751_at |
| 51701 | FBgn0011817 | CG7892 | 0 | 76 | 154754_at |
| 25978 | FBgn0035589 | CG4618 | 7E−49 | 52 | 154760_at |
| 5236 | FBgn0003076 | CG5165 | 0 | 59 | 154763_at |
| 84640 | FBgn0033738 | CG8830 | 2E−67 | 27 | 154764_at |
| 3991 | FBgn0034491 | CG11055 | 9E−91 | 37 | 154767_at |
| 84662 | FBgn0033782 | CG3850 | 3E−58 | 58 | 154772_at |
| 51809 | FBgn0030930 | CG6394 | 1E−135 | 46 | 154775_at |
| 64682 | FBgn0030639 | CG9198 | 5E−80 | 27 | 154789_at |
| 80207 | FBgn0039126 | CG13601 | 5E−30 | 47 | 154797_at |
| 9924 | FBgn0033352 | CG8232 | 0 | 41 | 154804_at |
| 4904 | FBgn0022959 | CG5654 | 5E−48 | 39 | 154807_at |
| 8985 | FBgn0036147 | CG6199 | 0 | 46 | 154810_at |
| 2643 | FBgn0003162 | CG9441 | 5E−79 | 75 | 154812_at |
| 81608 | FBgn0037255 | CG1078 | 9E−44 | 24 | 154839_at |
| 26100 | FBgn0035850 | CG7986 | 1E−119 | 61 | 154843_at |
| 79944 | FBgn0032729 | CG10639 | 1E−135 | 55 | 154852_at |
| 51128 | FBgn0038947 | CG7073 | 1E−79 | 70 | 154858_at |
| 667 | FBgn0013733 | CG18076 | 0 | 39 | 154862_at |
| 26575 | FBgn0028743 | CG5036 | 3E−66 | 56 | 154885_at |
| 157807 | FBgn0036289 | CG10657 | 9E−35 | 34 | 154890_at |
| 7283 | FBgn0004176 | CG3157 | 0 | 77 | 154893_at |
| 55023 | CG31132 | CG31132 | 0 | 39 | 154904_at |
| 6426 | FBgn0040284 | CG6987 | 9E−81 | 63 | 154911_at |
| 27291 | FBgn0035388 | CG2162 | 2E−50 | 50 | 154920_at |
| 79796 | FBgn0039293 | CG11851 | 1E−148 | 45 | 154932_at |
| 2874 | FBgn0033122 | CG17002 | 0.000000000000006 | 26 | 154950_at |
| 79183 | FBgn0032783 | CG10237 | 3E−39 | 34 | 154963_at |
| 56259 | FBgn0037644 | CG11964 | 1E−177 | 55 | 154969_at |
| 23154 | FBgn0037447 | CG2330 | 4E−81 | 28 | 154993_at |
| 89845 | FBgn0032018 | CG7806 | 0 | 40 | 155000_at |
| 10210 | FBgn0034410 | CG15104 | 1E−41 | 24 | 155009_at |
| 10013 | FBgn0026428 | CG6170 | 0 | 44 | 155023_at |
| 3998 | FBgn0020254 | CG6822 | 1E−113 | 41 | 155025_at |
| 10598 | FBgn0032961 | CG1416 | 7E−77 | 42 | 155036_at |
| 5573 | FBgn0000275 | CG3263 | 1E−150 | 80 | 155037_at |
| 6804 | CG31136 | CG31136 | 1E−112 | 70 | 155041_at |
| 9615 | FBgn0037219 | CG18143 | 8E−95 | 43 | 155054_at |
| 55633 | FBgn0038855 | CG5745 | 1E−123 | 45 | 155071_at |
| 152559 | FBgn0038256 | CG7530 | 2E−57 | 38 | 155074_at |
| 7163 | FBgn0034345 | CG5174 | 3E−22 | 38 | 155076_at |
| 23597 | FBgn0039854 | CG1635 | 6E−72 | 36 | 155089_at |
| 54931 | FBgn0034351 | CG5190 | 2E−38 | 32 | 155092_at |
| 438 | FBgn0037362 | CG2179 | 1E−100 | 34 | 155114_at |
| 55833 | FBgn0033253 | CG8715 | 6E−38 | 27 | 155119_at |
| 3190 | FBgn0015907 | CG13425 | 3E−40 | 33 | 155123_at |
| 124245 | FBgn0029941 | CG1677 | 2E−43 | 26 | 155128_at |
| 8189 | FBgn0037371 | CG2097 | 0 | 35 | 155136_at |
| 10197 | FBgn0029133 | CG1591 | 3E−68 | 48 | 155140_at |
| 2271 | FBgn0029889 | CG4094 | 0 | 76 | 155145_at |
| 9986 | FBgn0029121 | CG4852 | 2E−37 | 40 | 155164_at |

1. A method to treat, prevent or ameliorate pathological conditions associated with dysregulation of the insulin signaling pathway (ISP) comprising administering to a subject in need thereof an effective amount of a modulator of a protein selected from the group consisting of those disclosed in Table 13 or 25.

2. The method of claim 1, wherein said condition is Type II diabetes.

3. The method of claim 1, wherein said condition is the Type A syndrome of insulin resistance.

4. The method of claim 1, wherein said modulator inhibits the biochemical function of said protein in said subject.

5. The method of claim 4, wherein said modulator comprises one or more antibodies to said protein, or fragments thereof, wherein said antibodies or fragments thereof can inhibit the biochemical function of said protein in said subject.

6. The method of claim 1, wherein said modulator enhances the biochemical function of said protein in said subject.

7. The method of claim 1, wherein said modulator inhibits gene expression of said protein in said subject.

8. The method of claim 7, wherein said modulator comprises any one or more substances selected from the group consisting of antisense oligonucleotides, triple-helix DNA, ribozymes, RNA aptamers, siRNA, single- and double-stranded RNA wherein said substances are designed to inhibit gene expression of said protein.

9. The method of claim 1, wherein said modulator enhances the gene expression of said protein in said subject.

10. A method to treat, prevent or ameliorate pathological conditions associated with dysregulation of the insulin signaling pathway comprising administering to a subject in need thereof a pharmaceutical composition comprising an effective amount of a modulator of a protein selected from the group consisting of those disclosed in Table 13 or 25.

11. The method of claim 10, wherein said condition is Type II diabetes.

12. The method of claim 10, wherein said condition is the Type A syndrome of insulin resistance.

13. The method of claim 10, wherein said modulator inhibits the biochemical function of said protein in said subject.

14. The method of claim 13, wherein said modulator comprises one or more antibodies to said protein, or fragments thereof, wherein said antibodies or fragments thereof can inhibit the biochemical function of said protein.

15. The method of claim 10, wherein said modulator enhances the biochemical function of said protein in said subject

16. The method of claim 10, wherein said modulator inhibits gene expression of said protein in said subject.

17. The method of claim 16, wherein said modulator comprises any one or more substances selected from the group consisting of antisense oligonucleotides, triple-helix DNA, ribozymes, RNA aptamers, siRNA, single- and double-stranded RNA wherein said substances are designed to inhibit gene expression of said protein.

18. The method of claim 10, wherein said modulator enhances gene expression of said protein in said subject.

19. A method to identify modulators useful to treat, prevent or ameliorate pathological conditions associated with dysregulation of the ISP comprising assaying for the ability of a candidate modulator to modulate the biochemical function of a protein selected from the group consisting of those disclosed in Table 13 or 25.

20. The method of claim 19, wherein said method further comprises assaying for the ability of an identified modulator to reverse the pathological effects observed in animal models of said conditions.

21. The method of claim 19, wherein said method further comprises assaying for the ability of an identified modulator to reverse the pathological effects observed in clinical studies with subjects with said conditions.

22. The method according to claim 19, wherein said condition is Type II diabetes.

23. The method according to claim 19, wherein said condition is the Type A syndrome of insulin resistance.

24. A method to identify modulators useful to treat, prevent or ameliorate pathological conditions associated with dysregulation of the ISP comprising assaying for the ability of a candidate modulator to modulate gene expression of a protein selected from the group consisting of those disclosed in Table 13 or 25.

25. The method according to claim 24, wherein said method further comprises assaying for the ability of an identified inhibitory modulator to reverse the pathological effects observed in animal models of said condition.

26. The method according to claim 24, wherein said method further comprises assaying for the ability of an identified inhibitory modulator to reverse the pathological effects observed in clinical studies with subjects with said condition.

27. The method according to claim 24, wherein said condition is Type II diabetes.

28. The method according to claim 24, wherein said condition is the Type A syndrome of insulin resistance.

29. A pharmaceutical composition comprising a modulator to a protein selected from the group consisting of those disclosed in Table 13 or 25 in an amount effective to treat, prevent or ameliorate pathological conditions associated with dysregulation of the ISP in a subject in need thereof.

30. The pharmaceutical composition according to claim 29, wherein said condition is Type II diabetes.

31. The pharmaceutical composition according to claim 29, wherein said condition is the Type A syndrome of insulin resistance.

32. The pharmaceutical composition according to claim 29, wherein said modulator inhibits the biochemical function of said protein.

33. The pharmaceutical composition of claim 29, wherein said modulator comprises one or more antibodies to said protein, or fragments thereof, wherein said antibodies or fragments thereof can inhibit the biochemical function of said protein.

34. The pharmaceutical composition according to claim 29, wherein said modulator enhances the biochemical function of said protein.

35. The pharmaceutical composition according to claim 29, wherein said modulator inhibits gene expression of said protein.

36. The pharmaceutical composition of claim 29, wherein said modulator comprises any one or more substances selected from the group consisting of antisense oligonucleotides, triple helix DNA, ribozymes, RNA aptamer, siRNA, single- and double-stranded RNA wherein said substances are designed to inhibit gene expression of said protein.

37. The pharmaceutical composition according to claim 25, wherein said modulator enhances gene expression of said protein.

38. A method to diagnose subjects suffering from pathological conditions associated with dysregulation of the ISP who may be suitable candidates for treatment with modulators to a protein selected from the group consisting of those disclosed in Table 13, comprising assaying mRNA levels of any one or more of said proteins in a biological sample from said subject wherein subjects with altered levels compared to controls would be suitable candidates for modulator treatment.

39. A method to diagnose subjects suffering from pathological conditions associated with dysregulation of the ISP who may be suitable candidates for treatment with modulators to a protein selected from the group consisting of those disclosed in Table 13, comprising detecting levels of any one or more of said proteins in a biological sample from said subject wherein subjects with altered levels compared to controls would be suitable candidates for modulator treatment.

40. A method to treat, prevent or ameliorate a pathological condition associated with dysregulation of the ISP comprising:
(a) assaying for mRNA levels of a protein selected from the group consisting of those disclosed in Tables 13 and 25 in a subject; and
(b) administering to a subject with altered levels of mRNA of said protein compared to controls a modulator to said protein in an amount sufficient to treat, prevent or ameliorate the pathological effects of said condition.

41. The method of claim 40, wherein said condition is Type II diabetes.

42. The method of claim 40, wherein said condition is the Type A syndrome of insulin resistance.

43. The method of claim 40, wherein said modulator enhances the gene expression of said protein.

44. The method of claim 40, wherein said modulator inhibits the gene expression of said protein.

45. A method to treat, prevent or ameliorate a pathological condition associated with dysregulation of the ISP comprising:
(a) assaying for levels of a protein selected from the group consisting of those disclosed in Table 13 or 25 in a subject; and
(b) administering to a subject with altered levels of said protein compared to controls a modulator to said protein in an amount sufficient to treat, prevent or ameliorate the pathological effects of said condition.

46. The method of claim 45, wherein said condition is Type II diabetes.

47. The method of claim 45, wherein said condition is the Type A syndrome of insulin resistance.

48. The method of claim 45, wherein said modulator enhances the biochemical function of said protein.

49. The method of claim 45, wherein said modulator inhibits the biochemical function of said protein.

50. A diagnostic kit for detecting mRNA levels of a protein selected from the group consisting of those disclosed in Tables 13 and 25 in a biological sample, said kit comprising:
(a) a polynucleotide of a polypeptide set forth in Table 13 or 25 or a fragment thereof;
(b) a nucleotide sequence complementary to that of (a);
(c) a polypeptide of Table 13 or 25 of the present invention encoded by the polynucleotide of (a);
(d) an antibody to the polypeptide of (c); and
(e) an RNAi sequence complementary to that of (a),
wherein components (a), (b), (c), (d) or (e may comprise a substantial component.

51. A diagnostic kit for detecting levels of a protein selected from the group consisting of those disclosed in Table 13 or 25 in a biological sample, said kit comprising:
(a) a polynucleotide of a polypeptide set forth in Table 13 or 25 or a fragment thereof;
(b) a nucleotide sequence complementary to that of (a);
(c) a polypeptide of Table 13 or 25 of the present invention encoded by the polynucleotide of (a);
(d) an antibody to the polypeptide of (c); and
(e) an RNAi sequence complementary to that of (a),
wherein components (a), (b), (c), (d) or (e) may comprise a substantial component.

52. A method to identify genetic modifiers of the insulin signaling pathway, said method comprising:
(a) providing a transgenic fly whose genome comprises a DNA sequence encoding a polypeptide comprising Dp110^{D954A}, said DNA sequence operably linked to a tissue specific control sequence, and expressing said DNA sequence, wherein expression of said DNA sequence results in said fly displaying a transgenic phenotype;
(b) crossing said transgenic fly with a fly containing a mutation in a known or predicted gene; and
(c) screening progeny of said crosses for flies that carry said DNA sequence and said mutation and display modified expression of the transgenic phenotype as compared to controls.

53. The method of claim 52, wherein said DNA sequence encodes Dp110^{D954A} and wherein said tissue specific expression control sequence comprises the eye specific enhancer (ey-Gal4).

54. The method of claim 53, wherein expression of said DNA sequence results in said fly displaying the “small eye” phenotype.

55. A method to identify targets for the development of therapeutics to treat, prevent or ameliorate pathological conditions associated with dysregulation of the ISP said method comprising identifying the human homologs of the genetic modifiers identified according to the method of claim 52.

56. The method of claim 55, wherein said condition is Type II diabetes.

57. The method of claim 55, wherein said condition is the Type A syndrome of insulin resistance.

The application's sequence listing, which the Patent Office published only in electronic form, follows.

SEQUENCE LISTING (1208 sequences)

SEQ ID NO: 1 - DNA, 18 bp, unknown
  primer_bind (1)..(18): Forward primer
tcgttccggtggcattgt

SEQ ID NO: 2 - DNA, 18 bp, unknown
  primer_bind (1)..(18): Forward primer
ctggaggtgcccgcatta

SEQ ID NO: 3 - DNA, 21 bp, unknown
  primer_bind (1)..(21): Forward primer
tcggccaatcacctaccagta

SEQ ID NO: 4 - DNA, 20 bp, unknown
  primer_bind (1)..(20): Forward primer
gacctcatgggctccaacat

SEQ ID NO: 5 - DNA, 28 bp, unknown
  primer_bind (1)..(28): Forward primer
cggagtctttaatcataatatggaaacc

SEQ ID NO: 6 - DNA, 17 bp, unknown
  primer_bind (1)..(17): Forward primer
gccgccgaaccagttgt

SEQ ID NO: 7 - DNA, 19 bp, unknown
  primer_bind (1)..(19): Forward primer
ccacgagtcccagccactt

SEQ ID NO: 8 - DNA, 18 bp, unknown
  primer_bind (1)..(18): Forward primer
ccctgtccggaagccaat

SEQ ID NO: 9 - DNA, 23 bp, unknown
  primer_bind (1)..(23): Forward primer
cattttccccgtttccttctagt

SEQ ID NO: 10 - DNA, 22 bp, unknown
  primer_bind (1)..(22): Forward primer
ctctcgtttcaatcccaatgct

SEQ ID NO: 11 - DNA, 20 bp, unknown
  primer_bind (1)..(20): Forward primer
cgccagggagaactcaacat

SEQ ID NO: 12 - DNA, 21 bp, unknown
  primer_bind (1)..(21): Forward primer
ttagccagagccagtgtgctt

SEQ ID NO: 13 - DNA, 20 bp, unknown
  primer_bind (1)..(20): Forward primer
aggtgtggaccagcgacaat

SEQ ID NO: 14 - DNA, 18 bp, unknown
  primer_bind (1)..(18): Forward primer
caagcggatgccgttgtc

SEQ ID NO: 15 - DNA, 21 bp, unknown
  primer_bind (1)..(21): Forward primer
ttagccagagccagtgtgctt

SEQ ID NO: 16 - DNA, 22 bp, unknown
  primer_bind (1)..(22): Forward primer
ggagcggttcataatccagaca

SEQ ID NO: 17 - DNA, 20 bp, unknown
  primer_bind (1)..(20): Forward primer
acttcgctccgaatcgtgtt

SEQ ID NO: 18 - DNA, 20 bp, unknown
  primer_bind (1)..(20): Forward primer
agccatccagcgtttcaaga

SEQ ID NO: 19 - DNA, 23 bp, unknown
  primer_bind (1)..(23): Forward primer
atctataaggcgctggtggaact

SEQ ID NO: 20 - DNA, 20 bp, unknown
  primer_bind (1)..(20): Forward primer
gcgtttcccatggacctcta

SEQ ID NO: 21 - DNA, 23 bp, unknown
  primer_bind (1)..(23): Forward primer
atgatatccggctttgtggagat

SEQ ID NO: 22 - DNA, 21 bp, unknown
  primer_bind (1)..(21): Forward primer
gttgccactcacttgcttcgt

SEQ ID NO: 23 - DNA, 21 bp, unknown
  primer_bind (1)..(21): Forward primer
gcccaactacgagcagatgaa

SEQ ID NO: 24 - DNA, 22 bp, unknown
  primer_bind (1)..(22): Forward primer
cccttcgcaagtatccagttct

SEQ ID NO: 25 - DNA, 20 bp, unknown
  primer_bind (1)..(20): Forward primer
ctacggccggaaatgtgatt

SEQ ID NO: 26 - DNA, 20 bp, unknown
  primer_bind (1)..(20): Forward primer
ccggagaaatccatccagaa

SEQ ID NO: 27 - DNA, 23 bp, unknown
  primer_bind (1)..(23): Forward primer
gcatatgctcccaattttgatgt

SEQ ID NO: 28 - DNA, 20 bp, unknown
  primer_bind (1)..(20): Forward primer
caggatctggctgacttgca

SEQ ID NO: 29 - DNA, 26 bp, unknown
  primer_bind (1)..(26): Forward primer
gtgtggctaccaatcttcagtatgtc

SEQ ID NO: 30 - DNA, 22 bp, unknown
  primer_bind (1)..(22): Forward primer
tttcatccaacgtggtcacagt

SEQ ID NO: 31 - DNA, 22 bp, unknown
  primer_bind (1)..(22): Forward primer
caacgacatctcgcttattcga

SEQ ID NO: 32 - DNA, 22 bp, unknown
  primer_bind (1)..(22): Forward primer
cagtggtgatggtagcctggta

SEQ ID NO: 33 - DNA, 20 bp, unknown
  primer_bind (1)..(20): Forward primer
ccacgcctatcaacgaagct

SEQ ID NO: 34 - DNA, 19 bp, unknown
  primer_bind (1)..(19): Forward primer
gaaaccacgcgggagatct

SEQ ID NO: 35 - DNA, 22 bp, unknown
  primer_bind (1)..(22): Forward primer
ctctttggcatcttcgtttcaa

SEQ ID NO: 36 - DNA, 23 bp, unknown
  primer_bind (1)..(23): Forward primer
tatgctggcaagaatgtgaagaa

SEQ ID NO: 37 - DNA, 20 bp, unknown
  primer_bind (1)..(20): Forward primer
aggcattgaaaacggttcga

SEQ ID NO: 38 - DNA, 21 bp, unknown
  primer_bind (1)..(21): Forward primer
ctggagcgctacaacaaggaa

SEQ ID NO: 39 - DNA, 23 bp, unknown
  primer_bind (1)..(23): Forward primer
tcgctaacactctgcagtacgaa

SEQ ID NO: 40 - DNA, 22 bp, unknown
  primer_bind (1)..(22): Forward primer
accatgtgctccaccatctctt

SEQ ID NO: 41 - DNA, 18 bp, unknown
  primer_bind (1)..(18): Forward primer
ccgaaccgtccaggaaga

SEQ ID NO: 42 - DNA, 19 bp, unknown
  primer_bind (1)..(19): Forward primer
tctagccaccgcaaacgaa

SEQ ID NO: 43 - DNA, 28 bp, unknown
  primer_bind (1)..(28): Forward primer
tgtactctattacctccaaagtggaact

SEQ ID NO: 44 - DNA, 20 bp, unknown
  primer_bind (1)..(20): Forward primer
ggctccgatgcctctctgta

SEQ ID NO: 45 - DNA, 20 bp, unknown
  primer_bind (1)..(20): Forward primer
acggagagggcgtacgagta

SEQ ID NO: 46 - DNA, 21 bp, unknown
  primer_bind (1)..(21): Forward primer
ctgatccaactgccagaacca

SEQ ID NO: 47 - DNA, 18 bp, unknown
  primer_bind (1)..(18): Forward primer
attccgcccagagcgatt

SEQ ID NO: 48 - DNA, 21 bp, unknown
  primer_bind (1)..(21): Forward primer
catctgcggagcactgtctct

SEQ ID NO: 49 - DNA, 20 bp, unknown
  primer_bind (1)..(20): Forward primer
gtggcggacatggagttctt

SEQ ID NO: 50 - DNA, 20 bp, unknown
  primer_bind (1)..(20): Forward primer
agaagaagcggcatcacgtt

SEQ ID NO: 51 - DNA, 17 bp, unknown
  primer_bind (1)..(17): Reverse primer
gaagacgccgcggatgt

SEQ ID NO: 52 - DNA, 19 bp, unknown
  primer_bind (1)..(19): Reverse primer
aatgattttcgcgctgcaa

SEQ ID NO: 53 - DNA, 17 bp, unknown
  primer_bind (1)..(17): Reverse primer
ccgccgtgccacttgta

SEQ ID NO: 54 - DNA, 22 bp, unknown
  primer_bind (1)..(22): Reverse primer
ccttggacgatctccttgttct

SEQ ID NO: 55 - DNA, 19 bp, unknown
  primer_bind (1)..(19): Reverse primer
gcgcgctcaatggaaacta

SEQ ID NO: 56 - DNA, 21 bp, unknown
  primer_bind (1)..(21): Reverse primer
ccacgactggctgatccttaa

SEQ ID NO: 57 - DNA, 20 bp, unknown
  primer_bind (1)..(20): Reverse primer
gtcgcccacattcgcatatc

SEQ ID NO: 58 - DNA, 19 bp, unknown
  primer_bind (1)..(19): Reverse primer
agggtgtccgcatcgaagt

SEQ ID NO: 59 - DNA, 21 bp, unknown
  primer_bind (1)..(21): Reverse primer
gtttgcgcctcaacttaagca

SEQ ID NO: 60 - DNA, 18 bp, unknown
  primer_bind (1)..(18): Reverse primer
gggcagcctgagcctgtt

SEQ ID NO: 61 - DNA, 25 bp, unknown
  primer_bind (1)..(25): Reverse primer
cccaggttgagaacgattacataga

SEQ ID NO: 62 - DNA, 18 bp, unknown
  primer_bind (1)..(18): Reverse primer
accctggcaggcatcctt

SEQ ID NO: 63 - DNA, 22 bp, unknown
  primer_bind (1)..(22): Reverse primer
ctttccagctcggttctgagtt

SEQ ID NO: 64 - DNA, 20 bp, unknown
  primer_bind (1)..(20): Reverse primer
ttgccccatcctgaaaatgt

SEQ ID NO: 65 - DNA, 18 bp, unknown
  primer_bind (1)..(18): Reverse primer
accctggcaggcatcctt

SEQ ID NO: 66 - DNA, 21 bp, unknown
  primer_bind (1)..(21): Reverse primer
aggcattcttcgtggacacaa

SEQ ID NO: 67 - DNA, 21 bp, unknown
  primer_bind (1)..(21): Reverse primer
gtgctttaaggcatccggttt

SEQ ID NO: 68 - DNA, 17 bp, unknown
  primer_bind (1)..(17): Reverse primer
cgcacacgctccacgtt

SEQ ID NO: 69 - DNA, 22 bp, unknown
  primer_bind (1)..(22): Reverse primer
cgcttcaccacaaacacattct

SEQ ID NO: 70 - DNA, 18 bp, unknown
  primer_bind (1)..(18): Reverse primer
ccggcatgaggcagaact

SEQ ID NO: 71 - DNA, 20 bp, unknown
  primer_bind (1)..(20): Reverse primer
cccaaaacggccagtttctt

SEQ ID NO: 72 - DNA, 19 bp, unknown
  primer_bind (1)..(19): Reverse primer
gaattttggccggcagaat

SEQ ID NO: 73 - DNA, 25 bp, unknown
  primer_bind (1)..(25): Reverse primer
taagcagaccactagctccataggt

SEQ ID NO: 74 - DNA, 21 bp, unknown
  primer_bind (1)..(21): Reverse primer
aacagtggttcccttggcaat

SEQ ID NO: 75 - DNA, 18 bp, unknown
  primer_bind (1)..(18): Reverse primer
cggcctacccgtcctgta

SEQ ID NO: 76 - DNA, 17 bp, unknown
  primer_bind (1)..(17): Reverse primer
cgggcgacagtggaaca

SEQ ID NO: 77 - DNA, 21 bp, unknown
  primer_bind (1)..(21): Reverse primer
ggctcagatcgaatccttgct

SEQ ID NO: 78 - DNA, 22 bp, unknown
  primer_bind (1)..(22): Reverse primer
atgaaaccgctcttgaccagaa

SEQ ID NO: 79 - DNA, 19 bp, unknown
  primer_bind (1)..(19): Reverse primer
gccacgcagagggttgagt

SEQ ID NO: 80 - DNA, 19 bp, unknown
  primer_bind (1)..(19): Reverse primer
ttgcagtggctggttccat

SEQ ID NO: 81 - DNA, 20 bp, unknown
  primer_bind (1)..(20): Reverse primer
tacgtgggaaactggccatt

SEQ ID NO: 82 - DNA, 18 bp, unknown
  primer_bind (1)..(18): Reverse primer
gccagccacgccaagtag

SEQ ID NO: 83 - DNA, 18 bp, unknown
  primer_bind (1)..(18): Reverse primer
ggccaagggcaagtccat

SEQ ID NO: 84 - DNA, 25 bp, unknown
  primer_bind (1)..(25): Reverse primer
aatgtcaagtactcctcctggaaga

SEQ ID NO: 85 - DNA, 24 bp, unknown
  primer_bind (1)..(24): Reverse primer
tttgcctaccacatagttcagctt

SEQ ID NO: 86 - DNA, 18 bp, unknown
  primer_bind (1)..(18): Reverse primer
tggagctcaggcgcttgt

SEQ ID NO: 87 - DNA, 20 bp, unknown
  primer_bind (1)..(20): Reverse primer
tgccacaggcatcaatagca

SEQ ID NO: 88 - DNA, 28 bp, uknown
  primer_bind (1)..(28): Reverse primer
aatattttacagagcctggtgttagaca

SEQ ID NO: 89 - DNA, 21 bp, unknown
  primer_bind (1)..(21): Reverse primer
aacgcagatcacgttgttggt

SEQ ID NO: 90 - DNA, 23 bp, unknown
  primer_bind (1)..(23): Reverse primer
gagatgacccttgaactcatcga

SEQ ID NO: 91 - DNA, 20 bp, unknown
  primer_bind (1)..(20): Reverse primer
aagattccgccagcaacatt

SEQ ID NO: 92 - DNA, 29 bp, unknown
  primer_bind (1)..(29): Reverse primer
cctgtctgcctttgtataaatgaaatatt

SEQ ID NO: 93 - DNA, 20 bp, unknown
  primer_bind (1)..(20): Reverse primer
cggacacgattgctcttcaa

SEQ ID NO: 94 - DNA, 21 bp, unknown
  primer_bind (1)..(21): Reverse primer
taaccgtcaatggaggatcca

SEQ ID NO: 95 - DNA, 20 bp, unknown
  primer_bind (1)..(20): Reverse primer
gaagcccagcttctccatca

SEQ ID NO: 96 - DNA, 17 bp, unknown
  primer_bind (1)..(17): Reverse primer
gccacgctgcccacata

SEQ ID NO: 97 - DNA, 23 bp, unknown
  primer_bind (1)..(23): Reverse primer
acttctggcctatgcagttcctt

SEQ ID NO: 98 - DNA, 21 bp, unknown
  primer_bind (1)..(21): Reverse primer
gaagttctccccatcctcgat

SEQ ID NO: 99 - DNA, 23 bp, unknown
  primer_bind (1)..(23): Reverse primer
tcaattagctccagaatgccaat

SEQ ID NO: 100 - DNA, 21 bp, unknown
  primer_bind (1)..(21): Reverse primer
cacttcctcgcattgcttgtt

SEQ ID NO: 101 - DNA, 6491 bp, human
ccgccccggcgcccaggctcggtgctggagagtcatgcctgtgagccctgggcacctcctgatgtcctgcgaggtcacggtgttcccaaacctcagggttgccctgccccactccagaggctctcaggccccaccccggagccctctgtgcggagccgcctcctcctggccagttccccagtagtcctgaagggagacctgctgtgtggagcctcttctgggacccagccatgagtgtggagctgagcaactgaacctgaaactcttccactgtgagtcaaggaggcttttccgcacatgaaggacgctgagcgggaaggactcctctctgcctgcagttgtagcgagtggaccagcaccaggggctctctagactgcccctcctccatcgccttccctgcctctccaggacagagcagccacgtctgcacacctcgccctctttacactcagttttcagagcacgtttctcctatttcctgcgggttgcagcgcctacttgaacttactcagaccacctacttctctagcagcactgggcgtccctttcagcaagacgatggctgtgctcaggcagctggcgctcctcctctggaagaactacaccctgcagaagcggaaggtcctggtgacggtcctggaactcttcctgccattgctgtttcctgggatcctcatctggctccgcttgaagattcagtcggaaaatgtgcccaacgccaccatctacccgggccagtccatccaggagctgcctctgttcttcaccttccctccgccaggagacacctgggagcttgcctacatcccttctcacagtgacgctgccaagaccgtcactgagacagtgcgcagggcacttgtgatcaacatgcgagtgcgcggctttccctccgagaaggactttgaggactacattaggtacgacaactgctcgtccagcgtgctggccgccgtggtcttcgagcaccccttcaaccacagcaaggagcccctgccgctggcggtgaaatatcacctacggttcagttacacacggagaaattacatgtggacccaaacaggctcctttttcctgaaagagacagaaggctggcacactacttcccttttcccgcttttcccaaacccaggaccaagggaactaacatcccctgatggcggagaacctgggtacatccgggaaggcttcctggccgtgcagcatgctgtggaccgggccatcatggagtaccatgccgatgccgccacacgccagctgttccagagactgacggtgaccatcaagaggttcccgtacccgccgttcatcgcagaccccttcctcgtggccatccagtaccagctgcccctgctgctgctgctcagcttcacctacaccgcgctcaccattgcccgtgctgtcgtgcaggagaaggaaaggaggctgaaggagtacatgcgcatgatggggctcagcagctggctgcactggagtgcctggttcctcttgttcttcctcttcctcctcatcgccgcctccttcatgaccctgctcttctgtgtcaaggtgaagccaaatgtagccgtgctgtcccgcagcgacccctccctggtgctcgccttcctgctgtgcttcgccatctctaccatctccttcagcttcatggtcagcaccttcttcagcaaagccaacatggcagcagccttcggaggcttcctctacttcttcacctacatcccctacttcttcgtggcccctcggtacaactggatgactctgagccagaagctctgctcctgcctcctgtctaatgtcgccatggcaatgggagcccagctcattgggaaatttgaggcgaaaggcatgggcatccagtggcgagacctcctgagtcccgtcaacgtggacgacgacttctgcttcgggcaggtgctggggatgctgctgctggactctgtgctctatggcctggtgacctggtacatggaggccgtcttcccagggcagttcggcgtgcctcagccctggtacttcttcatcatgccctcctattggtgtgggaagccaagggcggttgcagggaaggaggaagaagacagtgaccccgagaaagcactcagaaacgagtactttgaagccgagccagaggacctggtggcggggatcaagatcaagcacctgtccaaggtgttcagggtgggaaataaggacagggcggccgtcagagacctgaacctcaacctgtacgagggacagatcaccgtcctgctgggccacaacggtgccgggaagaccaccaccctctccatgctcacaggtctctttccccccaccagtggacgggcatacatcagcgggtatgaaatttcccaggacatggttcagatccggaagagcctgggcctgtgcccgcagcacgacatcctgtttgacaacttgacagtcgcagagcacctttatttctacgcccagctgaagggcctgtcacgtcagaagtgccctgaagaagtcaagcagatgctgcacatcatcggcctggaggacaagtggaactcacggagccgcttcctgagcgggggcatgaggcgcaagctctccatcggcatcgccctcatcgcaggctccaaggtgctgatactggacgagcccacctcgggcatggacgccatctccaggagggccatctgggatcttcttcagcggcagaaaagtgaccgcaccatcgtgctgaccacccacttcatggacgaggctgacctgctgggagaccgcatcgccatcatggccaagggggagctgcagtgctgcgggtcctcgctgttcctcaagcagaaatacggtgccggctatcacatgacgctggtgaaggagccgcactgcaacccggaagacatctcccagctggtccaccaccacgtgcccaacgccacgctggagagcagcgctggggccgagctgtctttcatccttcccagagagagcacgcacaggtttgaaggtctctttgctaaactggagaagaagcagaaagagctgggcattgccagctttggggcatccatcaccaccatggaggaagtcttccttcgggtcgggaagctggtggacagcagtatggacatccaggccatccagctccctgccctgcagtaccagcacgagaggcgcgccagcgactgggctgtggacagcaacctctgtggggccatggacccctccgacggcattggagccctcatcgaggaggagcgcaccgctgtcaagctcaacactgggctcgccctgcactgccagcaattctgggccatgttcctgaagaaggccgcatacagctggcgcgagtggaaaatggtggcggcacaggtcctggtgcctctgacctgcgtcaccctggccctcctggccatcaactactcctcggagctcttcgacgaccccatgctgaggctgaccttgggcgagtacggcagaaccgtcgtgcccttctcagttcccgggacctcccagctgggtcagcagctgtcagagcatctgaaagacgcactgcaggctgagggacaggagccccgcgaggtgctcggtgacctggaggagttcttgatcttcagggcttctgtggaggggggcggctttaatgagcggtgccttgtggcagcgtccttcagagatgtgggagagcgcacggtcgtcaacgccttgttcaacaaccaggcgtaccactctccagccactgccctggccgtcgtggacaaccttctgttcaagctgctgtgcgggcctcacgcctccattgtggtctccaacttcccccagccccggagcgccctgcaggctgccaaggaccagtttaacgagggccggaagggattcgacattgccctcaacctgctcttcgccatggcattcttggccagcacgttctccatcctggcggtcagcgagagggccgtgcaggccaagcatgtgcagtttgtgagtggagtccacgtggccagtttctggctctctgctctgctgtgggacctcatctccttcctcatccccagtctgctgctgctggtggtgtttaaggccttcgacgtgcgtgccttcacgcgggacggccacatggctgacaccctgctgctgctcctgctctacggctgggccatcatccccctcatgtacctgatgaacttcttcttcttgggggcggccactgcctacacgaggctgaccatcttcaacatcctgtcaggcatcgccaccttcctgatggtcaccatcatgcgcatcccagctgtaaaactggaagaactttccaaaaccctggatcacgtgttcctggtgctgcccaaccactgtctggggatggcagtcagcagtttctacgagaactacgagacgcggaggtactgcacctcctccgaggtcgccgcccactactgcaagaaatataacatccagtaccaggagaacttctatgcctggagcgccccgggggtcggccggtttgtggcctccatggccgcctcagggtgcgcctacctcatcctgctcttcctcatcgagaccaacctgcttcagagactcaggggcatcctctgcgccctccggaggaggcggacactgacagaattatacacccggatgcctgtgcttcctgaggaccaagatgtagcggacgagaggacccgcatcctggcccccagcccggactccctgctccacacacctctgattatcaaggagctctccaaggtgtacgagcagcgggtgcccctcctggccgtggacaggctctccctcgcggtgcagaaaggggagtgcttcggcctgctgggcttcaatggagccgggaagaccacgactttcaaaatgctgaccggggaggagagcctcacttctggggatgcctttgtcgggggtcacagaatcagctctgatgtcggaaaggtgcggcagcggatcggctactgcccgcagtttgatgccttgctggaccacatgacaggccgggagatgctggtcatgtacgctcggctccggggcatccctgagcgccacatcggggcctgcgtggagaacactctgcggggcctgctgctggagccacatgccaacaagctggtcaggacgtacagtggtggtaacaagcggaagctgagcaccggcatcgccctgatcggagagcctgctgtcatcttcctggacgagccgtccactggcatggaccccgtggcccggcgcctgctttgggacaccgtggcacgagcccgagagtctggcaaggccatcatcatcacctcccacagcatggaggagtgtgaggccctgtgcacccggctggccatcatggtgcaggggcagttcaagtgcctgggcagcccccagcacctcaagagcaagttcggcagcggctactccctgcgggccaaggtgcagagtgaagggcaacaggaggcgctggaggagttcaaggccttcgtggacctgacctttccaggcagcgtcctggaagatgagcaccaaggcatggtccattaccacctgccgggccgtgacctcagctgggcgaaggttttcggtattctggagaaagccaaggaaaagtacggcgtggacgactactccgtgagccagatctcgctggaacaggtcttcctgagcttcgcccacctgcagccgcccaccgcagaggaggggcgatgaggggtggcggctgtctcgccatcaggcagggacaggacgggcaagcagggcccatcttacatcctctctctccaagtttatctcatcctttatttttaatcacttttttctatgatggatatgaaaaattcaaggcagtatgcacagaatggacgagtgcagcccagccctcatgcccaggatcagcatgcgcatctccatgtctgcatactctggagttcactttcccagagctggggcaggccgggcagtctgcgggcaagctccggggtctctgggtggagagctgacccaggaagggctgcagctgagctgggggttgaatttctccaggcactccctggagagaggacccagtgacttgtccaagtttacacacgacactaatctcccctggggaggaagcgggaagccagccaggttgaactgtagcgaggcccccaggccgccaggaatggaccatgcagatcactgtcagtggagggaagctgctgactgtgattaggtgctggggtcttagcgtccagcgcagcccgggggcatcctggaggctctgctcccttagggcatggtagtcaccgcgaagccgggcaccgtcccacagcatctcctagaagcagccggcacaggagggaaggtggccaggctcgaagcagtctctgtttccagcactgcaccctcaggaagtcgcccgccccaggacacgcagggaccaccctaagggctgggtggctgtctcaaggacacattgaatacgttgtgaccatccagaaaataaatgctgaggggacacaaaaaaaaaaaaaaaaaaaaaaaa

SEQ ID NO: 102 - DNA, 2404 bp, human
ctcggttcctctttcctcgctcaagatggcgctgctcgcgatgcattcttggcgctgggcggccgcggcggctgctttcgaaaagcgccggcactccgcgattctgatccggcctttagtctctgttagcggctcaggtccgcagtggaggccacatcaactcggcgccttgggaaccgctcgagcctaccagcagattccagagtcattaaaaagtatcacatggcagagattgggaaaaggcaattcaggacagttcttagatgctgcaaaggctctccaggtatggccactgatagaaaagaggacatgttggcatggtcatgcaggaggaggactccacacagacccaaaagaagggttaaaagatgttgatactcggaaaatcataaaagcaatgctttcttatgtgtggcccaaagacaggccagatctacgagctagagttgccatttcgctgggatttttgggtggtgcaaaggccatgaatattgtggttcccttcatgtttaaatatgctgtagacagcctcaaccagatgtcgggaaacatgctgaacctgagtgatgcaccaaatacagttgcaaccatggcaacagcagttctgattggctatggtgtatcaagagctggagctgctttttttaacgaagttcgaaatgcagtatttggcaaggtagcccagaattcaatccgaagaatagccaaaaatgtctttctccatcttcacaacctggatctgggttttcacctgagcagacagacgggagctttatctaaggctattgacagaggaacaaggggtatcagttttgtcctgagtgctttggtatttaatcttcttcccatcatgtttgaagtgatgcttgtcagtggtgttttgtattacaaatgcggtgcccagtttgctttggtaacccttggaacacttggtacatacacagcattcacagttgcagtcacacggtggagaactagatttagaatagaaatgaacaaagcagataatgatgcaggtaatgctgctatagactcactgctgaattatgaaactgtgaagtattttaataatgaaagatatgaagcacagagatatgatggatttttgaagacgtatgagactgcttcattgaaaagtacctctactctggctatgctgaactttggtcaaagtgctattttcagtgtcggtttaacagctataatggtgctcgccagtcagggaattgtggcaggtacccttactgttggagatctagtaatggtgaatggactgctttttcagctttcattacccctgaactttctgggaactgtatatagagagactagacaagcactcatagatatgaacaccttgtttactctactcaaggtagacacccaaattaaagacaaagtgatggcatctccccttcagatcacaccacagacagctaccgtggcctttgataatgtgcattttgaatacattgagggccagaaagtccttagtggaatatcctttgaagtccctgcaggaaagaaagtggccattgtaggaggtagtgggtcagggaaaagcacaatagtgaggctattatttcgcttctatgagcctcaaaagggtagcatttatcttgctggtcaaaatatacaagatgtgagcctggaaagccttcggagggcagtgggagtggtacctcaggatgctgtcctcttccataatactatttattacaacctcttatatggaaacatcagtgcttcacctgaggaagtgtatgcagtggcaaaattagctggacttcatgatgcaattcttcgaatgccacatggatatgacacccaagtaggggaacgaggactcaagctttcaggaggagaaaagcaaagagtagcaattgcaagagccattttgaaggaccccccagtcatactctatgatgaagctacttcatcgttagattcgattactgaagagactattcttggtgccatgaaggatgtggtcaaacacagaacttctattttcattgcacacagattgtcaacagtggttgatgcagatgaaatcattgtcttggatcagggtaaggtagccgaacgtggtacccaccatggtttgcttgctaaccctcatagtatctattcagaaatgtggcatacacagagcagccgtgtgcagaaccatgataaccccaaatgggaagcaaagaaagaaaatatatccaaagaggaggaaagaaagaaactacaagaagaaattgtcaatagtgtgaaaggctgtggaaactgttcgtgctaagtcacataagacattttctttttttgttgttttggactacatatttgcactgaagcagaattgttttattaaaaaaatcatacattcccattttctataaaaaaaaaaaaaaaaaaa

SEQ ID NO: 103 - DNA, 10018 bp, human
ggcccccgccgggtgctgagcgcccgccaccgccctcttggccttttcccggtccccgccgcgcgcctgctgctgtccccgtgcccgaggactgggaggatggggctgagccgcttgcctgacttttgatccgaccagtaatcactttgcccgtgtggcgcgtggcccgttgcctgaggcttcctggcgcgtggggctgtttggtcccctccggagtgcggtgaggcgggccgagccgggactgcctgggtttggggataacgttcccatctccacccctgttgcagcaagggaaattgaggctgagggaactgggcccagggacggcgagccgtggctgcctctccagtccgggccccgaagggctgctcgtggatgaaccagactgattttaaggggtgaagagggtgcgtttcaatcagatgcttctggaacgtcgaaattgtcttctttggaaagaaccatcccctctttgggcttcagaggcccaaattgaggcgcaatgatgagaggatgtggtggtctactctgatgtcaatcttgagggctaggtctttctggaagtggatatctactcagacagtaagaattataagagctgtaagagctcattttggaggaataatggatgaaccatctcccttggcccaacctctggagctgaaccagcactctcgattcataataggttctgtgtctgaagataactcagaggatgagatcagcaacctggtgaagttggacctactggaggagaaggagggctccttgtcacctgcttctgttggctcagatacactctctgatttggggatctctagcctacaggatggcttggccttgcacataaggtccagcatgtctggcttgcacctagtaaagcagggccgagacagaaagaaaatagattctcaacgagatttcactgtggcttctccagcagaatttgttactcgctttgggggaaataaagtgattgagaaggttcttattgctaacaatggcattgcagcagtgaaatgcatgcggtctatccgtaggtggtcttatgaaatgtttcgaaatgaacgtgcaattagattcgttgtcatggtcacacctgaagaccttaaagccaatgcagaatacattaagatggcagatcactatgtgccagtgcctggaggaccaaacaacaacaactatgcaaatgtggaattaattcttgatattgctaaaaggatcccagtacaagcagtgtgggctggctggggtcatgcttctgagaatcccaaactaccggaacttctcttgaaaaatggcattgccttcatgggtcctccaagccaggccatgtgggctttaggggataagattgcatcttccatagtggctcaaactgcaggtatcccaactcttccctggagcggcagtggtcttcgtgtggactggcaggaaaatgatttttcaaaacgtatcttaaatgttccccaggagctatatgaaaaaggttatgtgaaagatgtggatgatgggctacaggcagctgaggaagttggatatccagtaatgatcaaggcctcagagggaggaggagggaagggaattagaaaagtcaacaatgcagatgacttccctaatctcttcagacaggttcaagctgaagttcctggatctcccatatttgtgatgagactagccaaacaatctcgtcatctggaggtgcagatcttagcggaccaatatggcaatgctatctctttgtttggtcgtgattgctctgtacaacgcaggcatcagaagattattgaagaagcacctgctactattgctactccagcagtatttgaacacatggaacagtgtgcggtgaaacttgccaaaatggtgggttatgtgagtgctgggactgtggaatacctgtacagccaggatggcagcttctactttctggaattgaatcctcggctgcaggtagagcacccttgtacagagatggtggctgatgtcaatctccctgcagcacagctccagattgccatggggattcctctatatagaatcaaggatatccgtatgatgtatggggtatctccctggggtgattctcccattgattttgaagattctgcacacgttccttgtccaaggggccatgttattgctgctcggatcactagtgaaaatccagatgagggttttaagcccagctcaggaacagttcaggagctaaatttccgcagcaataagaatgtttggggatatttcagtgttgctgctgcagggggacttcatgaatttgctgattctcagtttggtcactgcttttcttggggagaaaacagagaagaggcaatttcaaacatggtggtggctttgaaggagctgtctattcggggtgactttcgaactacagttgaatacctgatcaaattgttagagactgaaagctttcagatgaacagaattgatactggctggctggacagactgatagcagaaaaagtacaggctgagcgacctgacaccatgttgggggttgtgtgtggtgccctccacgtggcagatgtgagcctgcggaatagcgtctctaacttccttcactccttagaaaggggtcaagtccttcctgctcatacacttctgaatacagtagatgttgaacttatctatgagggagtcaagtatgtacttaaggtgactcgacagtcccccaactcctatgtggtgatcatgaatggctcatgtgtagaagtagatgtacatcggctgagtgacggtggactgctcttgtcctatgatggcagcagttatactacgtatatgaaagaggaagtggatagatatcgcatcacaattggcaataaaacctgtgtgtttgagaaggaaaatgacccatcggtgatgcgctcaccttctgctgggaagttaatccagtacattgtagaagatggaggtcatgtgtttgccggccagtgctatgctgagattgaggtaatgaagatggtaatgaccttaacagctgtggagtctggctgtatccattacgtcaagcgacctggagcagctcttgaccctggctgtgtactagccaaaatgcaactggacaaccccagcaaggttcagcaggctgaacttcacacaggtagtctgccacggatccagagcacggcactcagaggcgagaaactccatcgagtgttccattatgtcctggataatctggtcaatgtaatgaatggatactgccttccagatcctttctttagcagcaaggtaaaagactgggtagagcgattgatgaaaaccctcagagatccctccctgcctctcctagaattgcaagatattatgaccagtgtgtctggccgcattccccccaatgtggagaagtctatcaagaaggaaatggctcagtatgctagcaacatcacatcagtcctctgtcagtttcccagccagcagattgcaaacatcctagatagccatgcagctacattgaaccggaaatctgaacgggaagtcttctttatgaatactcagagcattgttcagctggtacagaggtaccgaagtggcatccgaggccacatgaaggctgtggtgatggatctgctccggcagtacctgcgagtagagacacaattccagaatggtcactatgacaaatgtgtattcgccctccgagaagagaataaaagtgacatgaacactgtactgaactacatcttctctcacgctcaagtcaccaagaagaatcttctggtcacaatgcttattgatcagttgtgtggccgggaccctactctcactgatgagctgctgaatattctcacagagctaactcaactcagtaagaccaccaatgccaaagtagcacttcgagcacgccaggttcttattgcctcccatttgccatcatatgagcttcgccataaccaagtagagtctatcttcctatcagctattgacatgtatggacatcaattttgcattgagaacctgcagaaactcatcctatcagaaacatctatttttgatgtcctaccaaacttcttctatcacagcaaccaagtagtgaggatggcagctctggaggtgtatgttcgaagggcttatattgcctatgaacttaacagcgtacaacaccgccagcttaaggacaacacctgtgtggtggaattccagttcatgctgcccacatctcatccaaacagagggaacatccctacgctaaacagaatgtccttctcctccaacctcaaccactatggcatgacccatgtagctagtgtcagcgatgtactgttggacaactcattcactccaccttgtcagcggatgggcggaatggtctcttttcggacttttgaagattttgtcaggatctttgatgaagtgatgggctgcttctctgactccccaccccagagtcccacattccctgaggcaggtcacacgtctctttatgatgaggataaggttcccagggatgaaccaattcacattctcaatgtggctatcaagactgactgtgatattgaggatgacaggctggcagctatgttcagagaatttacccagcaaaataaagctaccctggttgaccatgggatccggcgccttactttcctggttgcacaaaaggatttcagaaagcaggtcaactatgaggtggatcggagatttcatagagaattccctaaattttttacattccgagcaagggataagtttgaggaggatcgtatctatcgtcatctggagcctgctctggctttccagttagagctgaaccggatgagaaattttgacctcactgccattccatgtgctaatcacaagatgcacctgtatctcggggcagccaaggtggaagtgggcacagaagtgacagactacaggttctttgttcgtgcaatcatcaggcattctgatctggtcaccaaggaagcttcttttgaatatctgcaaaatgaaggggagcggctactcctggaagccatggatgagttggaagttgcttttaacaatacaaatgtccgcactgactgtaaccacatcttcctcaactttgtgcccacggttatcatggacccatcaaagattgaggaatccgtgcggagcatggtaatgcggtatggaagtcgcctgtggaaattgcgcgtcctccaggcagaactgaaaatcaacattcgcctgacgccaactggaaaagcaattcccatccgcctcttcctgacaaacgagtctggctattacttggatatcagcctatacaaggaagtgactgactccaggacagcacagatcatgtttcaggcatatggagacaaacagggaccactgcatggaatgttaatcaatactccatatgtgaccaaagacctgctgcaatcaaagaggttccaggcacaatccttagggacaacatacatatatgatatcccagagatgtttcggcagtccctgatcaaactctgggagtctatgtccactcaagcatttcttccatctccccctctgccttctgacatgctgacttacactgaactggtactggatgatcaaggtcagctggtccacatgaacaggcttccaggaggaaatgagattggcatggtagcttggaaaatgacctttaaaagtcctgaatatccagaaggccgagatatcattgttattggcaatgacatcacataccgaattgggtcctttgggcctcaagaggatttgttatttctcagagcttccgaacttgctagggcagaaggtattccacgcatctatgtatcagccaacagtggagcaagaatcggactggcagaagaaattcgccatatgtttcatgtggcctgggtagatcctgaggatccttacaagggatacaggtatttatatctgactcctcaagattataagagagtcagtgctctcaactctgtccattgtgaacacgtggaagatgaaggagaatccaggtacaagataacagatattattgggaaagaagagggaattggacccgagaaccttcgaggttctggaatgattgctggagaatcctcattggcctataatgagatcattaccatcagcctggtgacgtgccgggccattgggattggggcttaccttgtccggctgggacagagaaccatccaggttgagaattctcacttaattctaacaggagctggagccctcaacaaagtcctcgggcgggaagtgtacacctccaataaccagctggggggcatccagattatgcacaacaatggggtgacccactgcactgtgtgtgatgactttgaaggggttttcactgtcctgcactggctgtcttacatgcccaagagcgtgcacagttcagttcctcttctgaactcaaaggatcctatagacagaatcatcgagtttgttcccacaaagaccccatacgatcctcgatggatgctagcaggccgtcctcacccaacccaaaaaggtcagtggttgagtggcttttttgactatggatctttctcagagattatgcagccctgggcacagactgtggtggttggtagagccaggctaggaggaatacctgtgggagttgttgctgtagaaacccgaacagtagaactaagtatcccagctgatccagcaaacctggattctgaagccaagataatccagcaggctggccaggtttggttcccagattctgcgtttaagacgtatcaggccatcaaggacttcaaccgggaagggctgcctctgatggtctttgccaactggagaggcttctctggtggaatgaaagatatgtacgaccaagtgctgaagtttggtgcttacattgtggatggcttgagggagtgctgccagcctgtgctggtttacattcctccccaggctgagctgcggggtggctcctgggtggtgattgactcctccatcaacccccggcacatggagatgtatgctgaccgagaaagcaggggatctgttctggagccagaagggacagtagaaatcaaattccgcagaaaggatctggtgaaaaccatgcgtcgggtggacccagtctacatccacttggctgagcgattggggaccccagagctaagcacagctgagcggaaggagttggagaacaagttgaaggagcgggaggaattcctaattcccatttaccatcaggtagccgtgcagtttgctgacttgcacgacacaccaggccggatgcaggagaagggtgttattagcgatatcctggattggaaaacatcccgtaccttcttctactggcggctgaggcgtcttctgctggaggacctggtcaagaagaaaatccacaatgccaaccctgagctgactgatggccagattcaagccatgttaaggcgctggtttgtggaagtggaaggaacagtgaaggcttatgtttgggacaataataaggatctggcggagtggctagagaaacagctgacagaggaggatggtgttcactcggtaatagaggaaaacatcaaatgcatcagcagagactacgtcctcaagcaaatccgcagcttggtccaggccaatccagaggttgccatggattccatcatccatatgacgcagcacatatcacccactcagcgagcagaagtcatacggatcctctccacaatggattccccttccacgtaggaagagcttcctgcctgtccctgccctgtctctggagaaaagggctagagctgccttttacaactgtaaccactgtaatgagaaggcacaggagacccagcactggagtcaaatggcattttacttcctctcgtttcaggttatgcatgacatcctgggatgtaagatcacagaatccccctccagcccaccagtcacacctaccccattcagtatttattaccctggccaggcctagtcctccactccctgcacaggactgagaaggcaatgaaaggtacaaacatgtaccatgaggtcttactaaccaaagtagggctgcccctcctgtcctgacagccccttggcctcccagcatggggaagcgtgaggagttgcccagcagtgagcagcccccctcactcctggccccatgagccgcagccacaggcagcagaggagggctaaggagaggaggaagcctcaagtccattgtttattaccccgactcttagcccagcacacagtaggcactggagaggaatgattcccagtttaaccacactacggtaccttttatgaagaaaaattagagcataaaatctactacaagctccataggaactcaaagatgagggcaaaactgtgagccaagaagcagagaaagaaaatagaaccagttattcttgatttaggggacctcaaccttgggttcagtctctgaggacaaagggaaaggtagttgttggcctgcctctcgcctgcacgtcactgctggactagctgtcgcatgtggctgggagctgcaaggccagtgcttgaggggccccagcagttccacaggtggtgaagcctgagttggcagaggaggagccagaagagaactgccctttctgcactggtggaaactagttatttatgccatgtggagagccagtgagatagatagatagtctgtttgttttgaggacttggaaagttgttcctatgaagcctggagcttggatggttttgagaggttaatggtgcctccacactcactcttccctagttccaggattactgtcctagcagctaacggttctactctcttccccagagtgtagacaggcagcaggtctccccacagctctgaaaggaccctggtgacagctacaccctcagcaccaggagctggccttcctgatgagggaggcttccaggaaacacagaatccacatgaccttaagattatttacaactcagtcatggtgctgctgtcctccaggcttactggcccctcctgactggcatcaggggcttcctcaggtggtggagagagtttactttcaacaactagtttattcaagaaaagaacttactgattcctctgttcctaaagcaagagtggcaggtgatcagggctggtgtagcatccggttcctttagtgcagctaactgcatttgtcactgatgaccaaggaggaaatcactaagacatttgagaagcagtggtatgaacgttcttggacaagccacagttctgagccttaaccctgtagtttgcacacaagaacgagctccacctccccttcttcaggaggaatctgtgcggatagattggctggacttttcaatggttctgggttgcaggtgggcactgtatggctgggtatggagcggacagcccccaggagtcagagcctcagcccggctgccctggtggaaggtacaggtgttcagcaccttcagaaaagggcataaagtggtgggggacaattctcagtccaggaaaatgcattgaccattgctggctatttgcttacctagtaagaattggattcatttttgaccagattattcttctatgcttttttgcaataaatcaaatcccacatatctacaagtggtatgaagtcctgcaccccccaggaggcctgtccaggcatgtcttcagaggcagggtgggttacactcatttacctcccctctccccaccaaattatgacacaaacgagtatgtttcctctctagaaccctgtaatgcctcctcccccatccccagagctccttactgtaggtcttaccctggacaaggattttttcaagttggaggcacagaacatgagcaatctgacattcccacagcccctcaaacatgcaaggctactaaggcaggaggagtataaatgatggatattgaccaagacctgcttggacggagaccgccatattatctgttctcttcgttcacaaaacagccttcacttgtctcagaatttgatggacacatactgtgatgagcaggagcttcagatgcactctttacacattttgttgaaataaacctctacatttgtagaagaaaaaaaaaaaaaaaaaaaaaaaaaaaaaa

SEQ ID NO: 104 - DNA, 1829 bp, human
gggattcgggcctgggactgtgtctgtcgcccatggccgccgcgctgctcgcccgggcctcgggccctgcccgcagagctctctgtcctagggcctggcggcagttacacaccatctaccagtctgtggaactgcccgagacacaccagatgttgctccagacatgccgggactttgccgagaaggagttgtttcccattgcagcccaggtggataaggaacatctcttcccagcggctcaggtgaagaagatgggcgggcttgggcttctggccatggacgtgcccgaggagcttggcggtgctggcctcgattacctggcctacgccatcgccatggaggagatcagccgtggctgcgcctccaccggagtcatcatgagtgtcaacaactctctctacctggggcccatcttgaagtttggctccaaggagcagaagcaggcgtgggtcacgcctttcaccagtggtgacaaaattggctgctttgccctcagcgaaccagggaacggcagtgatgcaggagctgcgtccaccaccgcccgggccgagggcgactcatgggttctgaatggaaccaaagcctggatcaccaatgcctgggaggcttcggctgccgtggtctttgccagcacggacagagccctgcaaaacaagggcatcagtgccttcctggtccccatgccaacgcctgggctcacgttggggaagaaagaagacaagctgggcatccggggctcatccacggccaacctcatctttgaggactgtcgcatccccaaggacagcatcctgggggagccagggatgggcttcaagatagccatgcaaaccctggacatgggccgcatcggcatcgcctcccaggccctgggcattgcccagaccgccctcgattgtgctgtgaactacgctgagaatcgcatggccttcggggcgcccctcaccaagctccaggtcatccagttcaagttggcagacatggccctggccctggagagtgcccggctgctgacctggcgcgctgccatgctgaaggataacaagaagcctttcatcaaggaggcagccatggccaagctggccgcctcggaggccgcgaccgccatcagccaccaggccatccagatcctgggcggcatgggctacgtgacagagatgccggcagagcggcactaccgcgacgcccgcatcactgagatctacgagggcaccagcgaaatccagcggctggtgatcgccgggcatctgctcaggagctaccggagctgagcccgcggcggactgccccaggactgcgggaaggcgcgggagccaggggcctccaccccaaccccggctcagagactgggcggcccggcgggggctccctggggaccccagatgggctcagtgctgccacccagatcagatcacatgggaatgaggccctccgaccattggcagctccgcctctgggcctttccgcctcctcaccactgtgcctcaagttcctcatctaagtggccctggctcctgggggcggggttgtgggggggctgagcgacactcagggacacctcagttgtcctcccgcgggccctggtgccctggcatgaaggcccagtgcgacaggcccttggtggggtctgtcttttccttgaggtcagaggtcaggagcagggctggggtcaggatgacgaggcctggggtcctggtgttgggcaggtggtggggctgggccatggagctggcccagaggcccctcagccctttgtaaagtctgatgaaggcaggggtggtgattcatgctgtgtgactgactgtgggtaataaacacacctgtccccc

SEQ ID NO: 105 - DNA, 5871 bp, human
cctgcggcgaggatggagggcctggcagtgcggttgctgcgcggcagcaggctgctaagaagaaatttcctgacttgtttgtcttcttggaagattcctcctcatgtctcaaaatcttcccagtcagaagctctactcaatataacaaataatggaatacactttgctcccctgcaaacatttacagatgaggaaatgatgataaagagttcagttaaaaaatttgctcaggaacaaattgcacctttggtttcaaccatggatgaaaattcgaaaatggagaaatcagtaatacaaggattatttcaacaagggttgatgggtattgaagttgacccagaatatggaggcacaggagcttcatttttatccactgtgctcgtgatagaggaattagccaaagttgatgcatctgtggctgtcttttgtgagatccagaacacattaattaacacactgattagaaaacatggaacagaagaacaaaaggccacctatttgcctcagctcactacagaaaaagtaggaagtttctgcctttcagaggctggagcaggtagtgactcatttgctttgaagaccagagctgataaagagggagattattatgtcctcaatggatcaaagatgtggatcagcagtgctgagcacgcagggctctttctggtgatggcaaatgtagaccctaccattggatataagggaattacctccttcttagtagatcgtgatactccgggccttcatatagggaaacctgaaaacaaattggggctcagagcttcttccacctgcccgttaacattcgaaaatgtcaaggttccagaagccaatatcttgggacaaattggacatggctataagtatgccatagggagtctcaatgaaggtagaataggaattgctgcacagatgctgggactggcgcaaggatgttttgactacactattccatatattaaagaaaggatacaatttggcaaaagactatttgattttcagggcctccaacaccaagtggctcacgtggccacccagctggaagctgcaagattactaacatacaatgctgctaggcttttagaagctggaaagccattcataaaagaagcgtcaatggccaaatactatgcatcagagattgcaggacaaacaacgagtaaatgtatcgagtggatggggggagtaggctacaccaaagattaccctgtggagaaatacttccgagatgcaaagattggtacgatatatgaaggagcttccaacatccagttgaacaccattgcaaagcatatcgatgcagaatactgacgtctataggagtgggacccctccctggtgtcactgctgtaaaattttaaacggttgtgtcttgttgggagtaagtgccttgcgtgggaataaacttccacagcattcgaatattttaatgaagcccttagtcagggtcctggtgttggcctttttggttttctcttttcaggctgtttaacttaggcacaggagatccacttttaaacttgggaaataagcacctgtatttttttccaaaactgtttttaaagctgtatacgcatacatatatatatttttactctgtcttactctgtcacccaggctagagtgcagtggcgcgatctcagctcactgcagccttgacctcctgggttccagtgattctcatgcctcatcctcccaagtagctggaactacaggtgtgcaccaccatgcctggttcatttttgtgtttttagtagagatggggttttaccatattgcccaggctggtcttctggcttctggatatcgcccaccttggcctcccaaagtgctgggattacagggatgagccaccgtgcctggctgggtatttatattatcattctagtttcagagtatacagaagtttcatcccatcatttggaaaaataaaggcatctgaagtacaatattacttatagaaatagtttatattcctattaaatcttaatcttgtggcatcagggaaatatttgttacatagtaggcaatttttatccagtactttatagattcaactctaagttgcaagcgaagtcaaaactgatgaaaatttatttagaaaaatctaaaaattctggttttaaatatgagaatcagtggaaaataagggtataattttgtaggtcatatgattgaagaaaatattattttaacaatgtaaagcaatatgatttgttactataattaacctgtataaaagatacattttatggtggtttcagtaggtcattttaaaaaccaatgtgcattagttttcaagtataaggtttaagtaatttggtttaataatcagaaaatattcaatacagtgttggatattctgtcatgcactatttttcagttgacaatttctgtattttaattgaatactgtttcttcagtcatggttattgcactttatcctgaataataattcagaaattgggttttggttcagtgattctcaagaaaaagatctcttgcccattaagaagtgtatcaaaatctcataaggaatgagggagagaagggggctgtagagtttgaaaaagcatattcaatattaaaatagttttatatttgggaaggcaaaaatgaatctattgttttgcaatataggttataaacaggcaaaatgcaataaaatatatatctggttgtattagtctgttttcacgctgctgataaagacatacctgagaccaggaagaaaaagaggtttaattggacttacagttccacatgactggggaggcctcagaatcatggtgggaggcaaaaagcacttcttacatggcggcagcaagagaaaatgagaaagaagcaaaagtggaaacccctaataaacctatcagatcttgtgagacttactatcacgagaatagcacaggaaagactggcccccatgattcaattacctcccccgggtccctcccacaacacatgggaattctgagagataccatttaagttgagatttcagtggggacacagccaaaccatatcattctacccctggcacctccaaatctcatgtcctcacatttcaaaaccaatcatgccttcccaacagtcccccaaagtcttaactcatttcagcattaacccaaaagtccgcagtccaaagtttcatctgagacaaggcaagtcccttccacttatgaacctgtaaaatcaaaagtaaactagttacttcctagatacaatgggggtacaggtattgggtaaatacagccattccaaatgggagaaattggccaacacaaaagggtaacagggcccatgcaagtccaaaattcagcagggcagtcaaattttaaacctccaaaatgatcacctttgactccacgtctcacaatcatctctctcaagttcgaagttccacaaatctctaaggcaagggaaagatgctgccagtctctttgctaaaacacagcaagagtcacctttactccagttcccaaaaagtttttcatctccatctgagaccacctcagcctgaattttattgtcaatattgctatcagcattttgggcaaagccattcagcaagtatctaggaagttccaaactttcccacattttcctgtcttcttctgagcccttcaaactgttccaacctctgcctgttacccagttccaaacttgctttcatatttttggctatcttttcagcaatgccccactctactgttagcagtttactgtattagtctgttttcacactgctgataaagacattcctcaagattgtgaagaaaaagaggtttaattggactgacagttccacatggccggggaggcctcagaatcatggcgggaggtgaaaagcacttcgtacatggtggtggcaagagaaaatgaagaagaagcaaaagtggaaacccctgataaacccatcagatctcatgagacttactatcatgagaatagcacaggaaagactggcccccctgattcgatgacctccccctgggtccctcccacaacatgtgggaattccagaagataaattcaagttgcaatttcagtggggacatagccaaaccatatcactggtgatgccacttcttcagtattagggattctcagtcagaagagaccccctgtgtggcctgagtcccctcaggaggaaggtggacaacagagaaatgagagttttgatattttctgaaagaggaacatgtgttagagatgaagaatcttccaaggctcatgcagttgcttagaataatcattactgttatatgagaaacattttagtaatttaataaaaggataatgtttatttaaaaaacctgacttttccagagtaattttgttttgcacattcatgtttattgaagtggactaatttctataatgcaaatcagagttaaatattaaaaattgtgtaaatacaattgacataggaattacattaaaatattaggaagaaacaaggacaaatttagaccttgaatccgaagagataaagcttacttgactttcaaatggagagatgatgaaaacccactcattcactctttcagaacaaaaagacagtcatctgataagagtatgacatggatgaaatgccctacaggggccttggacatctttaatttctgcgattatgtgaaagaggtggactttacagataatggagcagaagccaacattagtaaaaggaatcccaacttcttcccatagaattagaaacatgtgaaagtacaataaacttcttgttcaaattaccagcatcagagagcttcccatttgcatctagaccttgaatttatatttattgatcaagttctaatttgtatgtatattttgtgcatattcaccaataacagttaaaattaattatgtgttatagttaatatatgcacctaccttcttccgttagtgcatcagtaaatgtgttattttgtcatttttccaaagagagtgttgtaggttttccctgtagttcttcctttatagcttttcttctgataaccatgacttcaggagctttaaaactatctatcttgcatttgtgtctggcggagaactagccatcagcctcctgaagcctgccatcattgttaatttgaggactgggctgtcttggggctcagaaggtaaagaactatttgagcagatgtgtgtgggtggcactggattccacccaactgccaagttagtattgttagagatttcattttacaacacaaaaataagcctgtgtcaaagattttaaaatcatggaaagttaaaatctagaaagaccttagagaaccagccaaccaactctctcattttaaaagtgaaggattcatagcacagattacttgcctaagatcatccaggaacgaagacaagaatccaaatgtacttggggacaagaattagtccccaaattcagtgttcttcctagtattaaacattgcccctttcgacaaattttggatttcattcttgttatatttcagtactcttgctgatttattttaggtttaactggtaaagaatgaacatttcagaagtgttaggattagtcagtgtcatcgcttatgtatatgaatcacttgccaaagacactggctctcctcagctgtaaccagcatgtcaaatgtgaagattattgtgtgggatcctttggtttcattgttatgatgtattttataaatgtactagttatatccttgtttatgtatttttgctgatctttcataaagcagaatggtatgtatcggattgttttaatgttatatattggattgtattcgatgttacaaaaccaatattctatggagaatgaaaaaaataaaggactaaattaactggaaaaaaaaaaaaaaaaaaaaaaaaaaaaaaaaaaaa

SEQ ID NO: 106 - DNA, 2219 bp, human
aggacgtgggcgtgcaggacgcgggcgtgcaggacgccagagctgggtcagagctcgagccagcggcgcccggagagattcggagatgcaggcggctcggatggccgcgagcttggggcggcagctgctgaggctcgggggcggaagctcgcggctcacggcgctcctggggcagccccggcccggccctgcccggcggccctatgccgggggtgccgctcagctggctctggacaagtcagattcccacccctctgacgctctgaccaggaaaaaaccggccaaggcggaatctaagtcctttgctgtgggaatgttcaaaggccagctcaccacagatcaggtgttcccatacccgtccgtgctcaacgaagagcagacacagtttcttaaagagctggtggagcctgtgtcccgtttcttcgaggaagtgaacgatcccgccaagaatgacgctctggagatggtggaggagaccacttggcagggcctcaaggagctgggggcctttggtctgcaagtgcccagtgagctgggtggtgtgggcctttgcaacacccagtacgcccgtttggtggagatcgtgggcatgcatgaccttggcgtgggcattaccctgggggcccatcagagcatcggtttcaaaggcatcctgctctttggcacaaaggcccagaaagaaaaatacctccccaagctggcatctggggagactgtggccgctttctgtctaaccgagccctcaagcgggtcagatgcagcctccatccgaacctctgctgtgcccagcccctgtggaaaatactataccctcaatggaagcaagctttggatcagtaatgggggcctagcagacatcttcacggtctttgccaagacaccagttacagatccagccacaggagccgtgaaggagaagatcacagcttttgtggtggagaggggcttcgggggcattacccatgggccccctgagaagaagatgggcatcaaggcttcaaacacagcagaggtgttctttgatggagtacgggtgccatcggagaacgtgctgggtgaggttgggagtggcttcaaggttgccatgcacatcctcaacaatggaaggtttggcatggctgcggccctggcaggtaccatgagaggcatcattgctaaggcggtagatcatgccactaatcgtacccagtttggggagaaaattcacaactttgggctgatccaggagaagctggcacggatggttatgctgcagtatgtaactgagtccatggcttacatggtgagtgctaacatggaccagggagccacggacttccagatagaggccgccatcagcaaaatctttggctcggaggcagcctggaaggtgacagatgaatgcatccaaatcatggggggtatgggcttcatgaaggaacctggagtagagcgtgtgctccgagatcttcgcatcttccggatctttgaggggacaaatgacattcttcggctgtttgtggctctgcagggctgtatggacaaaggaaaggagctctctgggcttggcagtgctctaaagaatccctttgggaatgctggcctcctgctaggagaggcaggcaaacagctgaggcggcgggcagggctgggcagcggcctgagtctcagcggacttgtccacccggagttgagtcggagtggcgagctggcagtacgggctctggagcagtttgccactgtggtggaggccaagctgataaaacacaagaaggggattgtcaatgaacagtttctgctgcagcggctggcagacggggccatcgacctctatgccatggtggtggttctctcgagggcctcaagatccctgagtgagggccaccccacggcccagcatgagaaaatgctctgtgacacctggtgtatcgaggctgcagctcggatccgagagggcatggccgccctgcagtctgacccctggcagcaagagctctaccgcaacttcaaaagcatctccaaggccttggtggagcggggtggtgtggtcaccagcaacccacttggcttctgaatactcccggccagggcctgtcccagttatgtgccttccctcaagccaaagccgaagcccctttccttaaggccctggtttgtcccgaaggggcctagtgttcccagcactgtgcctgctctcaagagcacttactgcctcgcaaataataaaaatttctagccag

SEQ ID NO: 107 - DNA, 1518 bp, human
ggccgctaggggtgcggggttggggaggaggccgctagtctacgcctgtggagccgatactcagccctctgcgaccatggctgtgctggcggcacttctgcgcagcggcgcccgcagccgcagccccctgctccggaggctggtgcaggaaataagatatgtggaacggagttatgtatcaaaacccactttgaaggaagtggtcatagtaagtgctacaagaacacccattggatcttttttaggcagcctttccttgctgccagccactaagcttggttccattgcaattcagggagccattgaaaaggcagggattccaaaagaagaagtgaaagaagcatacatgggtaatgttctacaaggaggtgaaggacaagctcctacaaggcaggcagtattgggtgcaggcttacctatttctactccatgtaccaccataaacaaagtttgtgcttcaggaatgaaagccatcatgatggcctctcaaagtcttatgtgtggacatcaggatgtgatggtggcaggtgggatggagagcatgtccaatgttccatatgtaatgaacagaggatcaacaccatatggtggggtaaagcttgaagatttgattgtaaaagacgggctaactgatgtctacaataaaattcatatgggcagctgtgctgagaatacagcaaagaagctgaatattgcacgaaatgaacaggacgcttatgctattaattcttataccagaagtaaagcagcatgggaagctgggaaatttggaaatgaagttattcctgtcacagttacagtaaaaggtcaaccagatgtagtggtgaaagaagatgaagaatataaacgtgttgattttagcaaagttccaaagctgaagacagttttccagaaagaaaatggcacagtaacagctgccaatgccagtacactgaatgatggagcagctgctctggttctcatgacggcagatgcagcgaagaggctcaatgttacaccactggcaagaatagtagcatttgctgacgctgctgtagaacctattgattttccaattgctcctgtatatgctgcatctatggttcttaaagatgtgggattgaaaaaagaagatattgcaatgtgggaagtaaatgaagcctttagtctggttgtactagcaaacattaaaatgttggagattgatccccaaaaagtgaatatcaatggaggagctgtttctctgggacatccaattgggatgtctggagccaggattgttggtcatttgactcatgccttgaagcaaggagaatacggtcttgccagtatttgcaatggaggaggaggtgcttctgccatgctaattcagaagctgtagacaacctctgctatttaaggagacaaccctatgtgaccagaaggcctgctgtaatcagtgtgactactgtgggtcagcttatattcagataagctgtttcattttttattattttctatgttaacttttaaaaatcaaaatgatgaaatcccaaaaca

SEQ ID NO: 108 - DNA, 2909 bp, human
cagcctgcgccggggaacatcggccgcctccagctcccggcgcggcccggcccggcccggctcggccgcctcagacgccgcctgccctgcagccatgaggcccccgcagtgtctgctgcacacgccttccctggcttccccactccttctcctcctcctctggctcctgggtggaggagtgggggctgagggccgggaggatgcagagctgctggtgacggtgcgtgggggccggctgcggggcattcgcctgaagacccccgggggccctgtctctgctttcctgggcatcccctttgcggagccacccatgggaccccgtcgctttctgccaccggagcccaagcagccttggtcaggggtggtagacgctacaaccttccagagtgtctgctaccaatatgtggacaccctatacccaggttttgagggcaccgagatgtggaaccccaaccgtgagctgagcgaggactgcctgtacctcaacgtgtggacaccatacccccggcctacatcccccacccctgtcctcgtctggatctatgggggtggcttctacagtggggcctcctccttggacgtgtacgatggccgcttcttggtacaggccgagaggactgtgctggtgtccatgaactaccgggtgggagcctttggcttcctggccctgccggggagccgagaggccccgggcaatgtgggtctcctggatcagaggctggccctgcagtgggtgcaggagaacgtggcagccttcgggggtgacccgacatcagtgacgctgtttggggagagcgcgggagccgcctcggtgggcatgcacctgctgtccccgcccagccggggcctgttccacagggccgtgctgcagagcggtgcccccaatggaccctgggccacggtgggcatgggagaggcccgtcgcagggccacgcagctggcccaccttgtgggctgtcctccaggcggcactggtgggaatgacacagagctggtagcctgccttcggacacgaccagcgcaggtcctggtgaaccacgaatggcacgtgctgcctcaagaaagcgtcttccggttctccttcgtgcctgtggtagatggagacttcctcagtgacaccccagaggccctcatcaacgcgggagacttccacggcctgcaggtgctggtgggtgtggtgaaggatgagggctcgtattttctggtttacggggccccaggcttcagcaaagacaacgagtctctcatcagccgggccgagttcctggccggggtgcgggtcggggttccccaggtaagtgacctggcagccgaggctgtggtcctgcattacacagactggctgcatcccgaggacccggcacgcctgagggaggccctgagcgatgtggtgggcgaccacaatgtcgtgtgccccgtggcccagctggctgggcgactggctgcccagggtgcccgggtctacgcctacgtctttgaacaccgtgcttccacgctctcctggcccctgtggatgggggtgccccacggctacgagatcgagttcatctttgggatccccctggacccctctcgaaactacacggcagaggagaaaatcttcgcccagcgactgatgcgatactgggccaactttgcccgcacaggggatcccaatgagccccgagaccccaaggccccacaatggcccccgtacacggcgggggctcagcagtacgttagtctggacctgcggccgctggaggtgcggcgggggctgcgcgcccaggcctgcgccttctggaaccgcttcctccccaaattgctcagcgccaccgcctcggaggctcccagcacctgcccaggcttcacccatggggaggctgctccgaggcccggcctccccctgcccctcctcctcctccaccagcttctcctcctcttcctctcccacctccggcggctgtgaacacggcctcttcccctacggccacaggggcccctcctctaatgagtggtcggaccgtggggaagggccccactcagggatctcagacctagtgctcccttcctcctcaaaccgagagactcacactggacagggcaggaggagggggccgtgcctcccacccttctcagggacccccacgcctttgttgtttgaatggaaatggaaaagccagtattcttttataaaattatcttttggaacctgagcctgacattggggggaagtgggaggccccggacggggtagcaccccccattggggctataacggtcaaccatttctgtctcttctttttcccccaacctccccctcctgtcccctctgttcccgtcttccggtcattcttttctcctcctctctccttcctgctgtccttctccggccccgcctctgccctcatcctccctctcgtctttcgcacattctcctgatcctcttgccaccgtcccacgtggtcgcctgcatttctccgtgcgtcctccctgcactgaaacccccccttcaacccgcccaaatgtccgatccccgaccttcctcgtgccgtcctcccctcccgcctcgctgggcgccctggccgcagacacgctcgacgaggcggagcgccagtggaaggccgagttccaccgctggagctcctacatggtgcactggaagaaccagttcgaccactacagcaagcaggatcgctgctcagacctgtgaccccggcgggacccccatgtcctccgctccgcccggccccctagctgtatatactatttatttcagggctgggctataacacagacgagccccagactctgcccatccccaccccaccccgacgtcccccggggctcccggtcctctggcatgtcttcaggctgagctcctccccgcgtgccttcgccctctggctgcaaataaactgttacaggcc

SEQ ID NO: 109 - DNA, 3498 bp, human
gggctcgaacgcgcagcgcacgggaaccggtcccgctgcttgggtcaggttcgccggtcgcgggagccccgccgtgcagtcggaggaacacgtggccatcagtaatcatgagcaacccattcgcacaccttgctgagccattggatcctgtacaaccaggaaagaaattcttcaatttgaataaattggaggattcaagatatgggcgcttaccattttcgatcagagttcttctggaagcagccattcggaattgtgatgagtttttggtgaagaaacaggatattgaaaatattctacattggaatgtcactcagcacaagaacatagaagtgccatttaagcctgctcgtgtcatcctgcaggactttacgggtgtgcccgctgtggttgactttgctgcaatgcgtgatgctgtgaaaaagttaggaggagatccagagaaaataaaccctgtctgccctgctgatcttgtaatagatcattccatccaggttgatttcaacagaagggcagacagtttacagaagaatcaagacctggaatttgaaagaaatagagagcgatttgaatttttaaagtggggttcccaggcttttcacaacatgcggattattccccctggctcaggaatcatccaccaggtgaatttggaatatttggcaagagtggtatttgatcaggatggatattattacccagacagcctcgtgggcacagactcgcacactaccatgattgatggcttgggcattcttggttggggtgtcggtggtattgaagcagaagctgtcatgctgggtcagccaatcagtatggtgcttcctcaggtgattggctacaggctgatggggaagccccaccctctggtaacatccactgacatcgtgctcaccattaccaagcacctccgccaggttggggtagtgggcaaatttgtcgagttcttcgggcctggagtagcccagttgtccattgctgaccgagctacgattgctaacatgtgtccagagtacggagcaactgctgcctttttcccagttgatgaagttagtatcacgtacctggtgcaaacaggtcgtgatgaagaaaaattaaagtatattaaaaaatatcttcaggctgtaggaatgtttcgagatttcaatgacccttctcaagacccagacttcacccaggttgtggaattagatttgaaaacagtagtgccttgctgtagtggacccaaaaggcctcaggacaaagttgctgtgtccgacatgaaaaaggactttgagagctgccttggagccaagcaaggatttaaaggattccaagttgctcctgaacatcataatgaccataagacctttatctatgataacactgaattcacccttgctcatggttctgtggtcattgctgccattactagctgcacaaacaccagtaatccgtctgtgatgttaggggcaggattgttagcaaagaaagctgtggatgctggcctgaacgtgatgccttacatcaaaactagcctgtctcctgggagtggcgtggtcacctactacctacaagaaagcggagtcatgccttatctgtctcagcttgggtttgacgtggtgggctatggctgcatgacctgcattggcaacagtgggcctttacctgaacctgtggtagaagccatcacacagggagaccttgtagctgttggagtactatctggaaacaggaattttgaaggtcgagttcaccccaacacccgggccaactatttagcctctccccccttagtaatagcatatgcaattgctggaaccatcagaatcgactttgagaaagagccattgggagtaaatgcaaagggacagcaggtatttctgaaagatatctggccgactagagacgagatccaggcagtggagcgtcagtatgtcatcccggggatgtttaaggaagtctatcagaaaatagagactgtgaatgaaagctggaatgccttagcaaccccatcagataagctgtttttctggaattccaaatctacgtatatcaaatcaccaccattctttgaaaacctgactttggatcttcagccccctaaatctatagtggatgcctatgtgctgctaaatttgggagattcggtaacaactgaccacatctccccagctggaaatattgcaagaaacagtcctgctgctcgctacttaactaacagaggcctaactccacgagaattcaactcctatggctcccgccgaggtaatgacgccgtcatggcacggggaacatttgccaacattcgcttgttaaacagatttttgaacaagcaggcaccacagactatccatctgccttctggggaaatccttgatgtgtttgatgctgctgagcggtaccagcaggcaggccttcccctgatcgttctggctggcaaagagtacggtgcaggcagctcccgagactgggcagctaagggccctttcctgctgggaatcaaagccgtcctggccgagagctacgagcgcattcaccgcagtaacctggttgggatgggtgtgatcccacttgaatatctccctggtgagaatgcagatgccctggggctcacagggcaagaacgatacactatcattattccagaaaacctcaaaccacaaatgaaagtccaggtcaagctggatactggcaagaccttccaggctgtcatgaggtttgacactgatgtggagctcacttatttcctcaacgggggcatcctcaactacatgatccgcaagatggccaagtaggagacgtgcacttggtcgtgcgcccagggaggaagccgcaccaccagccagcgcaggccctggtggagaggcctccctggctgcctctgggaggggtgctgccttgtagatggagcaagtgagcactgagggtctggtgccaatcctgtaggcacaaaaccagaagtttctacattctctatttttgttaatcatcttctctttttccagaatttggaagctagaatggtgggaatgtcagtagtgccagaaagagagaaccaagcttgtctttaaagttactgatcacaggacgttgctttttcactgtttcctattaatcttcagctgaacacaagcaaaccttctcaggaggtgtctcctaccctcttattgttcctcttacgctctgctcaatgaaaccttcctcttgagggtcattttcctttctgtattaattataccagtgttaagtgacatagataagaactttgcacacttcaaatcagagcagtgattctctcttctctccccttttccttcagagtgaatcatccagactcctcatggataggtcgggtgttaaagttgttttgattatgtaccttttgatagatccacataaaaagaaatgtgaagttttcttttactatcttttcatttatcaagcagagacctttgttgggaggcggtttgggagaacacatttctaatttgaatgaaatgaaatctattttcagtg

SEQ ID NO: 110 - DNA, 2744 bp, human
ctcatctttgtcagtgcacaaaatggcgccctacagcctactggtgactcggctgcagaaagctctgggtgtgcggcagtaccatgtggcctcagtcctgtgccaacgggccaaggtggcgatgagccactttgagcccaacgagtacatccattatgacctgctagagaagaacattaacattgttcgcaaacgactgaaccggccgctgacactctcggagaagattgtgtatggacacctggatgaccccgccagccaggaaattgagcgaggcaagtcgtacctgcggctgcggccggaccgtgtggccatgcaggatgcgacggcccagatggccatgctccagttcatcagcagcgggctgtccaaggtggctgtgccatccaccatccactgtgaccatctgattgaagcccaggttgggggcgagaaagacctgcgccgggccaaggacatcaaccaggaagtttataatttcctggcaactgcaggtgccaaatatggcgtgggcttctggaagcctggatctggaatcattcaccagattattctggaaaactatgcgtaccctggtgttcttctgattggcactgactcccacacccccaatggtggcggccttgggggcatctgcattggagttgggggtgccgatgctgtggatgtcatggctgggatcccctgggagctgaagtgccccaaggtgattggcgtgaagctgacgggctctctctccggttggtcctcacccaaagatgtgatcctgaaggtggcaggcatcctcacggtgaaaggtggcacaggtgcaatcgtggaataccacgggcctggtgtagactccatctcctgcactggcatggcgacaatctgcaacatgggtgcagaaattggggccaccacttccgtgttcccttacaaccacaggatgaagaagtacctgagcaagaccggccgggaagacattgccaatctagctgatgaattcaaggatcacttggtgcctgaccctggctgccattatgaccaactaattgaaattaacctcagtgagctgaagccacacatcaatgggcccttcacccctgacctggctcaccctgtggcagaagtgggcaaggtggcagagaaggaaggatggcctctggacatccgagtgggtctaattggtagctgcaccaattcaagctatgaagatatggggcgctcagcagctgtggccaagcaggcactggcccatggcctcaagtgcaagtcccagttcaccatcactccaggttccgagcagatccgcgccaccattgagcgggacggctatgcacagatcttgagggatctgggtggcattgtcctggccaatgcttgtggcccctgcattggccagtgggacaggaaggacatcaagaagggggagaagaacacaatcgtcacctcctacaacaggaacttcacgggccgcaacgacgcaaaccccgagacccatgcctttgtcacgtccccagagattgtcacagccctggccattgcgggaaccctcaagttcaacccagagaccgactacctgacgggcacggatggcaagaagttcaggctggaggctccggatgcagatgagcttcccaaaggggagtttgacccagggcaggacacctaccagcacccacccaaggacagcagcgggcagcatgtggacgtgagccccaccagccagcgcctgcagctcctggagccttttgacaagtgggatggcaaggacctggaggacctgcagatcctcatcaaggtcaaagggaagtgtaccactgaccacatctcagctgctggcccctggctcaagttccgtgggcacttggataacatctccaacaacctgctcattggtgccatcaacattgaaaacggcaaggccaactccgtgcgcaatgccgtcactcaggagtttggccccgtccctgacactgcccgctactacaagaaacatggcatcaggtgggtggtgatcggagacgagaactacggcgagggctcgagccgggagcatgcagctctggagcctcgccaccttgggggccgggccatcatcaccaagagctttgccaggatccacgagaccaacctgaagaaacagggcctgctgcctctgaccttcgctgacccggctgactacaacaagattcaccctgtggacaagctgaccattcagggcctgaaggacttcacccctggcaagcccctgaagtgcatcatcaagcaccccaacgggacccaggagaccatcctcctgaaccacaccttcaacgagacgcagattgagtggttccgcgctggcagtgccctcaacagaatgaaggaactgcaacagtgagggcagtgcctccccgccccgccgctggcgtcaagttcagctccacgtgtgccatcagtggatccgatccgtccagccatggcttcctattccaagatggtgtgaccagacatgcttcctgctccccgcttagcccacggagtgactgtggttgtggtgggggggttcttaaaataactttttagcccccgtcttcctattttgagtttggttcagatcttaagcagctccatgcaactgtatttatttttgatgacaagactcccatctaaagtttttctcctgcctgatcatttcattggtggctgaaggattctagagaaccttttgttcttgcaaggaaaacaagaatccaaaaccagtgactgttctgtgaaaa

SEQ ID NO: 111 - DNA, 3445 bp, human
ctcccctggccaggagcaggggattagtctgccccgcgaccggccccagccacgacgcggacatcgccccctctgtctgggccgctgtcactcacgcgccaaagggccacggagaaagaaggggcgggccggggcgggccgggcgagcggaggcggggacttgcgccgtcctgaggctgcctcctagggtccggccggcgctggagctgcggatttagattgtcactgccacctcggtcggtgcttacttcgctgccagctggtcgtcgccatgaacccggacctgcgcagggagcgggattccgccagcttcaacccggagctgcttacacacatcctggacggcagccccgagaaaacccggcgccgccgagagatcgagaacatgatcctgaacgacccagacttccagcatgaggacttgaacttcctcactcgcagccagcgttatgaggtggctgtcaggaaaagtgccatcatggtgaagaagatgagggagtttggcatcgctgaccctgatgaaattatgtggtttaaaaattttgtgcaccgagggcggcctgagcctctggatcttcacttgggcatgttcctgcccaccttgcttcaccaggcaactgcggagcagcaggagcgcttcttcatgcccgcctggaacttggagatcattggcacttatgcccagacagagatgggtcatggaactcaccttcgaggcttggaaaccacagccacgtatgaccctgaaacccaggagttcattctcaacagtcctactgtgacctccattaaatggtggcctggtgggcttggaaagacttcaaatcatgcaatagttcttgcccagctcatcactaaggggaaatgctatggattacatgcctttatcgtacctattcgtgaaatcgggacccataagcctttgccaggaattaccgttggtgacatcggccccaaatttggttatgatgagatagacaatggctacctcaaaatggacaaccatcgtattcccagagaaaacatgctgatgaagtatgcccaggtgaagcctgatggcacatacgtgaaaccgctgagtaacaagctgacttacgggaccatggtgtttgtcaggtccttccttgtgggagaagctgctcgggctctgtctaaggcgtgcaccattgccatccgatacagcgctgtgaggcaccagtctgaaatcaagccaggtgaaccagaaccacagattttggattttcaaacccagcagtataaactctttccactcctggccactgcctatgccttccagtttgtgggcgcatacatgaaggagacctatcaccggattaacgaaggcattggtcaaggggacctgagtgaactgcctgagcttcatgccctcaccgctggactgaaggctttcacctcctggactgcaaacactggcattgaagcatgtcggatggcttgtggtgggcatggctattctcattgcagtggtcttccaaatatttatgtcaatttcaccccaagctgtacctttgagggagaaaacactgtcatgatgctccagacggctaggttcctgatgaaaagttatgatcaggtgcactcaggaaagttggtgtgtggcatggtgtcctatttgaacgacctgcccagtcagcgcatccagccacagcaggtagcagtctggccaaccatggtggatatcaacagccccgaaagcctaaccgaagcatataaactccgtgcagccagattagtagaaattgctgcaaaaaaccttcaaaaagaagtgattcacagaaaaagcaaggaggtagcttggaacctaacttctgttgaccttgttcgagcaagtgaggcacattgccactatgtggtagttaagctcttttcagaaaaactcctcaaaattcaagataaagccattcaagctgtcttaaggagtttatgtctgctgtattctctgtatggaatcagtcagaacgcgggggatttccttcaggggagcatcatgacagagcctcagattacacaagtaaaccagcgtgtaaaggagttactcactctgattcgctcagatgctgttgctttggttgatgcatttgattttcaggatgtgacacttggctctgtgcttggccgctatgatgggaatgtgtatgaaaacttgtttgagtgggctaagaactccccactgaacaaagcagaggtccacgaatcttacaagcacctgaagtcactgcagtccaagctctgaagtgtcacaaggacaagtttaatctgcttcagaaagcgcctgtgtgcaactcaaattttgtggaatctttttcgaattcaaatagctatagagcaaatgataaattgacccctttttataaatggagggaaaaaatgaacagatttcagagattaaatgaaaaaaagcagatgttttaagtgcaattaacactgaaagagacctgttaaaccattcagaaaaagcttaagaaatgcgatatgacttccttttgtaatgctgctgatcccagtagactatgacttttgataattagcagaatttaactactgagtagttgattattttcacattttaattgctaatcactggctatataagtgtttttaagcaaaggtatttttgaagtggtgtagaacccttccaagctttcctgctcagtgttctaccagacttaccctggggcctggcttaaaagcaggattgaagaaaagggactgggggaaggaaacttattggaaaacttgatgcgaatgagtttctgcttggcacagtctctgcctgcttgctctcctttgctgatggattgcatttatcaaactattcatgctagcatttttccaacgagggaacttattccgcacgggcctactgtaggaccattgtctcgtgtaattaggaattttccatttgaaggattgctaaattgtcacagtagtaggaagtatagggaaacctctcagctgtggcactgttgtagctttggagtgcagagtgtaactctgggacaatcagatttcacatattctgtcatcttggcataagccattaaaagcttggagattactgtatttggcattaaaaaaaaatgtcacttaggtcagcactcccagacgtagcacagaaaaaccctttgacacaaaccatgtgttctgatttttggttcagaaaatattgaaactgtgagttgttttttttttaacaactgggaaaaaacaaaaacaaaaaactatagttagaaaaatggaagttccataggttctatttcttactctatgtatggctttgttttcagtctatttctaggagctttctctgaatcgctaattgtcctttcagttgaaatctaatttatacaatcattctatacttaaaggttaaatacatcttaattaattttttcttaaaaaaaaaaaaaaaaaaaaaaaaaaa

SEQ ID NO: 112 - DNA, 1793 bp, human
cgcgtccgccccgcgagcacagagcctcgcctttgccgatccgccgcccgtccacacccgccgccagctcaccatggatgatgatatcgccgcgctcgtcgtcgacaacggctccggcatgtgcaaggccggcttcgcgggcgacgatgccccccgggccgtcttcccctccatcgtggggcgccccaggcaccagggcgtgatggtgggcatgggtcagaaggattcctatgtgggcgacgaggcccagagcaagagaggcatcctcaccctgaagtaccccatcgagcacggcatcgtcaccaactgggacgacatggagaaaatctggcaccacaccttctacaatgagctgcgtgtggctcccgaggagcaccccgtgctgctgaccgaggcccccctgaaccccaaggccaaccgcgagaagatgacccagatcatgtttgagaccttcaacaccccagccatgtacgttgctatccaggctgtgctatccctgtacgcctctggccgtaccactggcatcgtgatggactccggtgacggggtcacccacactgtgcccatctacgaggggtatgccctcccccatgccatcctgcgtctggacctggctggccgggacctgactgactacctcatgaagatcctcaccgagcgcggctacagcttcaccaccacggccgagcgggaaatcgtgcgtgacattaaggagaagctgtgctacgtcgccctggacttcgagcaagagatggccacggctgcttccagctcctccctggagaagagctacgagctgcctgacggccaggtcatcaccattggcaatgagcggttccgctgccctgaggcactcttccagccttccttcctgggcatggagtcctgtggcatccacgaaactaccttcaactccatcatgaagtgtgacgtggacatccgcaaagacctgtacgccaacacagtgctgtctggcggcaccaccatgtaccctggcattgccgacaggatgcagaaggagatcactgccctggcacccagcacaatgaagatcaagatcattgctcctcctgagcgcaagtactccgtgtggatcggcggctccatcctggcctcgctgtccaccttccagcagatgtggatcagcaagcaggagtatgacgagtccggcccctccatcgtccaccgcaaatgcttctaggcggactatgacttagttgcgttacaccctttcttgacaaaacctaacttgcgcagaaaacaagatgagattggcatggctttatttgttttttttgttttgttttggttttttttttttttttggcttgactcaggatttaaaaactggaacggtgaaggtgacagcagtcggttggagcgagcatcccccaaagttcacaatgtggccgaggactttgattgcacattgttgtttttttaatagtcattccaaatatgagatgcattgttacaggaagtcccttgccatcctaaaagccaccccacttctctctaaggagaatggcccagtcctctcccaagtccacacaggggaggtgatagcattgctttcgtgtaaattatgtaatgcaaaatttttttaatcttcgccttaatacttttttattttgttttattttgaatgatgagccttcgtgcccccccttccccctttttgtcccccaacttgagatgtatgaaggcttttggtctccctgggagtgggtggaggcagccagggcttacctgtacactgacttgagaccagttgaataaaagtgcacacctta

SEQ ID NO: 113 - DNA, 2952 bp, human
gaagcgaatagcgttttcagagatattgggcggctcaagggtcttactctgtcgcccagtctgtaatgcagtgctgtgaccatagcccactgcagcctccacctcccaggctcaagcagtccttcccccctcgccctcatgaatagctgggactacagcctggagcattggtaagcgtcacactgccaaagtgagagctgctggagaactcataatcccaggaacgcctcttctactctccgagtaccccagtgaccagagtgagagaagctctgaacgagggcacgcggcttgaaggactgtgggcagatgtgaccaagagcctgcattaagttgtacaatggtagatggagtgatgattcttcctgtgcttatcatgattgctctcccctcccctagtatggaagatgagaagcccaaggtcaaccccaaactctacatgtgtgtgtgtgaaggtctctcctgcggtaatgaggaccactgtgaaggccagcagtgcttttcctcactgagcatcaacgatggcttccacgtctaccagaaaggctgcttccaggtttatgagcagggaaagatgacctgtaagaccccgccgtcccctggccaagctgtggagtgctgccaaggggactggtgtaacaggaacatcacggcccagctgcccactaaaggaaaatccttccctggaacacagaatttccacttggaggttggcctcattattctctctgtagtgttcgcagtatgtcttttagcctgcctgctgggagttgctctccgaaaatttaaaaggcgcaaccaagaacgcctcaatccccgagacgtggagtatggcactatcgaagggctcatcaccaccaatgttggagacagcactttagcagatttattggatcattcgtgtacatcaggaagtggctctggtcttccttttctggtacaaagaacagtggctcgccagattacactgttggagtgtgtcgggaaaggcaggtatggtgaggtgtggaggggcagctggcaaggggaaaatgttgccgtgaagatcttctcctcccgtgatgagaagtcatggttcagggaaacggaattgtacaacactgtgatgctgaggcatgaaaatatcttaggtttcattgcttcagacatgacatcaagacactccagtacccagctgtggttaattacacattatcatgaaatgggatcgttgtacgactatcttcagcttactactctggatacagttagctgccttcgaatagtgctgtccatagctagtggtcttgcacatttgcacatagagatatttgggacccaagggaaaccagccattgcccatcgagatttaaagagcaaaaatattctggttaagaagaatggacagtgttgcatagcagatttgggcctggcagtcatgcattcccagagcaccaatcagcttgatgtggggaacaatccccgtgtgggcaccaagcgctacatggcccccgaagttctagatgaaaccatccaggtggattgtttcgattcttataaaagggtcgatatttgggcctttggacttgttttgtgggaagtggccaggcggatggtgagcaatggtatagtggaggattacaagccaccgttctacgatgtggttcccaatgacccaagttttgaagatatgaggaaggtagtctgtgtggatcaacaaaggccaaacatacccaacagatggttctcagacccgacattaacctctctggccaagctaatgaaagaatgctggtatcaaaatccatccgcaagactcacagcactgcgtatcaaaaagactttgaccaaaattgataattccctcgacaaattgaaaactgactgttgacattttcatagtgtcaagaaggaagatttgacgttgttgtcattgtccagctgggacctaatgctggcctgactggttgtcagaatggaatccatctgtctccctccccaaatggctgctttgacaaggcagacgtcgtacccagccatgtgttggggagacatcaaaaccaccctaacctcgctcgatgactgtgaactgggcatttcacgaactgttcacactgcagagactaatgttggacagacactgttgcaaaggtagggactggaggaacacagagaaatcctaaaagagatctgggcattaagtcagtggctttgcatagctttcacaagtctcctagacactccccacgggaaactcaaggaggtggtgaatttttaatcagcaatattgcctgtgcttctcttctttattgcactaggaattctttgcattccttacttgcactgttactcttaattttaaagacccaacttgccaaaatgttggctgcgtactccactggtctgtctttggataataggaattcaatttggcaaaacaaaatgtaatgtcagactttgctgcattttacacatgtgctgatgtttacaatgatgccgaacattaggaattgtttatacacaactttgcaaattatttattacttgtgcacttagtagtttttacaaaactgctttgtgcatatgttaaagcttatttttatgtggtcttatgattttattacagaaatgtttttaacactatactctaaaatggacattttcttttattatcagttaaaatcacattttaagtgcttcacatttgtatgtgtgtagactgtaactttttttcagttcatatgcagaacgtatttagccattacccacgtgacaccaccgaatatattatcgatttagaagcaaagatttcagtagaattttagtcctgaacgctacggggaaaatgcattttcttcagaattatccattacgtgcatttaaactctgccagaaaaaaataactattttgttttaatctactttttgtatttagtagttatttgtataaattaaataaactgttttcaagtc

SEQ ID NO: 114 - DNA, 621 bp, human
cggaggtttgcgcgccttggtgagccgttggcgtggtggtcccggagtgatcctggcagccggtggggaagacaaggagggtttgagcatggcagaaggaaacaccctgatatcagtggattatgaaatttttgggaaggtgcaaggggtgtttttccgtaagcatactcaggctgagggtaaaaagctgggattggtaggctgggtccagaacactgaccggggcacagtgcaaggacaattgcaaggtcccatctccaaggtgcgtcatatgcaggaatggcttgaaacaagaggaagtcctaaatcacacatcgacaaagcaaacttcaacaatgaaaaagtcatcttgaagttggattactcagacttccaaattgtaaaataatggcctgaatttaagttttctaagataaactcagtggtttggtttttattattaatagagatagaactattgtgtgttaatattagcattagtcaataagttattttaatgtcagatttttgaatgttattatatattacctgtatgatggaaggattaccactgtacacaaatctaatcaataaaaacgttagaaccttctgcttagagtacttttaaaaaaaaaaaaaaaa

SEQ ID NO: 115 - DNA, 3410 bp, human
gaattcgaggatccgggtaccatgggcggcggcaggcctagcagcacgggaaccgtcccccgcgcgcatgcgcgcgcccctgaagcgcctgggggacgggtatgggcgggaggtaggggcgcggctccgcgtgccagttgggtgcccgcgcgtcacgtggtgaggaaggaggcggaggtctgagtttcgagggagggggggagagaagagggaacgagcaagggaaggaaagcggggaaaggaggaaggaaacgaacgagggggagggaggtccctgttttggaggagctaggagcgttgccggcccctgaagtggagcgagagggaggtgcttcgccgtttctcctgccaggggaggtcccggcttcccgtggaggctccggaccaagccccttcagcttctccctccggatcgatgtgctgctgttaacccgtgaggaggcggcggcggcggcagcggcagcggaagatggtgttgctgagagtgttaattctgctcctctcctgggcggcggggatgggaggtcagtatgggaatcctttaaataaatatatcagacattatgaaggattatcttacaatgtggattcattacaccaaaaacaccagcgtgccaaaagagcagtctcacatgaagaccaatttttacgtctagatttccatgcccatggaagacatttcaacctacgaatgaagagggacacttcccttttcagtgatgaatttaaagtagaaacatcaaataaagtacttgattatgatacctctcatatttacactggacatatttatggtgaagaaggaagttttagccatgggtctgttattgatggaagatttgaaggattcatccagactcgtggtggcacattttatgttgagccagcagagagatatattaaagaccgaactctgccatttcactctgtcatttatcatgaagatgatattaactatccccataaatacggtcctcaggggggctgtgcagatcattcagtatttgaaagaatgaggaaataccagatgactggtgtagaggaagtaacacagatacctcaagaagaacatgctgctaatggtccagaacttctgaggaaaaaacgtacaacttcagctgaaaaaaatacttgtcagctttatattcagactgatcatttgttctttaaatattacggaacacgagaagctgtgattgcccagatatccagtcatgttaaagcgattgatacaatttaccagaccacagacttctccggaatccgtaacatcagtttcatggtgaaacgcataagaatcaatacaactgctgatgagaaggaccctacaaatcctttccgtttcccaaatattggtgtggagaagtttctggaattgaattctgagcagaatcatgatgactactgtttggcctatgtcttcacagaccgagattttgatgatggcgtacttggtctggcttgggttggagcaccttcaggaagctctggaggaatatgtgaaaaaagtaaactctattcagatggtaagaagaagtccttaaacactggaattattactgttcagaactatgggtctcatgtacctcccaaagtctctcacattacttttgctcacgaagttggacataactttggatccccacatgattctggaacagagtgcacaccaggagaatctaagaatttgggtcaaaaagaaaatggcaattacatcatgtatgcaagagcaacatctggggacaaacttaacaacaataaattctcactctgtagtattagaaatataagccaagttcttgagaagaagagaaacaactgttttgttgaatctggccaacctatttgtggaaatggaatggtagaacaaggtgaagaatgtgattgtggctatagtgaccagtgtaaagatgaatgctgcttcgatgcaaatcaaccagagggaagaaaatgcaaactgaaacctgggaaacagtgcagtccaagtcaaggtccttgttgtacagcacagtgtgcattcaagtcaaagtctgagaagtgtcgggatgattcagactgtgcaagggaaggaatatgtaatggcttcacagctctctgcccagcatctgaccctaaaccaaacttcacagactgtaataggcatacacaagtgtgcattaatgggcaatgtgcaggttctatctgtgagaaatatggcttagaggagtgtacgtgtgccagttctgatggcaaagatgataaagaattatgccatgtatgctgtatgaagaaaatggacccatcaacttgtgccagtacagggtctgtgcagtggagtaggcacttcagtggtcgaaccatcaccctgcaacctggatccccttgcaacgattttagaggttactgtgatgttttcatgcggtgcagattagtagatgctgatggtcctctagctaggcttaaaaaagcaatttttagtccagagctctatgaaaacattgctgaatggattgtggctcattggtgggcagtattacttatgggaattgctctgatcatgctaatggctggatttattaagatatgcagtgttcatactccaagtagtaatccaaagttgcctcctcctaaaccacttccaggcactttaaagaggaggagacctccacagcccattcagcaaccccagcgtcagcggccccgagagagttatcaaatgggacacatgagacgctaactgcagcttttgccttggttcttcctagtgcctacaatgggaaaacttcactccaaagagaaacctattaagtcatcatctccaaactaaaccctcacaagtaacagttgaagaaaaaatggcaagagatcatatcctcagaccaggtggaattacttaaattttaaagcctgaaaattccaatttgggggtgggaggtggaaaaggaacccaattttcttatgaacagatatttttaacttaatggcacaaagtcttagaatattattatgtgccccgtgttccctgttcttcgttgctgcattttcttcacttgcaggcaaacttggctctcaataaacttttaccacaaattgaaataaatatatttttttcaactgccaatcaaggctaggaggctcgaccacctcaacattggagacatcacttgccaatgtacataccttgttatatgcagacatgtatttcttacgtacactgtacttctgtgtgcaattgtaaacagaaattgcaatatggatgtttctttgtattataaaatttttccgctcttaattaaaaattactgtttaattgacatactcaggataacagagaatggtggtattcagtggtccaggattctgtaatgctttacacaggcagttttgaaatgaaaatcaatttaccccatggtacccggatcctcgaattc

SEQ ID NO: 116 - DNA, 6594 bp, human
ccggtctataggtgcataccaccacaccaggctaattttttttttttgagacggagtctcactctgtcacccaggctggagtgcaatggcgcgatctttgctcactgcaacctctgccacccgggttcaagcaattctcctgcctcagctcctgagtagctgggattacaggcgcccgccaccacgcccggctaatttttgtatttttagtagagacgaggtttcaccatcttggccaggctggtcttgaactcctgaccttgtgatctacctgccagggccttccaaagtgctgggattacggacgtgagccaccacgcctggcccaggctaattttttgaaattttaatagaggcagggtcttgctgtattgcccaggctgctctcacattcctagccttaagccatcctcctatctcggcctcacaaagtgctgggattacaggtgtaagccactgtgcctggttttgggcaagtttcttgtcctgactgtgtcttgggttctcacctgttgattggggatacccttgttgcctacctccaagtaattttatgaggatgaaactcatagcttgtcagtgggaagtgcttaggtaatgagctactagtggtggcagtggctgtgatggtggtattaataccactcctactggatggtctctaatactatctccttccttccctaccagcaacatgtcatggtttagtggcctcctggtccctaaagtggatgaacggaaaacagcctggggcgaacgcaatgggcagaagcgttcgcggcgccgtggcactcgggcaggtggcttctgcacgccccgctatatgagctgcctccgggatgcagagccacccagccccacccctgccggcccccctcggtgcccctggcaggatgacgccttcatccggaggggcggcccaggcaagggcaaggagctggggctgcgggcagtggccctgggcttcgaggataccgaggtgacaacgacagcgggcgggacggctgaggtggcgcccgacgcggtgcccaggagtgggcgatcctgctggcgccgtctggtgcaggtgttccagtcgaagcagttccgttcggccaagctggagcgcctgtaccagcggtacttcttccagatgaaccagagcagcctgacgctgctgatggcggtgctggtgctgctcacagcggtgctgctggctttccacgccgcacccgcccgccctcagcctgcctatgtggcactgttggcctgtgccgccgccctgttcgtggggctcatggtggtgtgtaaccggcatagcttccgccaggactccatgtgggtggtgagctacgtggtgctgggcatcctggcggcagtgcaggtcgggggcgctctcgcagcagacccgcgcagcccctctgcgggcctctggtgccctgtgttctttgtctacatcgcctacacgctcctccccatccgcatgcgggctgccgtcctcagcggcctgggcctctccaccttgcatttgatcttggcctggcaacttaaccgtggtgatgccttcctctggaagcagctcggtgccaatgtgctgctgttcctctgcaccaacgtcattggcatctgcacacactatccagcagaggtgtctcagcgccaggcctttcaggagacccgcggttacatccaggcccggctccacctgcagcatgagaatcggcagcaggagcggctgctgctgtcggtattgccccagcacgttgccatggagatgaaagaagacatcaacacaaaaaaagaagacatgatgttccacaagatctacatacagaagcatgacaatgtcagcatcctgtttgcagacattgagggcttcaccagcctggcatcccagtgcactgcgcaggagctggtcatgaccctgaatgagctctttgcccggtttgacaagctggctgcggagaatcactgcctgaggatcaagatcttgggggactgttactactgtgtgtcagggctgccggaggcccgggccgaccatgcccactgctgtgtggagatgggggtagacatgattgaggccatctcgctggtacgtgaggtgacaggtgtgaatgtgaacatgcgcgtgggcatccacagcgggcgcgtgcactgcggcgtccttggcttgcggaaatggcagttcgatgtgtggtccaatgatgtgaccctggccaaccacatggaggcaggaggccgggctggccgcatccacatcactcgggcaacactgcagtacctgaacggggactacgaggtggagccaggccgtggtggcgagcgcaacgcgtacctcaaggagcagcacattgagactttcctcatcctgggcgccagccagaaacggaaagaggagaaggccatgctggccaagctgcagcggactcgggccaactccatggaagggctgatgccgcgctgggttcctgatcgtgccttctcccggaccaaggactccaaggccttccgccagatgggcattgatgattccagcaaagacaaccggggcacccaagatgccctgaaccctgaggatgaggtggatgagttcctgagccgtgccatcgatgcccgcagcattgatcagctgcggaaggaccatgtgcgccggtttctgctcaccttccagagagaggatcttgagaagaagtactcccggaaggtggatccccgcttcggagcctacgttgcctgtgccctgttggtcttctgcttcatctgcttcatccagcttctcatcttcccacactccaccctgatgcttgggatctatgccagcatcttcctgctgctgctaatcaccgtgctgatctgtgctgtgtactcctgtggttctctgttccctaaggccctgcaacgtctgtcccgcagcattgtccgctcacgggcacatagcaccgcagttggcatcttttccgtcctgcttgtgtttacttctgccattgccaacatgttcacctgtaaccacacccccatacggagctgtgcagcccggatgctgaatttaacacctgctgacatcactgcctgccacctgcagcagctcaattactctctgggcctggatgctcccctgtgtgagggcaccatgcccacctgcagctttcctgagtacttcatcgggaacatgctgctgagtctcttggccagctctgtcttcctgcacatcagcagcatcgggaagttggccatgatctttgtcttggggctcatctatttggtgctgcttctgctgggtcccccagccaccatctttgacaactatgacctactgcttggcgtccatggcttggcttcttccaatgagacctttgatgggctggactgtccagctgcagggagggtggccctcaaatatatgacccctgtgattctgctggtgtttgcgctggcgctgtatctgcatgctcagcaggtggagtcgactgcccgcctagacttcctctggaaactacaggcaacaggggagaaggaggagatggaggagctacaggcatacaaccggaggctgctgcataacattctgcccaaggacgtggcggcccacttcctggcccgggagcgccgcaatgatgaactctactatcagtcgtgtgagtgtgtggctgttatgtttgcctccattgccaacttctctgagttctatgtggagctggaggcaaacaatgagggtgtcgagtgcctgcggctgctcaacgagatcatcgctgactttgatgagattatcagcgaggagcggttccggcagctggaaaagatcaagacgattggtagcacctacatggctgcctcagggctgaacgccagcacctacgatcaggtgggccgctcccacatcactgccctggctgactacgccatgcggctcatggagcagatgaagcacatcaatgagcactccttcaacaatttccagatgaagattgggctgaacatgggcccagtcgtggcaggtgtcatcggggctcggaagccacagtatgacatctgggggaacacagtgaatgtctctagtcgtatggacagcacgggggtccccgaccgaatccaggtgaccacggacctgtaccaggttctagctgccaagggctaccagctggagtgtcgaggggtggtcaaggtgaagggcaagggggagatgaccacctacttcctcaatgggggccccagcagttaacagggcccagccacaaattcagctgaagggaccaaggtgggcattgagtggactctgtgctcactgggtggagctgtggcagggggcactgagcctccagaccctgctaaccacaaaagggaacatcccagcaggctgtgcttggatcatgctcgtctgccctcaagctggaaaacaaggggctacctaccgagaggattatgcaagtgactttctttcttacttggggtagggctgttccctctccaatcttccagcctttgggagcaggggaggggtcagtagcagaagcagagggaggcctcttgcctgagggattaaaatggcagcttgccatgcctacccttccctgtctgtctgggcagcaggttcagggctgagcccttcttttccctcttttttcctgggaatattttgtacaatattttgtacaaagacaggcatgaggagtgcctattccatgcttgcctttgcaatacctgcatccccagcactggtcctgggcacttccccaccccagccaggtgtccctcctatgcacagagcagaggagggagaagctctggggagccagctttggccatatttcaggagaatgtttccatgtgccaaatcttagtcccatgatctgtccccaaaggggaacaaagggacctctgacagcttagatttagccccagttcctgcacgctccagggaacggggtgtctggcctcactggtactgtgaaaaatgctcagagagcaagcctgtgtgtggggatgtcaggtcaggagctggaagttcacctgcaggtgccaaagagcaggccggccagggctggggcagtgccagactctgatctgaggaccccgtcggggtccagatcaggtcactctgccccagtgctctcttgctgtctgctgacaagggggcatggagcatctcttcctcttctgttgccaaatagaaaagggtcagggcatggagaaaggtgaccctgatcccaaacctgccctcccaagtctctggtgttggggagggcccgtgtgtttgtgtaactgtgtgtgcatgttggtctttgtgtgcatatctgttttccaggtctatgtgagtccttgtgctcctgctcctcagctctccaccccaggttgcctctctcctgtgggcctctgtcttctgggaataaagcagggtttcctacttcaggggatgtagagagatgcccaggttgcacaggagtgggatggggtgtggtagcaaaaggagggagaggagtcctttttgtgccaaatccctaagtgccgttcgggggccatgtgtgcagcatgactctccctgtctgtggcagggacccaagcgcttgcttaagccccagtgctccatgccagcacttgaactgtctggggtttgatggacagaggctgaggaatttcctggcttccccagatagtgtcctgggacatggtatgctttggggctggggtagcatggaatccctctgaggacctggatactggtactacggggtggggaagaggaaccttaaacttggctttccccagccttcagcctgagtctagcatgtttctagctccccagtcccttgtgaagccttgagggctggcagaagggttaggaggttgaactctagattcccttcctgtctttgccttccttttacccctttccctgcaacctccttgactctggcctgaatttgttggtgcctcagtttctctgtctgtacctatttaagccaaaggcactagcctgaattttgcttgaagatcactttgtcttggaaatgactagagaggcagaggagaagggtttccagagttgctaggtttgggagtggaaggggcaggcagtgcacttgcccctcctcatgccccttctgacaccagctccctgtggaggcctggtttctgggtaatgcctcccttgggcatcttcatgcatcaaccaaatgggccatcaggtacttcattagtcatggcagaaggaggggaaaagacttgttttccagacagaaaatctactcccctgtccccagccatatccctggataggaagggataggaagagactacttggtgccatggggtaggggtgagggtataagtagatcagagtgggaagacctcagccttgggtggcttgtctctgcttcttgccaggtgggagggcctgtccacaccctggatccccgtaccacagtgccagccatgcccttcccctgggctaccattgtccctttcctcacccagttggtagaggagtcaggaggtgggaggccgtgggctttggttttataatgtaaccactgtgggggtgggggaggatggtgaaccatgtatttcagtgaaatatttaatatatttaaatatcaataaaatcaaactctttgt

SEQ ID NO: 117 - DNA, 2082 bp, human
cgccttccctccaatcagcacgccgggccggctagccaggggccgcccgcgcgcggggtgtgtgaggacgcgctcccagtcgctgagtgcctgagccgggaagcagttgctgtggtacctgctgctgcccgagcggacgtagagcatcggacgcgggcgccgtggcgctgggcaggagggcgaagccatgacgtcagtcagagaaaatattctctttggaatgggaaatcctctgcttgacatctctgctgtagtggacaaagatttccttgataagtattctctgaaaccaaatgaccaaatcttggctgaagacaaacacaaggaactgtttgatgaacttgtgaaaaaattcaaagtcgaatatcatgctggtggctctacccagaattcaattaaagtggctcagtggatgattcaacagccacacaaagcagcaacattttttggatgcattgggatagataaatttggggagatcctgaagagaaaagctgctgaagcccatgtggatgctcattactacgagcagaatgagcagccaacaggaacttgtgctgcatgcatcactggtgacaacaggtccctcatagctaatcttgctgctgccaattgttataaaaaggaaaaacatcttgatctggagaaaaactggatgttggtagaaaaagcaagagtttgttatatagcaggcttttttcttacagtttccccagagtcagtattaaaggtggctcaccatgcttctgaaaacaacaggattttcactttgaatctatctgcaccgtttattagccagttctacaaggaatcattgatgaaagttatgccttatgttgatatactttttggaaatgagacagaagctgccacttttgctagagagcaaggctttgagactaaagacattaaagagatagccaaaaagacacaagccctgccaaagatgaactcaaagaggcagcgaatcgtgatcttcacccaagggagagatgacactataatggctacagaaagtgaagtcactgcttttgctgtcttggatcaagaccagaaagaaattattgataccaatggagctggagatgcatttgttggaggttttctgtctcaactggtctctgacaagcctctgactgaatgtatccgtgctggccactatgcagcaagcatcataattagacggactggctgcacctttcctgagaagccagacttccactgatggaagagctgaaaacacaagcccaggagtgcagacactgccctaattgcttcctgagaattcccatattaataaagaagaaaattatctgccattttttcctactataataatgctgaatcttaatttagagggtacaagggtatggtaatgcttgtagaatctttattatctcaacaatctaaaaaatgatgtttatttccatagtttgatagtgccacttaaatgccaattaaacaagaatataacatttcaatagaaatttttatttcattttcaattactttgtaaattcgtgtgtatttagtacactgatttgtttttttacatttctgctttgaatgcagatgcaatttaatataatagattttttaatgaattaatcttaacatagtaatctttagctttttatacaaatatatttaatttaggagtatatgtgtgtctatacacacacatacataaatataccacatatacacctgatagtcaaataaggtacagaaattttatcttgtcaattatgccaaataatctctttaatgtgcactcaaacatgtaataaactttggataattaaataatgtgccaaatttaagttgtaccacaatattcaaatcatagtcttatggaactctgtaattggacacaaacaaaaacttgtcatataggaatttttttctgtcttttccctgtgtacagcaaactgaggaagaaagatcattatttaatactgggccctgaaatgacacccaatttgttaatggaattatgaagaacagcaatataatacactgaagaataacttagtatcagagaccaataaatcacttttttaaggatgacaaaatggtata

SEQ ID NO: 118 - DNA, 2403 bp, human
tttgcaggtgcctcaggaaccctgaagctgggctgagccatgatgctgctgccagaacccctgcagagggcctggtttcaggagactcagagtcctctgtgaaaaagcccttggagagcgccccagcagggctgcacttggctcctgtgaggaaggggctcaggggtctgggcccctccgcctgggccgggctgggagccaggcgggcggctgggctgcagcaatggaccgtgagctggcccagcccgcgtccgtgctgagcctgcctgtcgtctgtggccatgcccatcatgggctcctcggtgtacatcacggtggagctggccattgctgtgctggccatcctgggcaatgtgctggtgtgctgggccgtgtggctcaacagcaacctgcagaacgtcaccaactactttgtggtgtcactggcggcggccgacatcgcagtgggtgtgctcgccatcccctttgccatcaccatcagcaccgggttctgcgctgcctgccacggctgcctcttcattgcctgcttcgtcctggtcctcacgcagagctccatcttcagtctcctggccatcgccattgaccgctacattgccatccgcatcccgctccggtacaatggcttggtgaccggcacgagggctaagggcatcattgccatctgctgggtgctgtcgtttgccatcggcctgactcccatgctaggttggaacaactgcggtcagccaaaggagggcaagaaccactcccagggctgcggggagggccaagtggcctgtctctttgaggatgtggtccccatgaactacatggtgtacttcaacttctttgcctgtgtgctggtgcccctgctgctcatgctgggtgtctatttgcggatcttcctggcggcgcgacgacagctgaagcagatggagagccagcctctgccgggggagcgggcacggtccacactgcagaaggaggtccatgctgccaagtcactggccatcattgtggggctctttgccctctgctggctgcccctacacatcatcaactgcttcactttcttctgccccgactgcagccacgcccctctctggctcatgtacctggccatcgtcctctcccacaccaattcggttgtgaatcccttcatctacgcctaccgtatccgcgagttccgccagaccttccgcaagatcattcgcagccacgtcctgaggcagcaagaacctttcaaggcagctggcaccagtgcccgggtcttggcagctcatggcagtgacggagagcaggtcagcctccgtctcaacggccacccgccaggagtgtgggccaacggcagtgctccccaccctgagcggaggcccaatggctatgccctggggctggtgagtggagggagtgcccaagagtcccaggggaacacgggcctcccagacgtggagctccttagccatgagctcaagggagtgtgcccagagccccctggcctagatgaccccctggcccaggatggagcaggagtgtcctgatgattcatggagtttgccccttcctaagggaaggagatctttatctttctggttggcttgaccagtcacgttgggagaagagagagagtgccaggagaccctgagggcagccggttcctactttggactgagagaagggagccccaggctggagcagcatgaggcccagcaagaagggcttgggttctgaggaagcagatgtttcatgctgtgaggccttgcaccaggtgggggccacagcaccagcagcatctttgctgggcaggcccagccctccactgcagaagcatctggaagcaccaccttgtctccacagagcagcttgggcacagcagactggcctggccctgagactggggagtggctccaatagcctcctgccacccacacaccactctccctagactctcctagggttcaggagctgctgggcccagaggtgacatttgacttttttccaggaaaaatgtaagtgtgaggaaaccctttttattttattacctttcactctctggctgctgggtctgccgtcggtcctgctgctaacctggcaccagagcctctgcccggggagcctcaggcagtcctctcctgctgtcacagctgccatccacttctcagtcccagggccatctcttggagtgacaaagctgggatcaaggatagggagttgtaacagagcagtgccagagcatgggcccaggtcccaggggagaggttggggctggcaggccactggcatgtgctgagtagcgcagagctacccagtgagaggccttgtctaactgcctttccttctaaagggaatgtttttttctgagataaaataaaaacgagccacatcgtgttttaagcttgtccaaatgaaaaaaaaaaaaaaaaa

SEQ ID NO: 119 - DNA, 1692 bp, human
ccatggcggctggaggcgatcatggttcgcccgacagctaccgctcacctcttgcctcccgctatgccagcccggagatgtgcttcgtgtttagcgacaggtataaattccggacatggcggcagctgtggctgtggctggcggaggccgagcagacattgggtttgcctatcacagatgaacaaatccaggagatgaaatcaaacctggagaacatagacttcaagatggcagctgaggaagagaaacgtttacgacatgatgtgatggctcacgtgcacacatttggccactgctgtccaaaagctgcaggcattattcaccttggtgctacttcttgctatgttggagacaatactgacttgattattcttagaaatgcacttgacctgcttttgccaaagcttgccagagtgatctctcggcttgccgactttgctaaggaacgagccagtctacccacattaggtttcacacatttccagcctgcacagctgaccacagttgggaaacgttgctgtctttggattcaggatctttgcatggatctccagaacttgaagcgtgtccgagatgacctgcgcttccggggagtaaagggtaccactggcactcaggccagtttcctgcagctctttgagggagatgaccataaggtagagcagcttgacaagatggtgacagaaaaggcaggatttaagagagctttcatcatcacagggcagacatatacacgaaaagtggatattgaagtactgtctgtgctggctagcttgggggcatcagtgcacaagatttgcaccgacatacgcctcctggcaaacctcaaggagatggaggaaccctttgaaaaacagcagattggctcaagtgcgatgccatataagcggaatcccatgcgttcagaacgttgctgcagtcttgcccgccacctgatgacccttgtcatggacccgctacagacagcatctgtccagtggtttgaacgcacactggatgatagtgccaaccgacggatctgtttggccgaggcatttcttaccgcagatactatattgaatacgctgcagaacatttctgaaggattggtcgtgtaccccaaagtaattgaacggcgcattcggcaagagctgcctttcatggccacagagaacatcatcatggccatggtcaaagctggaggtagccgccaggattgccatgagaaaatcagagtgctttctcagcaggcagcttctgtggttaagcaggaagggggtgacaatgacctcatagagcgtatccaggttgatgcctacttcagtcccattcactcccagttggatcatttactggatccttcttctttcactggtcgtgcctcccagcaggtgcagagattcttagaagaggaggtgtatcccctgttaaaaccatatgaaagcgtgatgaaggtgaaagcagaattatgtctgtagagttggaagagaattaaacgaaaatcattgttaattgctgaggcatgaaaattgtgttactataacgccttattttacctcgagaattgttaccttaaattagtacagcactttcttcttcccatggtgctttcctgtttctcagtctcacatttctcaacaaggcaaaaacaaagagcgttgaagttgactctgctcttgcatagtaaatgtagttcatacttgaaaaaaaaaa

SEQ ID NO: 120 - DNA, 2041 bp, human
aattgttcggcgatcgctggctgccgggacttttctcgcgctggtctcttcggtggtcagggatggcgcggaagtcgaacttgcctgtgcttctcgtgccgtttctgctctgccaggccctagtgcgctgctccagccctctgcccctggtcgtcaacacttggccctttaagaatgcaaccgaagcagcgtggagggcattagcatctggaggctctgccctggatgcagtggagagcggctgtgccatgtgtgagagagagcagtgtgacggctctgtaggctttggaggaagtcctgatgaacttggagaaaccacactagatgccatgatcatggatggcactactatggatgtaggagcagtaggagatctcagacgaattaaaaatgctattggtgtggcacggaaagtactggaacatacaacacacacacttttagtaggagagtcagccaccacatttgctcaaagtatggggtttatcaatgaagacttatctaccagtgcttctcaagctcttcattcagattggcttgctcggaattgccagccaaattattggaggaatgttataccagatccctcaaaatactgcggaccctacaaaccacctggtatcttaaagcaggatattcctatccataaagaaacagaagatgatcgtggtcatgacactattggcatggttgtaatccataagacaggacatattgctgctggtacatctacaaatggtataaaattcaaaatacatggccgtgtaggagactcaccaatacctggagctggagcctatgctgacgatactgcaggggcagccgcagccactgggaatggtgatatattgatgcgcttcctgccaagctaccaagctgtagaatacatgagaagaggagaagatccaaccatagcttgccaaaaagtgatttcaagaatccagaagcattttccagaattctttggggctgttatatgtgccaatgtgactggaagttacggtgctgcttgcaataaactttcaacatttactcagtttagtttcatggtttataattccgaaaaaaatcagccaactgaggaaaaagtggactgcatctaatccatctttactgtcaacatctgtatttaaagaagaaagaaacaaaggctgaaaaggctgctcactctcatcatctagtgttcctcatgtgttctaaagtctttttgtaaaataaacacaaaaataaatttatgttgaattggcactttctatatctgaaattgtattatctatttttatttaacctttcttatattatctgaagatgaatatgtatgtggctgtattttgtatatatttaagttttaagtgacacttggatttctgatcagtgttgcaaaaaattgctactttgagatttatttccacagtgatatattaaacccaaaaggaatcatcatatttggatgcttaaaatagagtatacaagttttttagacccaaagaaaaaaacagcagagtctcagcatgatcagtcctgattgaatttcattatgtcacagtgatgcatgtcttagcactgattattggttttacttaatattccctaaaaacttgaggaaggaagatgatagaacatgagatactctttgttttgtacatactagaaaatacagctatcttctgatgagcaattgtgttgattttctttgcttttttcctcttatggagctctcagtgtgtgaaagttctaaagccacaagaatcaatgatgttttagctgctaatatttagtattgatcgtttcttttaaaaatgatttggggaacttgatctgtactgtaattttactaattccttgtgcagaggtgggtatggcaattagaagtcaagaaatgggttgtttagcttggtttgtttccctaacttctgattaactctctgtatgacaactctacagaagttgtgcgcgtgctttctcagcagcatttttccttcaaaatcatctttttaatcaacagtcattaataaatgtacatgtacgatattcaaacttt

SEQ ID NO: 121 - DNA, 7445 bp, human
ctgtctacggcagctattccagaggcaacaactgcttccctctgttctcatctccccattggtggctggcgacccgaatttgggaatggggagattgcccacctgttatctttgagcagactaatctcttgtaagcagaagtgccattcggagtctccagagccctgtggcttggggctgggaatgtccccctgacttcaggctttcctaagtgtattgcttttctctgagaatggtctaggtttttaattttttaattgtaagaatctgtaatacagcatttttatttcggtcttattcgttgtgctcaaaggcaggaaacaactattaatttgccttctcgaatcttaatagttataagattcattctctttcattgctctgctaggcataaaacacacttcgaacatgggtaactcattcgactgtggagttcttttaattcttatgaaagatttcaaatcctctggaagccaaaatgggacacagtaaacagattcgaattttacttctgaacgaaatggagaaactggaaaagaccctcttcagacttgaacaagggtatgagctacagttccgattaggcccaactttacagggaaaagcagttaccgtgtatacaaattacccatttcctggagaaacatttaatagagaaaaattccgttctctggattgggaaaatccaacagaaagagaagatgattctgataaatactgtaaacttaatctgcaacaatctggttcatttcagtattatttccttcaaggaaatgagaaaagtggtggaggttacatagttgtggaccccattttacgtgttggtgctgataatcatgtgctacccttggactgtgttactcttcagacatttttagctaagtgtttgggaccttttgatgaatgggaaagcagacttagggttgcaaaagaatcaggctacaacatgattcattttaccccattgcagactcttggactatctaggtcatgctactcccttgccaatcagttagaattaaatcctgacttttcaagacctaatagaaagtatacctggaatgatgttggacagctagtggaaaaattaaaaaaggaatggaatgttatttgtattactgatgttgtctacaatcatactgctgctaatagtaaatggatccaggaacatccagaatgtgcctataatcttgtgaattctccacacttaaaacctgcctgggtcttagacagagcactttggcgtttctcctgtgatgttgcagaagggaaatacaaagaaaagggaatacctgctttgattgaaaatgatcaccatatgaattccatccgaaaaataatttgggaggatatttttccaaagcttaaactctgggaatttttccaagtagatgtcaacaaagcggttgagcaatttagaagacttcttacacaagaaaataggcgagtaaccaagtctgatccaaaccaacaccttacgattattcaagatcctgaatacagacggtttggctgtactgtagatatgaacattgcactaacgactttcataccacatgacaaggggccagcagcaattgaagaatgctgtaattggtttcataaaagaatggaggaattaaattcagagaagcatcgactcattaactatcatcaggaacaggcagttaattgccttttgggaaatgtgttttatgaacgactggctggccatggtccaaaactaggacctgtcactagaaagcatcctttagttaccaggtattttactttcccatttgaagagatagacttctccatggaagaatctatgattcatctgccaaataaagcttgttttctgatggcacacaatggatgggtaatgggagatgatcctcttcgaaactttgctgaaccgggttcagaagtttacctaaggagagaacttatttgctggggagacagtgttaaattacgctatgggaataaaccagaggactgtccttatctctgggcacacatgaaaaaatacactgaaataactgcaacttatttccagggagtacgtcttgataactgccactcaacacctcttcacgtagctgagtacatgttggatgctgctaggaatttgcaacccaatttatatgtagtagctgaactgttcacaggaagtgaagatctggacaatgtctttgttactagactgggcattagttccttaataagagaggcaatgagtgcatataatagtcatgaagagggcagattagtttaccgatatggaggagaacctgttggatcctttgttcagccctgtttgaggcctttaatgccagctattgcacatgccctgtttatggatattacgcatgataatgagtgtcctattgtgcatagatcagcgtatgatgctcttccaagtactacaattgtttctatggcatgttgtgctagtggaagtacaagaggctatgatgaattagtgcctcatcagatttcagtggtttctgaagaacggttttacactaagtggaatcctgaagcattgccttcaaacacaggtgaagttaatttccaaagcggcattattgcagccaggtgtgctatcagtaaacttcatcaggagcttggagccaagggttttattcaggtgtatgtggatcaagttgatgaagacatagtggcagtaacaagacactcacctagcatccatcagtctgttgtggctgtatctagaactgctttcaggaatcccaagacttcattttacagcaaggaagtgcctcaaatgtgcatccctggcaaaattgaagaagtagttcttgaagctagaactattgagagaaacacgaaaccttataggaaggatgagaattcaatcaatggaacaccagatatcacagtagaaattagagaacatattcagcttaatgaaagtaaaattgttaaacaagctggagttgccacaaaagggcccaatgaatatattcaagaaatagaatttgaaaacttgtctccaggaagtgttattatattcagagttagtcttgatccacatgcacaagtcgctgttggaattcttcgaaatcatctgacacaattcagtcctcactttaaatctggcagcctagctgttgacaatgcagatcctatattaaaaattccttttgcttctcttgcctccagattaactttggctgagctaaatcagatcctttaccgatgtgaatcagaagaaaaggaagatggtggagggtgctatgacataccaaactggtcagcccttaaatatgcaggtcttcaaggtttaatgtctgtattggcagaaataagaccaaagaatgacttggggcatcctttttgtaataatttgagatctggagattggatgattgactatgtcagtaaccggcttatttcacgatcaggaactattgctgaagttggtaaatggttgcaggctatgttcttctacctgaagcagatcccacgttaccttatcccatgttactttgatgctatattaattggtgcatataccactcttctggatacagcatggaagcagatgtcaagctttgttcagaatggttcaacctttgtgaaacacctttcattgggttcagttcaactgtgtggagtaggaaaattcccttccctgccaattctttcacctgccctaatggatgtaccttataggttaaatgagatcacaaaagaaaaggagcaatgttgtgtttctctagctgcaggcttacctcatttttcttctggtattttccgctgctggggaagggatacttttattgcacttagaggtatactgctgattactggacgctatgtagaagccaggaatattattttagcatttgcgggtaccctgaggcatggtctcattcctaatctactgggtgaagggatttatgccagatacaattgtcgggatgctgtgtggtggtggctgcagtgtatccaggattactgtaaaatggttccaaatggtctagacattctcaagtgcccagtttccagaatgtatcctacagatgattctgctcctttgcctgctggcacactggatcagccattgtttgaagtcatacaggaagcaatgcaaaaacacatgcagggcatacagttccgagaaaggaatgctggtccccagatagatcgaaacatgaaggacgaaggttttaatataactgcaggagttgatgaagaaacaggatttgtttatggaggaaatcgtttcaattgtggcacatggatggataaaatgggagaaagtgacagagctagaaacagaggaatcccagccacaccaagagatgggtctgctgtggaaattgtgggcctgagtaaatctgctgttcgctggttgctggaattatccaaaaaaaatattttcccttatcatgaagtcacagtaaaaagacatggaaaggctataaaggtctcatatgatgagtggaacagaaaaatacaagacaactttgaaaagctatttcatgtttccgaagacccttcagatttaaatgaaaagcatccaaatctggttcacaaacgtggcatatacaaagatagttatggagcttcaagtccttggtgtgactatcagctcaggcctaattttaccatagcaatggttgtggcccctgagctctttactacagaaaaagcagggaaagctttggagattgcagaaaaaaaattgcttggtccccttggcatgaaaactttagatccagatgatatggtttactgtggaatttatgacaatgcattagacaatgacaactacaatcttgctaaaggtttcaattatcaccaaggacctgagtggctgtggcctattgggtattttcttcgtgcaaaattatatttttccagattgatgggcccggagactactgcaaagactatagttttggttaaaaatgttctttcccgacattatgttcatcttgagagatccccttggaaaggacttccagaactgaccaatgagaatgcccagtactgtcctttcagctgtgaaacacaagcctggtcaattgctactattcttgagacactttatgatttatagtttattacagatattaagtatgcaattactgtattataggatgcaaggtcatcatatgtaaatgctatatgcacaggctcaagttgttttaaaaatctcatttattataatattgatgctcaattaggtaagattgtaaaagcattgattttttttaatgtacagaggtagatttcaatttgaatcagaaagaaatatcattaccaatgaaatgtgtttgagttcagtaagaattattcaaatgcctagaaatccatagtttggaaaataaaaatcatgtcatcttctatttgtacagaaatgaaaataaaatatgaaaataatgaaagaaatgaaaagatagcttttaattgtggtatatataatcttcagtaacaatacatactgaatacgctgtggttcattaatattaacaccacgtactatagtattcttagaatacagtgctcactgcatttaataaatatttaataaatgatgaatgatagaagtttccatctacaatatatgttcctaaatggagcacagatgttcaaactatgctttcattttttcactgatatattaatttttgtgtaatgaatgccaacagtatattttatatgatttacttatgtgaggaaacatgcaaagcattaggaaatttatttcctaaaaacagttttgtaaaattagtattgagttctattgagtattataagatagcttacattttcaaaatggaaattgtcggtcatatttctagaactttaaagaaaaaagaatgttatattagttttctaaaactcaactatctttagtcatgttcaaaaatctattgctagatcatagtagatactggttttctattaactcaaaacctacattgacaagtttaacattgagaagaatcttaacaaaaatatggatatgaattcagtagatatcttaaattcaataaaatcactggaagtttttcatgataacttattttaagatgccttaaaaatcttaaagtcacaaaaggaaaaaggtttttaacatttacatgagttaacattttttcatagaacttatttcctagatagaattttttactgttttttactgttttcttaagaaaacagttaaatcattatgcattcagttggaagaaagtagtggcaagaattctttcattgctatataatattcagtggctcatttatacctaataaaataatggtattttaaaataatgctactttcaaagtagcatttttttagttagtttacaggttacatacccaaaaccttaactatgactaagaaattaaagaagaaaaccagcaaactaaaacttctgggcagcaaaaatatataaatgcttcagatgtcaaatacccatgcttgaaagctcgtgtaatttactttaagattatctgcctgctcttcttcaaagctgaccttgctttagaaatagttttaactagcttagttttctggtttccaaaactaaaatagattaaatcctacaaatttaaggacagttgtgacagtaatctgaccactatctataaatacattggacattggtttccaaatctccctttctcttcagttccttccttgttcaatatatacccttctctaaactgtgcgggtaaaaggaatgactgtccttgagagaaccattagtttatcaaaggtttatgtagttttgttgctgtaccctaactttgatattcagggaggtaggaaaggtaacagaaaaccagcatatttaatcaaagcaagaagtaatcgctgacagttaaatgtgaccaaaaaaattaaaagttcacaatttttttaatgtagccatttggggttatctctagtaaggcagatacccacgttggtaaatttttaggatattgtgttgcactagaaaactaagtggttcatatttctaatgaggaagattaatgaaagaacattgttatattctgcgtggtatattttaaagtttaagaaggcatgttaaacattatttcctctatggtagttaaaatacagaattagatttttaacaggtgtcatttgactaaacgtttcggtagaatgcttcatacttgagtgatgctggataaggtattgtatttcaacaatggactatgccttggtttttcactaatcaaaatcaaaattactctttaacatgataaatgaatttaccagtttagtatgctgtggtattttaataagttttcaaagataattgggaaaacatgagactggtcatattgatgaatattgtaacatgtgaattgtgatccatttctgatatgtcttgaactactgtgtctagtaggcaaatgtcattgttacctctgtgtgttaagaaaataaaaatattttctaaaggtcg

SEQ ID NO: 122 - DNA, 1600 bp, human
ccggaagcccatccaccaatcctcacctctcacctctgtgtccgccctgctgggaaatattccaggctttggccaaggccagtgcagccccaggttcccgagcggcaggttgggtgcggaccatggcctctcacaagctgctggtgaccccccccaaggccctgctcaagcccctctccatccccaaccagctcctgctggggcctggtccttccaacctgcctcctcgcatcatggcagccggggggctgcagatgatcgggtccatgagcaaggatatgtaccagatcatggacgagatcaaggaaggcatccagtacgtgttccagaccaggaacccactcacactggtcatctctggctcgggacactgtgccctggaggccgccctggtcaatgtgctggagcctggggactccttcctggttggggccaatggcatttgggggcagcgagccgtggacatcggggagcgcataggagcccgagtgcacccgatgaccaaggaccctggaggccactacacactgcaggaggtggaggagggcctggcccagcacaagccagtgctgctgttcttaacccacggggagtcgtccaccggcgtgctgcagccccttgatggcttcggggaactctgccacaggtacaagtgcctgctcctggtggattcggtggcatccctgggcgggacccccctttacatggaccggcaaggcatcgacatcctgtactcgggctcccagaaggccctgaacgcccctccagggacctcgctcatctccttcagtgacaaggccaaaaagaagatgtactcccgcaagacgaagcccttctccttctacctggacatcaagtggctggccaacttctggggctgtgacgaccagcccaggatgtaccatcacacaatccccgtcatcagcctgtacagcctgagagagagcctggccctcattgcggaacagggcctggagaacagctggcgccagcaccgcgaggccgcggcgtatctgcatgggcgcctgcaggcactggggctgcagctcttcgtgaaggacccggcgctccggcttcccacagtcaccactgtggctgtacccgctggctatgactggagagacatcgtcagctacgtcatagaccacttcgacattgagatcatgggtggccttgggccctccacggggaaggtgctgcggatcggcctgctgggctgcaatgccacccgcgagaatgtggaccgcgtgacggaggccctgagggcggccctgcagcactgccccaagaagaagctgtgacctgcccactggcacacagctggcactggcacacacctgtcccatgcccaccctgagggatcaggagcaaacagaccctgcaaggtcctccaggcctggggacaggaaagccactgacccagcccgggaggcagaaccaggcagcctccctggccccaggcagcccttttccctccagtggcacctcctggaaacagtccacttgggcgcaaaacccagtgccttccaaatgagctgcagtccccaggccatgagcctcccgggaatgtttaataaagggcctggccacctctcctcac

SEQ ID NO: 123 - DNA, 2271 bp, human
gcacgcactggccccggcgcccacccgcacccctccccagagagcactgacacggctcccgggacctcggcaggatggaagagaagctgaagaaaaccaagatcatctttgtggtgggtgggcctggctcagggaagggcacccagtgtgagaagatcgtgcagaagtatggctacacccacctctccaccggggacctcctgcggtccgaggtcagctcaggctcggccaggggcaagaagctgtcggaaatcatggagaaggggcagctggttccactggagacagtgttggacatgctccgggatgccatggtggccaaagtcaatacttccaaaggcttcctgattgatggctacccgcgggaggtgcagcaaggagaagagtttgagcgacggattggacagcccacactgctgctgtatgtggacgcaggccctgagaccatgacccagcggctcttgaaacgtggagagaccagcgggcgtgtggacgacaatgaggagaccatcaaaaagcggctggagacctattacaaggccacagaacccgtcatcgccttctatgagaaacgtggcattgtgcgcaaggtcaacgctgagggctccgtggacagtgtcttctcccaggtctgcacccacctggacgccctaaagtagcaacgctggagccgcttccccagctcagagccccgccccaccccgtcctgattagaggtcctcctggcctgagcgcagcgcctccaccctgccctgctgagcacagacggaggaagccgcttatcctgttttcatggacagctgagcactaaaggaatttctaaggacatttggttttactgctttttctctgcttccagttggagttgattcatgtgcttgtgcctacctggccgcaagtccccagcccctcaaccctccgttcctcctcagcctccctttgccagccacccctcctctagctctggtgggaggcccggggcccttcctcgcacagggcatgcctggcctgaggacccggcgctgagtggcggggcccctgctccgaggggctcatgttcaggcagaaccggtcccagcctgggctcctctgcatcttgctctgtgccttggccctgacccccatcgctctgagcatatgttccatgcctgccttgccggggcctggactgcacaggcagcaaggtcatggtctgagtggggcttcctgggcagttggggcggcccacgccagctggcccagtgggtagtgaattggcttccttgacgcgagaggctctgagggtctgaaaagggcatctcaatggcatgggtgggtggggagtcagtcatgtcactgaaattgaatgggggaggcccaatgaggtggctcatgcctgtaatcccagcactttgggaagctgaggcaggaggatcacctgaggtcaggagttcgagagcagcctggccaacatggcaaaaccccttatttactaaaaatacaaaaacttagccgggcatggtggcatgtgcctgtattcccagctactcatgaggctgaggcaggagaatggcgtgaacccgggagtggagcttgcaatgagccaagattgcgccactgcactccagcctgggtgacagagcaagactccgtctcaaaaaaaaaaaaaaaaaaaaagaaattaattgggggagtcatggtcaggggtgagacctgaaggacctccccctgtgtggccctggacacagcccaccctctgtgagccgtttccaattctaaaacagactcaatgtccccctcacccccacctcaaggtcaggatgcgaacacactgagtgaggagtggacgctgtccattgccacggccatgagggctggagaccagaacagcatggcccgaagcgtgcggggccccggatgacttggggacaccccagaatcccctggggagaacccttcctgcgcgctttcattttttgacctcatcactgagaaaggctcaatttggtgctcacgtgtccttaacacctgatctggcccaagctgcgtgccctttaagccaagagagcctcttgtggaccccgcctgcccgaatgaaatccgaacagttggggctgttatggcaagtggggctggtttttcatttccattggttatttaaagtttcctttaaaataaacgattttaagttataaaaggtgaatctattgaaagaagaacatcaaagaaataaacaggagttcagcggagtagcagaagacaaggcatgtagggggagccattctgtcccag

SEQ ID NO: 124 - DNA, 3142 bp, human
cttacgcggtctgtgggagaccggagcgggagacagcggtgacaggagcagcggccgggagcccttagggaggcagacagagcctgcagccaatgccccaggagccctcggttccaaccaactgatgcccctgtgcccactggcccacgccatgcagccccagtccgttctgcacagcggctacttccacccactacttcgggcctggcagacagccaccaccaccctcaatgcctccaacctcatctaccccatctttgtcacggatgttcctgatgacatacagcctatcaccagcctcccaggagtggccaggtatggtgtgaagcggctggaagagatgctgaggcccttggtggaagagggcctacgctgtgtcttgatctttggcgtccccagcagagttcccaaggacgagcggggttccgcagctgactccgaggagtccccagctattgaggcaatccatctgttgaggaagaccttccccaacctcctggtggcctgtgatgtctgcctgtgtccctacacctcccatggtcactgcgggctcctgagtgaaaacggagcattccgggctgaggagagccgccagcggctggctgaggtggcattggcgtatgccaaggcaggatgtcaggtggtagccccgtcggacatgatggatggacgcgtggaagccatcaaagaggccctgatggcacatggacttggcaacagggtatcggtgatgagctacagtgccaaatttgcttcctgtttctatggccctttccgggatgcagctaagtcaagcccagcttttggggaccgccgctgctaccagctgccccctggagcacgaggcctggctctccgagctgtggaccgggatgtacgggaaggagctgacatgctcatggtgaagccgggaatgccctacctggacatcgtgcgggaggtaaaggacaagcaccctgacctccctctcgccgtgtaccacgtctctggagagtttgccatgctgtggcatggagcccaggccggggcatttgatctcaaggctgccgtactggaggccatgactgccttccgcagagcaggtgctgacatcatcatcacctactacacaccgcagctgctgcagtggctgaaggaggaatgatggagacagtgccaggcccaagaactagaactttaaaacgttcccggggcctcagacaagtgaaaaccaaagtaaatgctgcttttagaactgtgccctcatgccctcttcctgctcacatgctagcggggcccagcagccctgggtggttttgccagcatgctaactcttgtaactcgcagctgcatcctatgagctctcccaagcttccccgcccctcccctgggtcagccgtgaggcccacctttgccaccctcagctctttcctctggtgtggcttcagcttgaaagcaacctggagtcgggggcacagcctttggggcctggctgggagagggtcttggagcattaggggaagaagagagcagtgggatcttggggcctgagaagccttggaacgcttctggcagcagagctgggtgtgggaatgaggcctagatcgatatccctgggttagagttgaaatttgccgcaattccactggaaggcatttcccacgaggccagaggttgccaggctgcctgaggtctcctattctactctgaaccataaacccagagaagaattactcattaaccagcataaatactgcctgaggatcaaaactcagaggcaaagagggagttcctgactgctagaggtgccaccaccacaaacactttttattcaggagatactttttgagaatctctgctctgttcctaggttcagtgctgggtcctgggaatacagcaggacagacctcagcttatctcttcatagaaattatacaaagagaattggggagacagctaagaagaaaacaaagaaataaagcagttacaaattgtgataagtgctttgaaggaaagaaggggtctgagacaacaacagggaaggggcctctcttgaaacagtagttgggaaggaggcagacatgcaccagtgatgtggtgacaggtgctctgaaggaggtcaccaggacctgacctctttgaaggatcagaaaatacttccctgaaggactgacatttgagcctagacctgaagggtgagccatcaagctaagacaattggggaagagcattccagggagagggaggagttgtgcaaaggccctggggctccttctagctggaggaatgcaaggctagcttgtctggagcactgagaggatggcctgaactgagtggagagagacagaccaggaccaaaccatgcagaggtcaagggccacattcaccttttcagagtgactcaatcaaatttgtagtttgtaaaagtattttaacagctctgcggcaaagtgcaaatgaaaagtcttgatggcatggactggagcggggacagtggggatggagaaaggggaatggattgtggatgtgtttagaaggtagattcgatgtgaaggatgaatctggcttgaccttctgggtggctgatgggccatttactgagatggggcagcctggaagaggaacagaagcagggtcggggtggagggagaatactaaacttagcttgagacattttgcaataaggaagctatatctagagtgcttatgtgactcacctaaggccactcaacaagtttgtggcagaactggattagaactgcacagaaaacagccaagctgggatttgaacccatgtagtccaactccaaggcctctgcccctaaccactgtgccataccacctcccaataatcaacagcaaaattataggtctaacaatgttttatagacacccctccatttatgtgatgggtttgcatcctgataaacccatcataagttgaaaatatgatcataagttgaaaatatgatcataagtcaaaaatgtatttaatatacctaacctaccaaacatcatagcttagcctagcctgccttaaacatgctcagaacacttacattagcctacagtgggcaaaactatccaacacaaaatctatattgtaataaagttgtaaagaattttgaataaaaattcaatatttgaaaaaaaaaaaaaaaaa

SEQ ID NO: 125 - DNA, 1937 bp, human
cacctgtcattcgttcgtcctcagtgcagggcaacaggactttaggttcaagatggtgactgcagccatgctgctacagtgctgcccagtgcttgcccggggccccacaagcctcctaggcaaggtggttaagactcaccagttcctgtttggtattggacgctgtcccatcctggctacccaaggaccaaactgttctcaaatccaccttaaggcaacaaaggctggaggagattctccatcttgggcgaagggccactgtcccttcatgctgtcggaactccaggatgggaagagcaagattgtgcagaaggcagccccagaagtccaggaagatgtgaaggctttcaagacagatctgcctagctccctggtctcagtcagcctaaggaagccattttccggtccccaggagcaggagcagatctctgggaaggtcacacacctgattcagaacaatatgcctggaaactatgtcttcagttatgaccagtttttcagggacaagatcatggagaagaaacaggatcacacctaccgtgtgttcaagactgtgaaccgctgggctgatgcatatccctttgcccaacatttctttgaggcatctgtggcctcaaaggatgtgtccgtctggtgtagtaatgattacctgggcatgagccgacaccctcaggtcttgcaagccacacaggagaccctgcagcgtcatggtgctggagctggtggcacccgcaacatctcaggcaccagtaagtttcatgtggagcttgagcaggagctggctgagctgcaccagaaggactcagccctgctcttctcctcctgctttgttgccaatgactctactctcttcaccttggccaagatcctgccagggtgcgagatttactcagacgcaggcaaccatgcttccatgatccaaggtatccgtaacagtggagcagccaagtttgtcttcaggcacaatgaccctgaccacctaaagaaacttctagagaagtctaaccctaagatacccaaaattgtggcctttgagactgtccactccatggatggtgccatctgtcccctcgaggagttgtgtgatgtgtcccaccagtatggggccctgaccttcgtggatgaggtccatgctgtaggactgtatgggtcccggggcgctgggattggggagcgtgatggaattatgcataagattgacatcatctctggaactcttggcaaggcctttggctgtgtgggcggctacattgccagcacccgtgacttggtggacatggtgcgctcctatgctgcaggcttcatctttaccacttctctgccccccatggtgctctctggagctctagaatctgtgcggctgctcaagggagaggagggccaagccctgaggcgagcccaccagcgcaatgtcaagcacatgcgccagctactcatggacaggggccttcctgtcatcccctgccccagccacatcatccccatccgggtgggcaatgcagcactcaacagcaagctctgtgatctcctgctctccaagcatggcatctatgtgcaggccatcaactacccaactgtcccccggggtgaagagctcctgcgcttggcaccctccccccaccacagccctcagatgatggaagattttgtggagaagctgctgctggcttggactgcggtggggctgcccctccaggatgtgtctgtggctgcctgcaatttctgtcgccgtcctgtacactttgagctcatgagtgagtgggaacgttcctacttcgggaacatggggccccagtatgtcaccacctatgcctgagaagccagctgcctaggattcacaccccacctgcgcttcacttgggtccaggcctactcctgtcttctgctttgttgtgtgcctctagctgaattgagcctaaaaataaagcacaaaccac

SEQ ID NO: 126 - DNA, 2445 bp, human
acctcgttcatctccttcacctccgaaatgatctcgcttttgggtttacggccggtctcttcacctggagcatcagccgggaaggtcagggtcgccctggctcgggcctgttcacattggggtcaaaggcacacattgggggctcaaccaaggcgagctgcgttcgcggggccgggtctttccgcacaggcggagggcggtggcgggcgcggaggcgtcgcgcgagccagggggcagccacgggccgggggtacctagcgccacccgcttcgcttgcatcagctgcgcgccccatcccgaggaatggtagaggcagccccgcccccggcccgcccccgcctttccattggctgccgcgcggggcggggagcggggtcggctcagtggccctgagaccctagctctgctctcggtccgctcgctgtccgctagcccgctgcgatgttgcgcgctgccgcccgcttcgggccccgcctgggccgccgcctcttgtcagccgccgccacccaggccgtgcctgcccccaaccagcagcccgaggtcttctgcaaccagattttcataaacaatgaatggcacgatgccgtcagcaggaaaacattccccaccgtcaatccgtccactggagaggtcatctgtcaggtagctgaaggggacaaggaagatgtggacaaggcagtgaaggccgcccgggccgccttccagctgggctcaccttggcgccgcatggacgcatcacacaggggccggctgctgaaccgcctggccgatctgatcgagcgggaccggacctacctggcggccttggagaccctggacaatggcaagccctatgtcatctcctacctggtggatttggacatggtcctcaaatgtctccggtattatgccggctgggctgataagtaccacgggaaaaccatccccattgacggagacttcttcagctacacacgccatgaacctgtgggggtgtgcgggcagatcattccgtggaatttcccgctcctgatgcaagcatggaagctgggcccagccttggcaactggaaacgtggttgtgatgaaggtagctgagcagacacccctcaccgccctctatgtggccaacctgatcaaggaggctggctttccccctggtgtggtcaacattgtgcctggatttggccccacggctggggccgccattgcctcccatgaggatgtggacaaagtggcattcacaggctccactgagattggccgcgtaatccaggttgctgctgggagcagcaacctcaagagagtgaccttggagctgggggggaagagccccaacatcatcatgtcagatgccgatatggattgggccgtggaacaggcccacttcgccctgttcttcaaccagggccagtgctgctgtgccggctcccggaccttcgtgcaggaggacatctatgatgagtttgtggagcggagcgttgcccgggccaagtctcgggtggtcgggaacccctttgatagcaagaccgagcaggggccgcaggtggatgaaactcagtttaagaagatcctcggctacatcaacacggggaagcaagagggggcgaagctgctgtgtggtgggggcattgctgctgaccgtggttacttcatccagcccactgtgtttggagatgtgcaggatggcatgaccatcgccaaggaggagatcttcgggccagtgatgcagatcctgaagttcaagaccatagaggaggttgttgggagagccaacaattccacgtacgggctggccgcagctgtcttcacaaaggatttggacaaggccaattacctgtcccaggccctccaggcgggcactgtgtgggtcaactgctatgatgtgtttggagcccagtcaccctttggtggctacaagatgtcggggagtggccgggagttgggcgagtacgggctgcaggcatacactgaagtgaaaactgtcacagtcaaagtgcctcagaagaactcataagaatcatgcaagcttcctccctcagccattgatggaaagttcagcaagatcagcaacaaaaccaagaaaaatgatccttgcgtgctgaatatctgaaaagagaaatttttcctacaaaatctcttgggtcaagaaagttctagaatttgaattgataaacatggtgggttggctgagggtaagagtatatgaggaaccttttaaacgacaacaatactgctagctttcaggatgatttttaaaaaatagattcaaatgtgttatcctctctctgaaacgcttcctataactcgagtttataggggaagaaaaagctattgtttacaattatatcaccattaaggcaactgctacaccctgctttgtattctgggctaagattcattaaaaactagctgctcttaaaaaaaaaaaaaaaaaaaaaaaaaaaaaaaaaaaaaaaaaaaaaaa

SEQ ID NO: 127 - DNA, 2790 bp, human
gcagagcgggacagccaggaggaagggcagcttggcagagcctcaggatggacccccttggggacacgctgcggcgactgcgggaggccttccacgcggggcgcacgcggccagctgagttccgggctgcgcagctccaaggcctgggccgcttcctgcaagaaaacaagcagcttctgcacgacgcactggcccaggacctgcacaagtcagccttcgagtcggaggtgtctgaggttgccatcagccagggcgaggtcaccctggccctcaggaacctccgggcctggatgaaggacgagcgtgtgcccaagaacctggccacgcagctggactccgccttcatccggaaggagccctttggcctggtcctcatcattgcgccctggaactatccgctgaacctgacgctggtgcccctcgtgggagccctcgctgcagggaactgtgtggtgctgaagccatcggagattagcaagaacgtcgagaagatcctggccgaggtgctgccccaatacgtggaccagagctgctttgctgtggtgctgggcgggccccaggagacggggcagctgctagagcacaggttcgactacatcttcttcacagggagccctcgtgtgggcaagattgttatgactgctgccgccaagcacctgacacctgtcaccctggagctggggggcaagaacccttgctacgtggacgacaactgcgacccccagaccgtggccaaccgcgtggcctggttccgctacttcaacgccggccagacctgcgtggcccccgactacgtcctatgcagccctgagatgcaggagaggctgctgcctgccctgcagagcaccatcacccgtttctatggcgacgacccccagagctccccaaacctgggccgcatcatcaaccagaaacagttccagcggctgcgggcattgctgggctgcggccgtgtggccattgggggccagagcgatgagagcgatcgctacatcgcccccacggtgctggtggatgtgcaggagatggagcctgtgatgcaggaggagatcttcgggcccatcctgcccatcgtgaacgtgcagagcttggacgaggccatcgagttcatcaaccggcgggagaagcccctggccctgtacgccttctccaacagcagccaggtggtcaagcgggtgctgacccagaccagcagcgggggcttctgtgggaacgacggcttcatgcacatgaccctggccagcctgccttttggaggagtgggtgccagtgggatgggccggtaccatggcaagttctccttcgacaccttctcccaccatcgcgcctgcctcctgcgcagcccggggatggagaagctcaacgccctccgctacccgccgcaatcgccgcgccgcctgaggatgctgctggtggccatggaggcccaaggctgcagctgcacactgctctgagcccttccccaggcccaggctgtagaccaccatgacagctgtcgcctgcggctggtggagacggggcctgggctcccgggcccgaggaggaaaaggattgccaaggctccagggcacccctcaaagcagcgcctgcctcctccctcctgggtcttccctctccctgcctcagcctcctccctcagccgctcccaaccatgagagccgaggtgggaggcatgggaaacagtgcagtgactcaccccctgcccccgcaccaaccacccatattcaggagaagaggacagacacggcacctctgagtcacccctctcctgtggagcgggcgtccgaggggcctggcgatctgactcaggccacaccatggaatcactgcatccaaggccattcctgccctctctgagtctcagtttttccatttgttcagtggagagaattaaccattgatacctcctggctgggtgaggcggctcacacctgtaatcccagcactttgggaggccgaggcaggcggatcacctgaaatcaggagttcaagatcagcctggctaacatggcgaaaccccgtctctactaaaaatacaaaaattagcctggcgtggtggcgcatgcctgtaatcccagctactcaggaggctaaggcaggagaatcgcttgaacccgggaggtggaggttgccgtgagctgagattgcgtcactgaactccggcctgggtgacagaaggaggctctgccttaaaaaaaaaaaaaaaaaaaaaaacctcctgggactgttgcaaggatgaaatgaaggattgagggattgagggattgctgagctggagctccaggtgtcctatctttctcagtggggtggcacggagcggggccgcctccctcttctctccaggcaggtggggctgtggttatgcgatagggtctcccttccctccagcccatgccaggagcttgtaactctttatcctcatggtgcccactacgagtcatactcttccccatgctgctcatcctcctgggccccatccactcagccaaagcagaatgcagggtttcctgcctgacaacccttctcacctcccaagtcccacttttgaacaagctgatgattctgaaactggcccaatttcctaaaagcgggggtgcttgagaaacctacatttggacaatgagaggctgctcctgcggcctgcgggccacctcctcttccttggctcctgctttctttttagactatatcaacctacaactttagtcgggaagagggacaggggtggacctgagtttcgtctcctgtctctctggctgatgtcacctgaataaagccttcttccctggc

SEQ ID NO: 128 - DNA, 1416 bp, human
acgggctatttaaaggtacgcgccgcggccaaggccgcaccgtactgggcgggggtctggggagcgcagcagccatggcaagccgtctcctgctcaacaacggcgccaagatgcccatcctggggttgggtacctggaagtcccctccagggcaggtgactgaggccgtgaaggtggccattgacgtcgggtaccgccacatcgactgtgcccatgtgtaccagaatgagaatgaggtgggggtggccattcaggagaagctcagggagcaggtggtgaagcgtgaggagctcttcatcgtcagcaagctgtggtgcacgtaccatgagaagggcctggtgaaaggagcctgccagaagacactcagcgacctgaagctggactacctggacctctaccttattcactggccgactggctttaagcctgggaaggaatttttcccattggatgagtcgggcaatgtggttcccagtgacaccaacattctggacacgtgggcggccatggaagagctggtggatgaagggctggtgaaagctattggcatctccaacttcaaccatctccaggtggagatgatcttaaacaaacctggcttgaagtataagcctgcagttaaccagattgagtgccacccatatctcactcaggagaagttaatccagtactgccagtccaaaggcatcgtggtgaccgcctacagccccctcggctctcctgacaggccctgggccaagcccgaggacccttctctcctggaggatcccaggatcaaggcgatcgcagccaagcacaataaaactacagcccaggtcctgatccggttccccatgcagaggaacttggtggtgatccccaagtctgtgacaccagaacgcattgctgagaactttaaggtctttgactttgaactgagcagccaggatatgaccaccttactcagctacaacaggaactggagggtctgtgccttgttgagctgtacctcccacaaggattaccccttccatgaagagttttgaagctgtggttgcctgctcgtccccaagtgacctatacctgtgtttcttgcctcatttttttccttgcaaatgtagtatggcctgtgtcactcagcagtgggacagcaacctgtagagtggccagcgagggcgtgtctagcttgatgttggatctcaagagccctgtcagtagagtagaagtctcttccagtttgctttgcccttctttctaccctgctggggaaagtacaacctgaatacccttttctgaccaaagagaagcaaaatctaccaggtcaaaatagtgccactaacggttgagttttgactgcttggaactggaatcctttcagcaagacttctctttgcctcaaataaaaagtgcttttgtgagaaaaaaaaaaaaaaaaaa

SEQ ID NO: 129 - DNA, 2580 bp, human
tcgggccccgcggccgcctttataaggcggcgggggtggtggcccgggccgcgttgcgctcccgccactccgcgcccgctatcctggctccgtgctcccacgcgcttgtgcctggacggaccctcgccagtgctctgcgcaggattggaacatcagttaacatctgaccactgccagcccaccccctcccacccacgtcgattgcatctctgggctccagggataaagcaggtcttggggtgcaccatgatttcaccattcttagtactggccattggcacctgccttactaactccttagtgccagagaaagagaaagaccccaagtactggcgagaccaagcgcaagagacactgaaatatgccctggagcttcagaagctcaacaccaacgtggctaagaatgtcatcatgttcctgggagatgggatgggtgtctccacagtgacggctgcccgcatcctcaagggtcagctccaccacaaccctggggaggagaccaggctggagatggacaagttccccttcgtggccctctccaagacgtacaacaccaatgcccaggtccctgacagcgccggcaccgccaccgcctacctgtgtggggtgaaggccaatgagggcaccgtgggggtaagcgcagccactgagcgttcccggtgcaacaccacccaggggaacgaggtcacctccatcctgcgctgggccaaggacgctgggaaatctgtgggcattgtgaccaccacgagagtgaaccatgccacccccagcgccgcctacgcccactcggctgaccgggactggtactcagacaacgagatgccccctgaggccttgagccagggctgtaaggacatcgcctaccagctcatgcataacatcagggacattgacgtgatcatggggggtggccggaaatacatgtaccccaagaataaaactgatgtggagtatgagagtgacgagaaagccaggggcacgaggctggacggcctggacctcgttgacacctggaagagcttcaaaccgagatacaagcactcccacttcatctggaaccgcacggaactcctgacccttgacccccacaatgtggactacctattgggtctcttcgagccaggggacatgcagtacgagctgaacaggaacaacgtgacggacccgtcactctccgagatggtggtggtggccatccagatcctgcggaagaaccccaaaggcttcttcttgctggtggaaggaggcagaattgaccacgggcaccatgaaggaaaagccaagcaggccctgcatgaggcggtggagatggaccgggccatcgggcaggcaggcagcttgacctcctcggaagacactctgaccgtggtcactgcggaccattcccacgtcttcacatttggtggatacaccccccgtggcaactctatctttggtctggcccccatgctgagtgacacagacaagaagcccttcactgccatcctgtatggcaatgggcctggctacaaggtggtgggcggtgaacgagagaatgtctccatggtggactatgctcacaacaactaccaggcgcagtctcctgtgcccctgcgccacgagacccacggcggggaggacgtggccgtcttctccaagggccccatggcgcacctgctgcacggcgtccacgagcagaactacgtcccccacgtgatggcgtatgcagcctgcatcggggccaacctcggccactgtgctcctgccagctcggcaggcagccttgctgcaggccccctgctgctcgctctggccctctaccccctgagcgtcctgttctgagggcccagggcccgggcacccacaagcccgtgacagatgccaacttcccacacggcagcccccccctcaaggggcagggaggtgggggcctcctcagcctctgcaactgcaagaaaggggacccaggaaaccaaagtctgccgcccacctcgctcccctctggaatcttccccaagggccaaacccacttctggcctccagcctttgctccctccccgctgccctttggccaccagggtagatttctcttgggcaggcagagagtacagactgcagacattctcaaagcctcttatttttctagcgaacgtatttctccagacccagaggccctgaagcctccgtggaacattgtggatctgaccctcccagtctcatctcctgaccctcccactcccatctccttacctctggaaccccccaggccctacaatgctcatgtccctgtccccaggcgagccctccttcaggggagttgaggtctttctcctcaggacaaggccttgctcactcactcactccaagaccaccagggtcccaggaagccggtgcctgggtggccatcctacccagcgtgcccaggccgggaagagccacctggcagggctcacactcctgggctctgaacacacacgccagctcctctctgaagcgactctcctgtttggaacggcaaaaaaaaatttttttttctctttttggtggtggttaaaagggaacacaaaacatttaaataaaactttccaaatatttccgagg

SEQ ID NO: 130 - DNA, 2117 bp, human
tgcccacgcccccttcagatcctttgctccggagagagacctgtccgagcagaggcctggactacatctcccggcgtgcctggcagtgtggtggcctctgtgcgccgtctgcactcgttgcaggcgacgatgcagagggctgtaagtgtggtggcccgtctgggctttcgcctgcaggcattccccccggccttgtgtcgtccacttagttgcgcacaggaggtgctccgcaggacaccgctctatgacttccacctggcccacggcgggaaaatggtggcgtttgcgggttggagtctgccagtgcagtaccgggacagtcacactgactcgcacctgcacacacgccagcactgctcgctctttgacgtgtctcatatgctgcagaccaagatacttggtagtgaccgggtgaagctgatggagagtctagtggttggagacattgcagagctaagaccaaaccaggggacactgtcgctgtttaccaacgaggctggaggcatcttagatgacttgattgtaaccaatacttctgagggccacctgtatgtggtgtccaacgctggctgctgggagaaagatttggccctcatgcaggacaaggtcagggagcttcagaaccagggcagagatgtgggcctggaggtgttggataatgccctgctagctctgcaaggccccactgcagcccaggtactacaggccggcgtggcagatgacctgaggaaactgcccttcatgaccagtgctgtgatggaggtgtttggcgtgtctggctgccgcgtgacccgctgtggctacacaggagaggatggtgtggagatctcggtgccggtagcgggggcagttcacctggcaacagctattctgaaaaacccagaggtgaagctggcagggctggcagccagggacagcctgcgcctggaggcaggcctctgcctgtatgggaatgacattgatgaacacactacacctgtggagggcagcctcagttggacactggggaagcgccgccgagctgctatggacttccctggagccaaggtcattgttccccagctgaagggcagggtgcagcggaggcgtgtggggttgatgtgtgagggggcccccatgcgggcacacagtcccatcctgaacatggagggtaccaagattggtactgtgactagtggctgcccctccccctctctgaagaagaatgtggcgatgggttatgtgccctgcgagtacagtcgtccagggacaatgctgctggtagaggtgcggcggaagcagcagatggctgtagtcagcaagatgccctttgtgcccacaaactactataccctcaagtgaagctggctcagggtggggctgtcccttccaggagttttgcccctacaaggggttagtcaagaagctgaggcagaactcactgggggtgggcagttaaggtggaggctgattctaattgtctggttgaggggccacaccacctattccccccacctaactcatgccattccagcttccttcaggaccctgcttctgagtgacggaccagctcacacaatgtcttgtttcagtccatgatcccactgacctactcttgcctgctggagggtaatgagaagctttggttctgccatctctcccactctgccaggtgctggctgtggagcaaaggctcacctttgtggagaggataaaacctgcccaacctacctcaccatggtttttcacattgcaaagggtaataacatgggcagtgcggacttaggctaccccctccagtttgctttccgtaaatgcaaattgtccttactgcaagtcaggaatgattgctgactcacagtagggctgctatgcctgtgtgtaaacttggggatggctgagggaacatagactcactcttccacattcccaagttggtctagtgtgctgcccagtagcaaaccatggcagactcaccacctattctgagttccagggctgctgtagggcagggtgggcttcctcccagacttgccttaccctgggctgatctttgcccctggtatgcattaatggactccactgaatcctgaaaaaaaaattaaacttccttcttacttgccaaaaaaaaaaaaaaa

SEQ ID NO: 131 - DNA, 1225 bp, human
ccgcagcgccggagtcaaacggttcccggcccagtcccgtcctgcagcagtctgcctcctctttcaacatgacagatgccgctgtgtccttcgccaaggacttcctggcaggtggagtggccgcagccatctccaagacggcggtagcgcccatcgagcgggtcaagctgctgctgcaggtgcagcatgccagcaagcagatcactgcagataagcaatacaaaggcattatagactgcgtggtccgtattcccaaggagcagggagttctgtccttctggcgcggtaacctggccaatgtcatcagatacttccccacccaggctcttaacttcgccttcaaagataaatacaagcagatcttcctgggtggtgtggacaagagaacccagttttggcgctactttgcagggaatctggcatcgggtggtgccgcaggggccacatccctgtgttttgtgtaccctcttgattttgcccgtacccgtctagcagctgatgtgggtaaagctggagctgaaagggaattccgaggcctcggtgactgcctggttaagatctacaaatctgatgggattaagggcctgtaccaaggctttaacgtgtctgtgcagggtattatcatctaccgagccgcctacttcggtatctatgacactgcaaagggaatgcttccggatcccaagaacactcacatcgtcatcagctggatgatcgcacagactgtcactgctgttgccgggttgacttcctatccatttgacaccgttcgccgccgcatgatgatgcagtcagggcgcaaaggaactgacatcatgtacacaggcacgcttgactgctggcggaagattgctcgtgatgaaggaggcaaagcttttttcaagggtgcatggtccaatgttctcagaggcatgggtggtgcttttgtgcttgtcttgtatgatgaaatcaagaagtacacataagttatttcctaggatttttccccctgtgaacaggcatgttgtattctataacacaatcttgagcattcttgacagactcctggctgtcagtttctcagtggcaactactttactggttgaaaatgggaagcaataatattcatctgaccagttttcctctaaagccatttccatgatgatgatgatgggactcaattgtattttttatttcagtcactcctgataaataacaaatttggagaaataaaaatatctaaaat

SEQ ID NO: 132 - DNA, 10386 bp, human
  misc_feature 9521: n = A,T,C or G
attgaggactcggaaatgaggtccaagggtagccaaggatggctgcagcttcatatgatcagttgttaaagcaagttgaggcactgaagatggagaactcaaatcttcgacaagagctagaagataattccaatcatcttacaaaactggaaactgaggcatctaatatgaaggaagtacttaaacaactacaaggaagtattgaagatgaagctatggcttcttctggacagattgatttattagagcgtcttaaagagcttaacttagatagcagtaatttccctggagtaaaactgcggtcaaaaatgtccctccgttcttatggaagccgggaaggatctgtatcaagccgttctggagagtgcagtcctgttcctatgggttcatttccaagaagagggtttgtaaatggaagcagagaaagtactggatatttagaagaacttgagaaagagaggtcattgcttcttgctgatcttgacaaagaagaaaaggaaaaagactggtattacgctcaacttcagaatctcactaaaagaatagatagtcttcctttaactgaaaatttttccttacaaacagatatgaccagaaggcaattggaatatgaagcaaggcaaatcagagttgcgatggaagaacaactaggtacctgccaggatatggaaaaacgagcacagcgaagaatagccagaattcagcaaatcgaaaaggacatacttcgtatacgacagcttttacagtcccaagcaacagaagcagagaggtcatctcagaacaagcatgaaaccggctcacatgatgctgagcggcagaatgaaggtcaaggagtgggagaaatcaacatggcaacttctggtaatggtcagggttcaactacacgaatggaccatgaaacagccagtgttttgagttctagtagcacacactctgcacctcgaaggctgacaagtcatctgggaaccaaggtggaaatggtgtattcattgttgtcaatgcttggtactcatgataaggatgatatgtcgcgaactttgctagctatgtctagctcccaagacagctgtatatccatgcgacagtctggatgtcttcctctcctcatccagcttttacatggcaatgacaaagactctgtattgttgggaaattcccggggcagtaaagaggctcgggccagggccagtgcagcactccacaacatcattcactcacagcctgatgacaagagaggcaggcgtgaaatccgagtccttcatcttttggaacagatacgcgcttactgtgaaacctgttgggagtggcaggaagctcatgaaccaggcatggaccaggacaaaaatccaatgccagctcctgttgaacatcagatctgtcctgctgtgtgtgttctaatgaaactttcatttgatgaagagcatagacatgcaatgaatgaactagggggactacaggccattgcagaattattgcaagtggactgtgaaatgtacgggcttactaatgaccactacagtattacactaagacgatatgctggaatggctttgacaaacttgacttttggagatgtagccaacaaggctacgctatgctctatgaaaggctgcatgagagcacttgtggcccaactaaaatctgaaagtgaagacttacagcaggttattgcaagtgttttgaggaatttgtcttggcgagcagatgtaaatagtaaaaagacgttgcgagaagttggaagtgtgaaagcattgatggaatgtgctttagaagttaaaaaggaatcaaccctcaaaagcgtattgagtgccttatggaatttgtcagcacattgcactgagaataaagctgatatatgtgctgtagatggtgcacttgcatttttggttggcactcttacttaccggagccagacaaacactttagccattattgaaagtggaggtgggatattacggaatgtgtccagcttgatagctacaaatgaggaccacaggcaaatcctaagagagaacaactgtctacaaactttattacaacacttaaaatctcatagtttgacaatagtcagtaatgcatgtggaactttgtggaatctctcagcaagaaatcctaaagaccaggaagcattatgggacatgggggcagttagcatgctcaagaacctcattcattcaaagcacaaaatgattgctatgggaagtgctgcagctttaaggaatctcatggcaaataggcctgcgaagtacaaggatgccaatattatgtctcctggctcaagcttgccatctcttcatgttaggaaacaaaaagccctagaagcagaattagatgctcagcacttatcagaaacttttgacaatatagacaatttaagtcccaaggcatctcatcgtagtaagcagagacacaagcaaagtctctatggtgattatgtttttgacaccaatcgacatgatgataataggtcagacaattttaatactggcaacatgactgtcctttcaccatatttgaatactacagtgttacccagctcctcttcatcaagaggaagcttagatagttctcgttctgaaaaagatagaagtttggagagagaacgcggaattggtctaggcaactaccatccagcaacagaaaatccaggaacttcttcaaagcgaggtttgcagatctccaccactgcagcccagattgccaaagtcatggaagaagtgtcagccattcatacctctcaggaagacagaagttctgggtctaccactgaattacattgtgtgacagatgagagaaatgcacttagaagaagctctgctgcccatacacattcaaacacttacaatttcactaagtcggaaaattcaaataggacatgttctatgccttatgccaaattagaatacaagagatcttcaaatgatagtttaaatagtgtcagtagtagtgatggttatggtaaaagaggtcaaatgaaaccctcgattgaatcctattctgaagatgatgaaagtaagttttgcagttatggtcaatacccagccgacctagcccataaaatacatagtgcaaatcatatggatgataatgatggagaactagatacaccaataaattatagtcttaaatattcagatgagcagttgaactctggaaggcaaagtccttcacagaatgaaagatgggcaagacccaaacacataatagaagatgaaataaaacaaagtgagcaaagacaatcaaggaatcaaagtacaacttatcctgtttatactgagagcactgatgataaacacctcaagttccaaccacattttggacagcaggaatgtgtttctccatacaggtcacggggagccaatggttcagaaacaaatcgagtgggttctaatcatggaattaatcaaaatgtaagccagtctttgtgtcaagaagatgactatgaagatgataagcctaccaattatagtgaacgttactctgaagaagaacagcatgaagaagaagagagaccaacaaattatagcataaaatataatgaagagaaacgtcatgtggatcagcctattgattatagtttaaaatatgccacagatattccttcatcacagaaacagtcattttcattctcaaagagttcatctggacaaagcagtaaaaccgaacatatgtcttcaagcagtgagaatacgtccacaccttcatctaatgccaagaggcagaatcagctccatccaagttctgcacagagtagaagtggtcagcctcaaaaggctgccacttgcaaagtttcttctattaaccaagaaacaatacagacttattgtgtagaagatactccaatatgtttttcaagatgtagttcattatcatctttgtcatcagctgaagatgaaataggatgtaatcagacgacacaggaagcagattctgctaataccctgcaaatagcagaaataaaagaaaagattggaactaggtcagctgaagatcctgtgagcgaagttccagcagtgtcacagcaccctagaaccaaatccagcagactgcagggttctagtttatcttcagaatcagccaggcacaaagctgttgaattttcttcaggagcgaaatctccctccaaaagtggtgctcagacacccaaaagtccacctgaacactatgttcaggagaccccactcatgtttagcagatgtacttctgtcagttcacttgatagttttgagagtcgttcgattgccagctccgttcagagtgaaccatgcagtggaatggtaagtggcattataagccccagtgatcttccagatagccctggacaaaccatgccaccaagcagaagtaaaacacctccaccacctcctcaaacagctcaaaccaagcgagaagtacctaaaaataaagcacctactgctgaaaagagagagagtggacctaagcaagctgcagtaaatgctgcagttcagagggtccaggttcttccagatgctgatactttattacattttgccacggaaagtactccagatggattttcttgttcatccagcctgagtgctctgagcctcgatgagccatttatacagaaagatgtggaattaagaataatgcctccagttcaggaaaatgacaatgggaatgaaacagaatcagagcagcctaaagaatcaaatgaaaaccaagagaaagaggcagaaaaaactattgattctgaaaaggacctattagatgattcagatgatgatgatattgaaatactagaagaatgtattatttctgccatgccaacaaagtcatcacgtaaagcaaaaaagccagcccagactgcttcaaaattacctccacctgtggcaaggaaaccaagtcagctgcctgtgtacaaacttctaccatcacaaaacaggttgcaaccccaaaagcatgttagttttacaccgggggatgatatgccacgggtgtattgtgttgaagggacacctataaacttttccacagctacatctctaagtgatctaacaatcgaatcccctccaaatgagttagctgctggagaaggagttagaggaggagcacagtcaggtgaatttgaaaaacgagataccattcctacagaaggcagaagtacagatgaggctcaaggaggaaaaacctcatctgtaaccatacctgaattggatgacaataaagcagaggaaggtgatattcttgcagaatgcattaattctgctatgcccaaagggaaaagtcacaagcctttccgtgtgaaaaagataatggaccaggtccagcaagcatctgcgtcgtcttctgcacccaacaaaaatcagttagatggtaagaaaaagaaaccaacttcaccagtaaaacctataccacaaaatactgaatataggacacgtgtaagaaaaaatgcagactcaaaaaataatttaaatgctgagagagttttctcagacaacaaagattcaaagaaacagaatttgaaaaataattccaaggacttcaatgataagctcccaaataatgaagatagagtcagaggaagttttgcttttgattcacctcatcattacacgcctattgaaggaactccttactgtttttcacgaaatgattctttgagttctctagattttgatgatgatgatgttgacctttccagggaaaaggctgaattaagaaaggcaaaagaaaataaggaatcagaggctaaagttaccagccacacagaactaacctccaaccaacaatcagctaataagacacaagctattgcaaagcagccaataaatcgaggtcagcctaaacccatacttcagaaacaatccacttttccccagtcatccaaagacataccagacagaggggcagcaactgatgaaaagttacagaattttgctattgaaaatactccagtttgcttttctcataattcctctctgagttctctcagtgacattgaccaagaaaacaacaataaagaaaatgaacctatcaaagagactgagccccctgactcacagggagaaccaagtaaacctcaagcatcaggctatgctcctaaatcatttcatgttgaagataccccagtttgtttctcaagaaacagttctctcagttctcttagtattgactctgaagatgacctgttgcaggaatgtataagctccgcaatgccaaaaaagaaaaagccttcaagactcaagggtgataatgaaaaacatagtcccagaaatatgggtggcatattaggtgaagatctgacacttgatttgaaagatatacagagaccagattcagaacatggtctatcccctgattcagaaaattttgattggaaagctattcaggaaggtgcaaattccatagtaagtagtttacatcaagctgctgctgctgcatgtttatctagacaagcttcgtctgattcagattccatcctttccctgaaatcaggaatctctctgggatcaccatttcatcttacacctgatcaagaagaaaaaccctttacaagtaataaaggcccacgaattctaaaaccaggggagaaaagtacattggaaactaaaaagatagaatctgaaagtaaaggaatcaaaggaggaaaaaaagtttataaaagtttgattactggaaaagttcgatctaattcagaaatttcaggccaaatgaaacagccccttcaagcaaacatgccttcaatctctcgaggcaggacaatgattcatattccaggagttcgaaatagctcctcaagtacaagtcctgtttctaaaaaaggcccaccccttaagactccagcctccaaaagccctagtgaaggtcaaacagccaccacttctcctagaggagccaagccatctgtgaaatcagaattaagccctgttgccaggcagacatcccaaataggtgggtcaagtaaagcaccttctagatcaggatctagagattcgaccccttcaagacctgcccagcaaccattaagtagacctatacagtctcctggccgaaactcaatttcccctggtagaaatggaataagtcctcctaacaaattatctcaacttccaaggacatcatcccctagtactgcttcaactaagtcctcaggttctggaaaaatgtcatatacatctccaggtagacagatgagccaacagaaccttaccaaacaaacaggtttatccaagaatgccagtagtattccaagaagtgagtctgcctccaaaggactaaatcagatgaataatggtaatggagccaataaaaaggtagaactttctagaatgtcttcaactaaatcaagtggaagtgaatctgatagatcagaaagacctgtattagtacgccagtcaactttcatcaaagaagctccaagcccaaccttaagaagaaaattggaggaatctgcttcatttgaatctctttctccatcatctagaccagcttctcccactaggtcccaggcacaaactccagttttaagtccttcccttcctgatatgtctctatccacacattcgtctgttcaggctggtggatggcgaaaactcccacctaatctcagtcccactatagagtataatgatggaagaccagcaaagcgccatgatattgcacggtctcattctgaaagtccttctagacttccaatcaataggtcaggaacctggaaacgtgagcacagcaaacattcatcatcccttcctcgagtaagcacttggagaagaactggaagttcatcttcaattctttctgcttcatcagaatccagtgaaaaagcaaaaagtgaggatgaaaaacatgtgaactctatttcaggaaccaaacaaagtaaagaaaaccaagtatccgcaaaaggaacatggagaaaaataaaagaaaatgaattttctcccacaaatagtacttctcagaccgtttcctcaggtgctacaaatggtgctgaatcaaagactctaatttatcaaatggcacctgctgtttctaaaacagaggatgtttgggtgagaattgaggactgtcccattaacaatcctagatctggaagatctcccacaggtaatactcccccggtgattgacagtgtttcagaaaaggcaaatccaaacattaaagattcaaaagataatcaggcaaaacaaaatgtgggtaatggcagtgttcccatgcgtaccgtgggtttggaaaatcgcctgaactcctttattcaggtggatgcccctgaccaaaaaggaactgagataaaaccaggacaaaataatcctgtccctgtatcagagactaatgaaagttctatagtggaacgtaccccattcagttctagcagctcaagcaaacacagttcacctagtgggactgttgctgccagagtgactccttttaattacaacccaagccctaggaaaagcagcgcagatagcacttcagctcggccatctcagatcccaactccagtgaataacaacacaaagaagcgagattccaaaactgacagcacagaatccagtggaacccaaagtcctaagcgccattctgggtcttaccttgtgacatctgtttaaaagagaggaagaatgaaactaagaaaattctatgttaattacaactgctatatagacattttgtttcaaatgaaactttaaaagactgaaaaattttgtaaataggtttgattcttgttagagggtttttgttctggaagccatatttgatagtatactttgtcttcactggtcttattttgggaggcactcttgatggttaggaaaaaaatagtaaagccaagtatgtttgtacagtatgttttacatgtatttaaagtagcatcccatcccaacttcctttaattattgcttgtcttaaaataatgaacactacagatagaaaatatgatatattgctgttatcaatcatttctagattataaactgactaaacttacatcagggaaaaattggtatttatgcaaaaaaaaatgtttttgtccttgtgagtccatctaacatcataattaatcatgtggctgtgaaattcacagtaatatggttcccgatgaacaagctttacccagcctgtttgctttactgcatgaatgaaactgatggttcaatttcagaagtaatgattaacagttatgtggtcacatgatgtgcatagagatagctacagtgtaataatttacactattttgtgctccaaacaaaacaaaaatctgtgtaactgtaaaacattgaatgaaactattttacctgaactagattttatctgaaagtaggtagaatttttgctatgctgtaatttgttgtatattctggtatttgaggtgagatggctgctcttttattaatgagacatgaattgtgtctcaacagaaactaaatgaacatttcagaataaattattgctgtatgtaaactgttactgaaattggtatttgtttgaagggtcttgtttcacatttgtattaataattgtttaaaatgcctcttttaaaagcttatataaattttttncttcagcttctatgcattaagagtaaaattcctcttactgtaataaaaacaattgaagaagactgttgccacttaaccattccatgcgttggcacttatctattcctgaaattcttttatgtgattagctcatcttgatttttaacatttttccacttaaacttttttttcttactccactggagctcagtaaaagtaaattcatgtaatagcaatgcaagcagcctagcacagactaagcattgagcataataggcccacataatttcctctttcttaatattatagaaattctgtacttgaaattgattcttagacattgcagtctcttcgaggctttacagtgtaaactgtcttgccccttcatcttcttgttgcaactgggtctgacatgaacactttttatcaccctgtatgttagggcaagatctcagcagtgaagtataatcagcactttgccatgctcagaaaattcaaatcacatggaactttagaggtagatttaatacgattaagatattcagaagtatattttagaatccctgcctgttaaggaaactttatttgtggtaggtacagttctggggtacatgttaagtgtccccttatacagtggagggaagtcttccttcctgaaggaaaataaactgacacttattaactaagataatttacttaatatatcttccctgatttgttttaaaagatcagagggtgactgatgatacatgcatacatatttgttgaataaatgaaaatttatttttagtgataagattcatacactctgtatttggggagagaaaacctttttaagcatggtggggcactcagataggagtgaatacacctacctggtggtcat

SEQ ID NO: 133 - DNA, 3753 bp, human
ggatggggcggcgggcttcgggagcgcccgggctgatccgagccgagcgggccgtatctccttgtcggcgccgctgattcccggctctgcggaggcctctaggcagccgcgcagcttccgtgtttgctgcgcccgcactgcgatttacaaccctgaagaatctccctatccctattttgtccccctgcagtaataaatcccattatggagatctcgaaactttataaagggatatagtttgaattctatggagtgtaattttgtgtatgaattatatttttaaaacattgaagagttttcagaaagaaggctagtagagttgattactgatactttatgctaagcagtacttttttggtagtacaatattttgttaggcgtttctgataacactagaaaggacaagttttatcttgtgataaattgattaatgtttacaacatgactgataattatagctgaatagtccttaaatgatgaacaggttatttagtttttaaatgcagtgtaaaaagtgtgctgtggaaattttatggctaactaagtttatggagaaaataccttcagttgatcaagaataatagtggtatacaaagttaggaagaaagtcaacatgatgctgcaggaaatggaaacaaatacaaatgatatttaacaaagatagagtttacagtttttgaactttaagccaaattcatttgacatcaagcactatagcaggcacaggttcaacaaagcttgtgggtattgacttcccccaaaagttgtcagctgaagtaatttagcccacttaagtaaatactatgatgataagctgtgtgaacttagcttttaaatagtgtgaccatatgaaggttttaattacttttgtttattggaataaaatgagattttttgggttgtcatgttaaagtgcttatagggaaagaagcctgcatataattttttaccttgtggcataatcagtaattggtctgttattcaggcttcatagcttgtaaccaaatataaataaaaggcataatttaggtattctatagttgcttagaattttgttaatataaatctctgtgaaaaatcaaggagttttaatattttcagaagtgcatccacctttcagggctttaagttagtattactcaagattatgaacaaatagcacttaggttacctgaaagagttactacaaccccaaagagttgtgttctaagtagtatcttggtaattcagagagatactcatcctacctgaatataaactgagataaatccagtaaagaaagtgtagtaaattctacataagagtctatcattgatttctttttgtggtaaaaatcttagttcatgtgaagaaatttcatgtgaatgttttagctatcaaacagtactgtcacctactcatgcacaaaactgcctcccaaagacttttcccaggtccctcgtatcaaaacattaagagtataatggaagatagcacgatcttgtcagattggacaaacagcaacaaacaaaaaatgaagtatgacttttcctgtgaactctacagaatgtctacatattcaactttccccgccggggtgcctgtctcagaaaggagtcttgctcgtgctggtttttattatactggtgtgaatgacaaggtcaaatgcttctgttgtggcctgatgctggataactggaaactaggagacagtcctattcaaaagcataaacagctatatcctagctgtagctttattcagaatctggtttcagctagtctgggatccacctctaagaatacgtctccaatgagaaacagttttgcacattcattatctcccaccttggaacatagtagcttgttcagtggttcttactccagcctttctccaaaccctcttaattctagagcagttgaagacatctcttcatcgaggactaacccctacagttatgcaatgagtactgaagaagccagatttcttacctaccatatgtggccattaacttttttgtcaccatcagaattggcaagagctggtttttattatataggacctggagatagggtagcctgctttgcctgtggtgggaagctcagtaactgggaaccaaaggatgatgctatgtcagaacaccggaggcattttcccaactgtccatttttggaaaattctctagaaactctgaggtttagcatttcaaatctgagcatgcagacacatgcagctcgaatgagaacatttatgtactggccatctagtgttccagttcagcctgagcagcttgcaagtgctggtttttattatgtgggtcgcaatgatgatgtcaaatgcttttgttgtgatggtggcttgaggtgttgggaatctggagatgatccatgggtagaacatgccaagtggtttccaaggtgtgagttcttgatacgaatgaaaggccaagagtttgttgatgagattcaaggtagatatcctcatcttcttgaacagctgttgtcaacttcagataccactggagaagaaaatgctgacccaccaattattcattttggacctggagaaagttcttcagaagatgctgtcatgatgaatacacctgtggttaaatctgccttggaaatgggctttaatagagacctggtgaaacaaacagttcaaagtaaaatcctgacaactggagagaactataaaacagttaatgatattgtgtcagcacttcttaatgctgaagatgaaaaaagagaagaggagaaggaaaaacaagctgaagaaatggcatcagatgatttgtcattaattcggaagaacagaatggctctctttcaacaattgacatgtgtgcttcctatcctggataatcttttaaaggccaatgtaattaataaacaggaacatgatattattaaacaaaaaacacagatacctttacaagcgagagaactgattgataccattttggttaaaggaaatgctgcggccaacatcttcaaaaactgtctaaaagaaattgactctacattgtataagaacttatttgtggataagaatatgaagtatattccaacagaagatgtttcaggtctgtcactggaagaacaattgaggaggttgcaagaagaacgaacttgtaaagtgtgtatggacaaagaagtttctgttgtatttattccttgtggtcatctggtagtatgccaggaatgtgccccttctctaagaaaatgccctatttgcaggggtataatcaagggtactgttcgtacatttctctcttaaagaaaaatagtctatattttaacctgcataaaaaggtctttaaaatattgttgaacacttgaagccatctaaagtaaaaagggaattatgagtttttcaattagtaacattcatgttctagtctgctttggtactaataatcttgtttctgaaaagatggtatcatatatttaatcttaatctgtttatttacaagggaagatttatgtttggtgaactatattagtatgtatgtgtacctaagggagtagtgtcactgcttgttatgcatcatttcaggagttactggatttgttgttctttcagaaagctttgaatactaaattatagtgtagaaaagaactggaaaccaggaactctggagttcatcagagttatggtgccgaattgtctttggtgcttttcacttgtgttttaaaataaggatttttctcttatttctccccctagtttgtgagaaacatctcaataaagtgctttaaaaagaaaaaaaaaaa

SEQ ID NO: 134 - DNA, 891 bp, human
gatcccagaggaggaagtccagagacagagcaccatgacttctgagaaaggtccttcaaccggtgaccccactctgaggagaagaatcgaaccctgggagtttgacgtcttctatgaccccagagaacttcgtaaagaggcctgtctgctctacgaaatcaagtggggcatgagccggaagatctggcgaagctcaggcaaaaacaccaccaatcacgtggaagttaattttataaaaaaatttacgtcagaaagagattttcacccatccatcagctgctccatcacctggttcttgtcctggagtccctgctgggaatgctcccaggctattagagagtttctgagtcggcaccctggtgtgactctagtgatctacgtagctcggcttttttggcacatggatcaacaaaatcggcaaggtctcagggaccttgttaacagtggagtaactattcagattatgagagcatcagagtattatcactgctggaggaattttgtcaactacccacctggggatgaagctcactggccacaatacccacctctgtggatgatgttgtacgcactggagctgcactgcataattctaagtcttccaccctgtttaaagatttcaagaagatggcaaaatcatcttacatttttcagacttcatcttcaaaactgccattaccaaacgattccgccacacatccttttagctacagggctgatacatccttctgtggcttggagatgaataggatgattccgtgtgtgtactgattcaagaacaagcaatgatgacccactaaagagtgaatgccatttagaatctagaaatgttcacaaggtaccccaaaactctgtagcttaaaccaacaataaatatgtattacctctggc

SEQ ID NO: 135 - DNA, 1682 bp, human
agctctcagagggaattgagcacccggcagcggtctcaggccaagccccctgccagcatggccagcgagttcaagaagaagctcttctggagggcagtggtggccgagttcctggccacgaccctctttgtcttcatcagcatcggttctgccctgggcttcaaatacccggtggggaacaaccagacggcggtccaggacaacgtgaaggtgtcgctggccttcgggctgagcatcgccacgctggcgcagagtgtgggccacatcagcggcgcccacctcaacccggctgtcacactggggctgctgctcagctgccagatcagcatcttccgtgccctcatgtacatcatcgcccagtgcgtgggggccatcgtcgccaccgccatcctctcaggcatcacctcctccctgactgggaactcgcttggccgcaatgacctggctgatggtgtgaactcgggccagggcctgggcatcgagatcatcgggaccctccagctggtgctatgcgtgctggctactaccgaccggaggcgccgtgaccttggtggctcagccccccttgccatcggcctctctgtagcccttggacacctcctggctattgactacactggctgtgggattaaccctgctcggtcctttggctccgcggtgatcacacacaacttcagcaaccactggattttctgggtggggccattcatcgggggagccctggctgtactcatctacgacttcatcctggccccacgcagcagtgacctcacagaccgcgtgaaggtgtggaccagcggccaggtggaggagtatgacctggatgccgacgacatcaactccagggtggagatgaagcccaaatagaaggggtctggcccgggcatccacgtagggggcaggggcaggggcgggcggagggaggggaggggtgaaatccatactgtagacactctgacaagctggccaaagtcacttccccaagatctgccagacctgcatggtcaagcctcttatgggggtgtttctatctctttctttctctttctgtttcctggcctcagagcttcctggggaccaagatttaccaattcacccactcccttgaagttgtggaggaggtgaaagaaagggacccacctgctagtcgcccctcagagcatgatgggaggtgtgccagaaagtcccccctcgccccaaagttgctcaccgactcacctgcgcaagtgcctgggattctaccgtaattgctttgtgcctttgggcacggccctccttcttttcctaacatgcaccttgctcccaatggtgcttggagggggaagagatcccaggaggtgcagtggagggggcaagctttgctccttcagttctgcttgctcccaagcccctgacccgctcggacttactgcctgaccttggaatcgtccctatatcagggcctgagtgacctccttctgcaaagtggcagggaccggcagagctctacaggcctgcagcccctaagtgcaaacacagcatgggtccagaagacgtggtctagaccagggctgctctttccacttgccctgtgttctttccccaggggcatgactgtcgccacacgcctctgcatatatgtctctttggagttggaatttcattatatgttaagaaaataaaggaaaatgacttgtaaggtc

SEQ ID NO: 136 - DNA, 1814 bp, human
gcaaaaccaacgcctggctcggagcagcagcctctgaggtgtccctggccagtgtccttccacctgtccacaagcatggggaacatcttcgccaacctcttcaagggcctttttggcaaaaaagaaatgcgcatcctcatggtgggcctggatgctgcagggaagaccacgatcctctacaagcttaagctgggtgagatcgtgaccaccattcccaccataggcttcaacgtggaaaccgtggagtacaagaacatcagcttcactgtgtgggacgtgggtggccaggacaagatccggcccctgtggcgccactacttccagaacacacaaggcctgatcttcgtggtggacagcaatgacagagagcgtgtgaacgaggcccgtgaggagctcatgaggatgctggccgaggacgagctccgggatgctgtcctcctggtgttcgccaacaagcaggacctccccaacgccatgaatgcggccgagatcacagacaagctggggctgcactcactacgccacaggaactggtacattcaggccacctgcgccaccagcggcgacgggctctatgaaggactggactggctgtccaatcagctccggaaccagaagtgaacgcgacccccctccctctcactcctcttgccctctgctttactctcatgtggcaaacgtgcggctcgtggtgtgagtgccagaagctgcctccgtggtttggtcaccgtgtgcatcgcaccgtgctgtaaatgtggcagacgcagcctgcggccaggctttttatttaatgtaaatagtttttgtttccaatgaggcagtttctggtactcctatgcaatattactcagctttttttattgtaaaaagaaaaatcaactcactgttcagtgctgagaggggatgtaggcccatgggcacctggcctccaggagtcgctgtgttgggagagccggccacgcccttggcttagagctgtgttgaaatccattttggtggttggttttaacccaaactcagtgcattttttaaaatagttaagaatccaagtcgagaacacttgaacacacagaagggagaccccgcctagcatagatttgcagttacggcctggatgccagtcgccagcccagctgttcccctcgggaacatgaggtggtggtggcgcagcagactgcgatcaattctgcatggtcacagtagagatccccgcaactcgcttgtccttgggtcaccctgcattccatagccatgtgcttgtccctgtgctcccacggttcccaggggccaggctgggagcccacagccaccccactatgccgcaggccgccctacccaccttcaggcagcctatgggacgcaggccccatctgtccctcggtccgcgtgtggccagagtggtccgtcgtccccaacactcgtgctcgctcagacactttggcaggatgtctggggcctcaccagcaggagcgcgtgcaagccgggcaggcggtccacctagacccacagcccctcgggagcaccccacctctgtgtgtgatgtagctttctctccctcagcctgcaagggtccgatttgccatcgaaaaagacaacctctacttttttcttttgtattttgataaacactgaagctggagctgttaaatttatcttggggaaacctcagaactggtctatttggtgtcgtaggaacctcttactgctttcaatacacgattagtaatcaactgttttgtatacttgttttcagttttcatttcgacaaacaagcactgtaattatagctattagaataaaatctcttaactatt

SEQ ID NO: 137 - DNA, 1912 bp, human
gggcggccgacgacgttcgtcatttagtgcgggagggatcctgaaccgcgcggccgaaccctccggtgtcccgacccaggctaagcttgagcatggctgagcaggagcccacagccgagcagctggcccagattgcagcggagaacgaggaggatgagcactcggtcaactacaagcccccggcccagaagagcatccaggagatccaggagctggacaaggacgacgagagcctgcgaaagtacaaggaggccctgctgggccgcgtggccgtttccgcagaccccaacgtccccaacgtcgtggtgactggcctgaccctggtgtgcagctcggccccgggccccctggagctggacctgacgggcgacctggagagcttcaagaagcagtcgtttgtgctgaaggagggtgtggagtaccggataaaaatctctttccgggttaaccgagagatagtgtccggcatgaagtacatccagcatacgtacaggaaaggcgtcaagattgacaagactgactacatggtaggcagctatgggccccgggccgaggagtacgagttcctgacccccgtggaggaggcacccaagggtatgctggcccggggcagctacagcatcaagtcccgcttcacagacgacgacaagaccgaccacctgtcctgggagtggaatctcaccatcaagaaggactggaaggactgagcccagccagaggcgggcagggcagactgacggacggacgacggacaggcggatgtgtcccccccagcccctcccctccccataccaaagtgctgacaggccctccgtgcccctcccaccctggtccgcctccctggcctggctcaaccgagtgcctccgacccccctcctcagccctcccccacccacaggcccagcctcctcggtctcctgtctcgttgctgcttctgcctgtgctgtgggggagagaggccgcagccaggcctctgctgccctttctgtgccccccaggttctatctccccgtcacacccgaggcctggcttcaggagggagcggagcagccattctccaggccccgtggttgcccctggacgtgtgcgtctgctgctccggggtggagctggggtgtgggatgcacggcctcgtgggggccgggccgtcctccagccccgctgctccctggccagcccccttgtcgctgtcggtcccgtctaaccatgatgccttaacatgtggagtgtaccgtggggcctcactagcctctaactccctgtgtctgcatgagcatgtggcctccccgtcccttccccggtggcgaacccagtgacccagggacacgtggggtgtgctgctgctgctccccagcccaccagtgcctggccagcctgcccccttccctggacagggctgtggagatggctccggcggcttggggaaagccaaattgccaaaactcaagtcacctcagtaccatccaggaggctgggtattgtcctgcctctgccttttctgtctcagcgggcagtgcccagagcccacacccccccaagagccctcgatggacagcctcacccaccccacctgggcccagccaggagccccgcctggccatcagtatttattgcctccgtccgtgccgtccctgggccactggcctggcgcctgttcccccaggctctcagtgccaccacccccggcaggccttccctgacccagccaggaacaaacaagggaccaagtgcacacattgctgagagccgtctcctgtgcctcccccgccccatccccggtcttcgtgttgtgtctgccaggctcaggcagaggcgcctgtccctgcttcttttctgaccgggaaataaatgcccctgaaggaaaaaaaaaaaaaaaaaaaaaaaaaaaaaaaaaaaaaaaaaaaaaaaaaaa

SEQ ID NO: 138 - DNA, 3891 bp, human
gcgcactctggggaaagcggagctgcaccccgccccgtattgctgctcagctcctcagctgtgcgtgcgagggacgtcgggggtggcgccgcagcagttgcccctggtaacgggggaggcagcaggaggaggaggaggaggagggactcggcgggaggatgggcttgctctcaattttgcgcaagttgaaaagtgcaccagaccaggaggtgagaatacttctcctgggcttggataatgctggcaagaccactcttctgaagcagcttgcatctgaagacatcagccacatcacacctacacagggtttcaacatcaaaagtgtacaatcacaaggttttaaactgaatgtatgggacattggtggacagaggaaaatcagaccatactggaagaattattttgaaaataccgatattcttatatatgtaatcgacagtgcagacagaaaaagatttgaagagacgggtcaggaactagcggaattactggaggaagaaaaactaagttgtgtgccagtgctcatctttgctaataagcaggatttgctcacagcagcccctgcctctgaaattgcagaaggactgaacctgcataccatccgcgaccgagtctggcagatccagtcttgctcagctctcacaggagagggcgttcaggatggcatgaactgggtctgcaaaaatgtcaatgcaaagaagaaataaaatctagacgaatggagatgcaggagctgcgggagccgaattcggtcctgaaaaacactaatttgctgctttctgaccaaatgtttttccatctgtgtacagctccagctgtttgaagagagggaacaacacggtttagaaagaatccccattccagcagtagatttaactgatctctgaggttcagtatcatttttcaaataaaggaattatattatttcctctgcataattgaaatagtattaaatgtctcaaagcacatgattagaaaatgagatcttttaaatgagcaagagattgcattgcagtttagacaattccagtgggcttttttttcctctcaaaaaaaaaaaaagaaaaagaaaaagaggaagaagcagctttgctgagttcatttatttactgacccgtcccttgcattccctccatggttttgaaaccacagacagtgtttgctggtgctgtcagtgatttttaccgtcactagcccagccaggcttcagtctgtccgacaggaagctgctgggtgggggtggggggagaaaaggcagataattaaaccatctcatcgtcttgcaggtcggagactacgtatgtaatcctcactctttggacagaaaaaaaaaaaaaagtctttcttgcagacaagtcactacagaaacataccccatcccacccacccctgcctctgccccagccagccacacagagaagcaaattcttatgacttttgactgtaatgacatctggaatgtaaggagaggtgggaggtttaattccagaaaaattacaaggtccttaaaaagctctcacatcgagggctcaggctagcgtaaacaggctttctccagctcagtggagcagtgagcagccgactctgagattagctggcttctccacggccgtcctatagacaggatttctaaagctcaaagaattctgtgtttaaacgatcacaataggccgctgctatcagattttagaaataaatgcagctttaccatgaacctgctccactgagaaaagccaggcagatcgatttttagatcaatttttacagtgctggcaacttggtggtgtgggatgctcctggatggagagggtttgctgctggggaggacatgggtgtgtgtgtgactgcaggggtcgtgtccaaggaatcaagagtcaccccagctgctgggctcctctgcctctctgcagcagaatgtccgtcctctgttgattgattggagaggaatagcagaacatttctcctgcccctcgttgcaaaacgagcttgtttccctgaacctcagaaatcctcagcttcaaacatggggaaacaggccagagcattgcccggctcctgaattaaactctgttctggtgcctgagctcaggggttttcagagaatgaataagagactgtccagtgactggtgggtccctgggggccagctgccttctcatcctgggaggtggcccttcccaagcccatcagggcgtgtgagcagactgaaggggccgctgcagcccctggccctcaatacccagctgcttctggctaagagtgcagcagagactgaggcatagccagcttcaaaagcgatctgacatgaaagtcattaacaaagccagccgtgaaaaggtgccccagagttgctgtggacagacctgtaaggacttgcaaaacaaaagaaagtgaggggtttttttaacctcagagctagctgctctctgcagcctcctccactggcttctctggctcacccaagctctcccttacagaggcaacacagaattataaggaatcagaaatcccccttctaccaggctgcaaatgtggctctagcacttgcaaattgttttttcttccgaatagttcagcagggacaagttatctgaggggcaaaatgcctgcttggaggtctgcaattttggaacactgcagtatggaactttggcattggagggtctgtaaaatatttttgttcttttaccaccaacttaggggactgttttaaagagccatcccaaggcctctcctagcaggcagaagccactcctctgataacggcctctgtaaatgttctgatttgctctcagctgcagagacacagagacactgcagatgtcacacgctttcatcttccctttgagcccttttgaaccctcctggggctctggggtagatgagagaagcctgaaaaaggcagagtttgaaagctcccatttaaaaacaaaatactttttaaagccctcttgcctcttccctgcccactcctgccccctgaccagaagacagaatttgaagctggaaagggaagaccccttttcccctcctcctgtccccagtgagtcttagcgagacttttgccctgcgcacaattgcatctgaatgtgcgggggagagggctgggggccggagggcaggcaaggcctggggggtgctcgtgatatgtgctcaagccagttgtgggaaaaactcgagtcctcccctcctcccgacctaccccgtgtggctgcttttggctggattccctgcacccagtgcaacacaccctttccccttcactctcccttggttactatggaaacaagggtgtcattgatgtgggctgagctggggaacatgtcggtgcacagctgaaagtcagcgattatgccggcggttagaaatgtgccagggttaaaggagtccgcagctcccacggctgctgggaggacatggtcctgcccccttccttcctccctccctccgtctccacttctctctccttgcttttgacaaatttctttattcccctctggactaaagtagtggctatttttgtgccactctgcgccccaccctcactgttggccgctccttatccggcctggcctggagggtgacaccatgtcaccctcaccaggactcgtctctccattcccgtcagagtttgctttgatttccctttcctttccttctcggggaccagttcttacttccttttatttttagctctgcactccatgtggtttcagggttcagtctgatccatcaaaaggttctttttttataatcccttttgaaaatgataatcaaaggaagagatgtggtgtttggtcatgtggaaaactcaatgtataatttagacgtctgtcaaaaatccgacaaataaaatttagctggaacgaaaaaaaaaaaaaaaaaaaaaaa

SEQ ID NO: 139 - DNA, 1370 bp, human
tcaggaactggagcagcaaagagaagaacaaaagcgcagagagaaggaagcggaggagaggcagcgagcggaggaaagcagctgtgagcgggtggctcttccccaccttgccagcaggctctgtgctccttgaagcaagcgctccagaggctccggaagccacggctggattggagacaagatgggatcctcagaggaccaggcctatcgcctccttaatgactacgccaacggcttcatggtgtcccaggttctcttcgccgcctgcgagctgggcgtgtttgaccttctcgccgaggccccagggcccctggacgtggcggcagtggctgcaggtgtgagggccagcgcccatgggacagagctcctgctggacatctgtgtgtccctgaagctgctgaaagtggagacgaggggaggaaaagctttctatcgaaacacagagctgtccagcgactacctgaccacggtcagcccgacgtcacaatgcagcatgctgaagtacatgggcaggaccagctaccggtgctggggccacctggcagacgccgtgagagaaggaaggaaccagtacctggagacgtttggcgttcccgctgaagagctttttacggccatctacaggtccgagggcgagcggctacagttcatgcaagctctgcaggaggtctggagcgtcaacgggagaagcgtgctgaccgcctttgacctgtcagtgttcccacttatgtgtgaccttggtgggacacggataaagctggaaaccatcattctcagcaaactatcgcaaggacagaaaaccaaacaccgcgtgttctcactcataggtggggctggagctctggctaaggaatgcatgtctctgtaccctggatgtaagatcaccgtttttgacatcccagaagtggtgtggacggcaaagcagcacttctcattccaggaggaagaacagattgacttccaggaaggggatttcttcaaagaccctcttccggaagctgatctgtacatcctggccagggtcctccatgactgggcagacggaaagtgctcacacctgctggagaggatctaccacacttgcaagccaggtggtggcattctggtaattgaaagcctcctggatgaagacaggcgaggtcctctgctcacgcagctctactctctgaacatgcttgtgcagacggaagggcaggagaggacccccacccactaccacatgctcctctcttctgctggcttcagagacttccagtttaagaaaacaggagccatttatgatgccattttagccaggaaataactgtttcttgtgacctggaactaacgtcaaagcacacaagacataataataaagacatgtacctcca

SEQ ID NO: 140 - DNA, 1254 bp, human
cctactttacgatttattattcatggattgaagaaatcaaaatggctgaagataaagagacaaagcatggaggacacaagaatgggaggaaaggcggactctcaggaacttcattcttcacgtggtttatggtgattgcattgctgggcgtctggacatctgtagctgtcgtttggtttgatcttgttgactatgaggaagttctagccaaagcaaaggacttccgttataacttatcagaggtgcttcaaggaaaactaggaatctatgatgctgatggtgatggagattttgatgtggatgatgccaaagttttattagaaggacccagtggggtagccaagagaaaaactaaggctaaagttaaagaactcactaaagaagagctcaagaaggagaaagagaaacctgagtcaaggaaggaaagtaagaatgaagagagaaaaaaggggaagaaagaggatgtccgaaaggataagaaaattgctgatgcagacctatccaggaaggagtctcctaagggtaaaaaggacagagaaaaagagaaagtggacctagaaaaaagtgctaaaaccaaggaaaataggaaaaaatcaacaaatatgaaggatgtttctagtaaaatggcatcccgagacaaagatgacagaaaggaaagtagaagttctaccagatatgcacacttaacaaagggaaatacccagaaaagaaacggctaaagctctggcatcatcatcccagaacatggtcatgttccagattgcagtttgttacaaaaaagcatggaaaatgtaatattgctctgattggtgagggtgtgtaaattagccattgaatgtatcattggtgcttagcaagtaaattacctgaaatttaaatataccgtctcatacttctaaatgtaaaaacattttaaaaatgtcacagaatatgatgtaataacttctatttattgatcatttattgatcatgtattcagataaatgtatatgtatcatgaatttttatggattaatatattgaatactttcattgacgttaaataagaatattaagattttaaatgttaccctgtgcataatgccttgtaactttttcaagtatgctaaatactcagggagatggatttgctcgttgttttcttccctccttccccttcctgcttccctgttttctctttcgtggacacctccccaggctcatgtgccaccaccttccctcctctccagccctcccagccctcccgcagccttt

SEQ ID NO: 141 - DNA, 2181 bp, human
agaagccgagcggcgcagaggacgccagggcgcgcgccgcagccacccaccctccggaccgcggcagctgctgacccgccatcgccatggcccgcgggaaagccaaggaggagggcagctggaagaaattcatctggaactcagagaagaaggagtttctgggcaggaccggtggcagttggtttaagatccttctattctacgtaatattttatggctgcctggctggcatcttcatcggaaccatccaagtgatgctgctcaccatcagtgaatttaagcccacatatcaggaccgagtggccccgccaggattaacacagattcctcagatccagaagactgaaatttcctttcgtcctaatgatcccaagagctatgaggcatatgtactgaacatagttaggttcctggaaaagtacaaagattcagcccagagggatgacatgatttttgaagattgtggcgatgtgcccagtgaaccgaaagaacgaggagactttaatcatgaacgaggagagcgaaaggtctgcagattcaagcttgaatggctgggaaattgctctggattaaatgatgaaacttatggctacaaagagggcaaaccgtgcattattataaagctcaaccgagttctaggcttcaaacctaagcctcccaagaatgagtccttggagacttacccagtgatgaagtataacccaaatgtccttcccgttcagtgcactggcaagcgagatgaagataaggataaagttggaaatgtggagtattttggactgggcaactcccctggttttcctctgcagtattatccgtactatggcaaactcctgcagcccaaatacctgcagcccctgctggccgtacagttcaccaatcttaccatggacactgaaattcgcatagagtgtaaggcgtacggtgagaacattgggtacagtgagaaagaccgttttcagggacgttttgatgtaaaaattgaagttaagagctgatcacaagcacaaatctttcccactagccatttaataagttaaaaaaagatacaaaaacaaaaacctactagtcttgaacaaactgtcatacgtatgggacctacacttaatctatatgctttacactagctttctgcatttaataggttagaatgtaaattaaagtgtagcaatagcaacaaaatatttattctactgtaaatgacaaaagaaaaagaaaaattgagccttgggacgtgcccatttttactgtaaattatgattccgtaactgacttgtagtaagcagtgtttctggcccctaagtattgctgccttgtgtattttatttagtgtacagtactacaggtgcatactctggtcatttttcaagccatgttttattgtatctgttttctactttatgtgagcaaggtttgctgtccaaggtgtaaatattcaacgggaataaaactggcatggtaattttttttttttttttttttttgttttttggctctttcaaaggtaatggcccatcgatgagcatttttaacatactccatagtcttttcctgtggtgttaggtctttatttttatttttttcctgggggctggggtgggggtttgtcatgggggaactgccctttaaattttaagtgacactacagaaaaacacaaaaaggtgatgggttgtgttatgcttgtattgaatgctgtcttgacatctcttgccttgtcctccggtatgttctaaagctgtgtctgagatctggatctgcccatcactttggctagtgacagggctaattaatttgctttatacattttcttttactttccttttttcctttctggaggcatcacatgctggtgctgtgtctttatgaatgttttaaccattttcatggtggaagaattttatatttatgcagttgtacaattttatttttttctgcaagaaaaagtgtaatgtatgaaataaaccaaagtcacttgtttgaaaataaatctttattttgaactttataaaaagcaatgcagtaccccatagactggtgttaaatgttgtctacagtgcaaaatccatgttctaacatatgtaataattgccaggagtacagtgctcttgttgatcttgtattcagtcaggttaaaacaacggacaataaaagaatgaacacaaaaaaaaaaaaaaaaaaaa

SEQ ID NO: 142 - DNA, 1883 bp, human
gtcccagtcagtccggaggctgcggctgcagaagtaccgctgcggagtaactgcaaagatgctgtccgtgcgcgttgctgcggccgtggtccgcgcccttcctcggcgggccggactggtctccagaaatgctttgggttcatctttcattgctgcaaggaacttccatgcctctaacactcatcttcaaaagactgggactgctgagatgtcctctattcttgaagagcgtattcttggagctgatacctctgttgatcttgaagaaactgggcgtgtcttaagtattggtgatggtattgcccgcgtacatgggctgaggaatgttcaagcagaagaaatggtagagttttcttcaggcttaaagggtatgtccttgaacttggaacctgacaatgttggtgttgtcgtgtttggaaatgataaactaattaaggaaggagatatagtgaagaggacaggagccattgtggacgttccagttggtgaggagctgttgggtcgtgtagttgatgcccttggtaatgctattgatggaaagggtccaattggttccaagacgcgtaggcgagttggtctgaaagcccccggtatcattcctcgaatttcagtgcgggaaccaatgcagactggcattaaggctgtggatagcttggtgccaattggtcgtggtcagcgtgaactgattattggtgaccgacagactgggaaaacctcaattgctattgacacaatcattaaccagaaacgtttcaatgatggatctgatgaaaagaagaagctgtactgtatttatgttgctattggtcaaaagagatccactgttgcccagttggtgaagagacttacagatgcagatgccatgaagtacaccattgtggtgtcggctacggcctcggatgctgccccacttcagtacctggctccttactctggctgttccatgggagagtattttagagacaatggcaaacatgctttgatcatctatgacgacttatccaaacaggctgttgcttaccgtcagatgtctctgttgctccgccgaccccctggtcgtgaggcctatcctggtgatgtgttctacctacactcccggttgctggagagagcagccaaaatgaacgatgcttttggtggtggctccttgactgctttgccagtcatagaaacacaggctggtgatgtgtctgcttacattccaacaaatgtcatttccatcactgacggacagatcttcttggaaacagaattgttctacaaaggtatccgccctgcaattaacgttggtctgtctgtatctcgtgtcggatccgctgcccaaaccagggctatgaagcaggtagcaggtaccatgaagctggaattggctcagtatcgtgaggttgctgcttttgcccagttcggttctgacctcgatgctgccactcaacaacttttgagtcgtggcgtgcgtctaactgagttgctgaagcaaggacagtattctcccatggctattgaagaacaagtggctgttatctatgcgggtgtaaggggatatcttgataaactggagcccagcaagattacaaagtttgagaatgctttcttgtctcatgtcgtcagccagcaccaagccttgttgggcactatcagggctgatggaaagatctcagaacaatcagatgcaaagctgaaagagattgtaacaaatttcttggctggatttgaagcttaaactcctgtggattcacatcaaataccagttcagttttgtcattgttctagtaaattagttccatttgtaaaagggttactctcatactccttatgtacagaaatcacatgaaaaataaaggttccataatgcaaaaaaaaaaaaaaaaaaaaaaaaaaaaaaa

SEQ ID NO: 143 - DNA, 1762 bp, human
ggactacgccatgttggggtttgtgggtcgggtggccgctgctccggcctccggggccttgcggagactcaccccttcagcgtcgctgcccccagctcagctcttactgcgggccgctccgacggcggtccatcctgtcagggactatgcggcgcaaacatctccttcgccaaaagcaggcgccgccaccgggcgcatcgtggcggtcattggcgcagtggtggacgtccagtttgatgagggactaccaccaattctaaatgccctggaagtgcaaggcagggagaccagactggttttggaggtggcccagcatttgggtgagagcacagtaaggactattgctatggatggtacagaaggcttggttagaggccagaaagtactggattctggtgcaccaatcaaaattcctgttggtcctgagactttgggcagaatcatgaatgtcattggagaacctattgatgaaagaggtcccatcaaaaccaaacaatttgctcccattcatgctgaggctccagagttcatggaaatgagtgttgagcaggaaattctggtgactggtatcaaggttgtcgatctgctagctccctatgccaagggtggcaaaattgggctttttggtggtgctggagttggcaagactgtactgatcatggagttaatcaacaatgtcgccaaagcccatggtggttactctgtgtttgctggtgttggtgagaggacccgtgaaggcaatgatttataccatgaaatgattgaatctggtgttatcaacttaaaagatgccacctctaaggtagcgctggtatatggtcaaatgaatgaaccacctggtgctcgtgcccgggtagctctgactgggctgactgtggctgaatacttcagagaccaagaaggtcaagatgtactgctatttattgataacatctttcgcttcacccaggctggttcagaggtgtctgcattattgggccgaatcccttctgctgtgggctatcagcctaccctggccactgacatgggtactatgcaggaaagaattaccactaccaagaagggatctatcacctctgtacaggctatctatgtgcctgctgatgacttgactgaccctgcccctgctactacgtttgcccatttggatgctaccactgtactgtcgcgtgccattgctgagctgggcatctatccagctgtggatcctctagactccacctctcgtatcatggatcccaacattgttggcagtgagcattacgatgttgcccgtggggtgcaaaagatcctgcaggactacaaatccctccaggatatcattgccatcctgggtatggatgaactttctgaggaagacaagttgaccgtgtcccgtgcacggaaaatacagcgtttcttgtctcagccattccaggttgctgaggtcttcacaggtcatatggggaagctggtacccctgaaggagaccatcaaaggattccagcagattttggcaggtgaatatgaccatctcccagaacaggccttctatatggtgggacccattgaagaagctgtggcaaaagctgataagctggctgaagagcattcatcgtgaggggtctttgtcctctgtactgtctctctccttgcccctaacccaaaaagcttcatttttctgtgtaggctgcacaagagccttgattgaagatatattctttctgaacagtatttaaggtttccaataaaatgtacacccctcagaaaaaaaaaaaaaaaa

SEQ ID NO: 144 - DNA, 1078 bp, human
ctgaccgaccttcagcagggctgtggctaccatgttctctcgcgcgggtgtcgctgggctgtcggcctggaccttgcagccgcaatggattcaagttcgaaatatggcaactttgaaagatatcaccaggagactaaagtccatcaaaaacatccagaaaattaccaagtctatgaaaatggtagcggcagcaaaatatgcccgagctgagagagagctgaaaccagctcgaatatatggattgggatctttagctctgtatgaaaaagctgatatcaaggggcctgaagacaagaagaaacacctccttattggtgtgtcctcagatcgaggactgtgtggtgctattcattcctccattgctaaacagatgaaaagcgaggttgctacactaacagcagctgggaaagaagttatgcttgttggaattggtgacaaaatcagaggcatactttataggactcattctgaccagtttctggtggcattcaaagaagtgggaagaaagccccccacttttggagatgcgtcagtcattgcccttgaattactaaattctggatatgaatttgatgaaggctccatcatctttaataaattcaggtctgtcatctcctataagacagaagaaaagcccatcttttcccttaataccgttgcaagtgctgacagcatgagtatctatgacgatattgatgctgacgtgctgcaaaattaccaagaatacaatctggccaacatcatctactactctctgaaggagtccaccactagtgagcagagtgccaggatgacagccatggacaatgccagcaagaatgcttctgagatgattgacaaattgacattgacattcaaccgtacccgccaagctgtcatcacaaaagagttgattgaaattatctctggtgctgcagctctgtaaagaaggaaaattcagccagttgattttgtttttagcttactgctgcctttgtccgaagaaactgttcctccattatttgaattactgaagacagcaagatatttgtaaattatcttaaaataaacaacttaaaataaaatcattgtttttctt

SEQ ID NO: 145 - DNA, 1040 bp, human
cagacgtccctgcgcgtcgtcctcctcgccctccaggccgcccgcgccgcgccggagtccgctgtccgccagctacccgcttcctgccgcccgccgctgccatgctgcccgccgcgctgctccgccgcccgggacttggccgcctcgtccgccacgcccgtgcctatgccgaggccgccgccgccccggctgccgcctctggccccaaccagatgtccttcaccttcgcctctcccacgcaggtgttcttcaacggtgccaacgtccggcaggtggacgtgcccacgctgaccggagccttcggcatcctggcggcccacgtgcccacgctgcaggtcctgcggccggggctggtcgtggtgcatgcagaggacggcaccacctccaaatactttgtgagcagcggttccatcgcagtgaacgccgactcttcggtgcagttgttggccgaagaggccgtgacgctggacatgttggacctgggggcagccaaggcaaacttggagaaggcccaggcggagctggtggggacagctgacgaggccacgcgggcagagatccagatccgaatcgaggccaacgaggccctggtgaaggccctggagtaggcggtgcgtacccggtgtcccgaggcccggccaggggctgggcagggatgccaggtgggcccagccagctcctggggtccccgccacctggggaagccgcgcctgccaaggaggccaccagagggcagtgcaggcttctgcctgggccccaggccctgcctgtgttgaaagctctggggactgggccagggaagctcctcctcagctttgagctgtggctgccacccatggggctctccttccgcctctcaagatccccccagcctgacgggccgcttaccatcccctctgccctgcagagccagccgccaaggttgacctcagcttcggagccacctctggatgaactgcccccagcccccgccccattaaagacccggaagcctgaaaaaaaaaaaaaaaaaaaaaaaaaaaaaaaaaaaaaaaaaaaaa

SEQ ID NO: 146 - DNA, 1230 bp, human
ggggagacttgtgagcggccatcttggtcctgccctgacagattctcctatcggggtcacagggacgctaagattgctacctggactttcgttgaccatgctgtcccgggtggtactttccgccgccgccacagcggccccctctctgaagaatgcagccttcctaggtccaggggtattgcaggcaacaaggacctttcatacagggcagccacaccttgtccctgtaccacctcttcctgaatacggaggaaaagttcgttatggactgatccctgaggaattcttccagtttctttatcctaaaactggtgtaacaggaccctatgtactcggaactgggcttatcttgtacgctttatccaaagaaatatatgtgattagcgcagagaccttcactgccctatcagtactaggtgtaatggtctatggaattaaaaaatatggtccctttgttgcagactttgctgataaactcaatgagcaaaaacttgcccaactagaagaggcgaagcaggcttccatccaacacatccagaatgcaattgatacggagaagtcacaacaggcactggttcagaagcgccattacctttttgatgtgcaaaggaataacattgctatggctttggaagttacttaccgggaacgactgtatagagtatataaggaagtaaagaatcgcctggactatcatatatctgtgcagaacatgatgcgtcgaaaggaacaagaacacatgataaattgggtggagaagcacgtggtgcaaagcatctccacacagcaggaaaaggagacaattgccaagtgcattgcggacctaaagctgctggcaaagaaggctcaagcacagccagttatgtaaatgtatctatcccaattgagacagctagaaacagttgactgactaaatggaaactagtctatttgacaaagtctttctgtgttggtgtctactgaagttatagtttacccttcctaaaaatgaaaagtttgtttcatatagtgagagaacgaaatctctatcggccagtcagatgtttctcatccttcttgctctgcctttgagttgttccgtgatcacttctgaataagcagtttgcctttataaaaacttgctgcctgactaaagattaacaggttatagtttaaatttgtaattaattctaccatcttgcaataaagtgacaattgaataaaaaaaaaaaaaaaaaaaaaaaaaaaaaa

SEQ ID NO: 147 - DNA, 746 bp, human
ctctctgtcttctctgcagtgggagcagctctcctgccacagctcctcaccccctgaaaatgttcgcctgctccaagtttgtctccactccctccttggtcaagagcacctcacagctgctgagccgtccgctatctgcagtggtgctgaaacgaccggagatactgacagatgagagcctcagcagcttggcagtctcatgtccccttacctcacttgtctctagccgcagcttccaaaccagcgccatttcaagggacatcgacacagcagccaagttcattggagctggggctgccacagttggggtggctggttctggggctgggattggaactgtgtttgggagcctcatcattggttatgccaggaacccttctctgaagcaacagctcttctcctacgccattctgggctttgccctctcggaggccatggggctcttttgtctgatggtagcctttctcatcctctttgccatgtgaaggagccgtctccacctcccatagttctcccgcgtctggttggccccgtgtgttccttttcctatacctccccaggcagcctggggaacgtggttggctcagggtttgacagagaaaagacaaataaatactgtattaataagatgtttcttgagtctcctgtgtatatttcttttccacagttggctgagtgccttcgtgagagtacaaggcccgaagggtagtgatggtgctaaactcaacatggatttggctgagctc

SEQ ID NO: 148 - DNA, 1178 bp, human
gcggccgcgggggggcccttgtgggggaaaaggccccggaacgaggccggcccgcgagggcccgcgctcccctcctccccggcggccgcactcacccactccggaatcggccctgtcgcccccgcccgcactccagagccggctgagaacggcagcggcgagggctccacgtgcagcgtctctccgggtaagacctgcagctcccgcgactagaagtgtgaggtcccagggcccttcccgcggaatcggcgctgagaagccccaacccccctcccgcctcccaggcaccttcgggtccaggactacaactcccggcagggtgcgcaaaacgaccgcccaaggcaacggaggctcacgaggtacaaggaagcacaacgccccaatccgctttgttttacacagtctcactttccctgcacctttatacacttcgataaccctaacgaacaggacgctgactcggaggggagcttgaactaggggaaaggccactcaaagagcgcatgcgtacagagcaaggtttcaaggaggggaaaaagaacgggtcaaattaggcgaagaaaagatggcggaggctgtgccaggggacccggaagcacttaccctccacttcctcctcctgtttggcttctgtctcacctagacccgtccggtcgcagactgtctccgagacgcttcctgtccgaatcagcatgattcttcagaggctcttcaggttctcctctgtcattcggtcagccgtctcagtccatttgcggaggaacattggtgttacagcagtggcatttaataaggaacttgatcctatacagaaactctttgtggacaagattagagaatacaaatctaagcgacagacatctggaggacctgttgatgctagttcagagtatcagcaagagctggagagggagctttttaagctcaagcaaatgtttggtaatgcagacatgaatacatttcccaccttcaaatttgaagatcccaaatttgaagtcatcgaaaaaccccaggcctgaagaaataaagtaaaattaatctggtaatttgtcacggattagttgtacaactagttagaagtttcagaataaacatgcatttcataactgtcaaatgttcttttaattctgagtccaaataaattatttggtgatgttgaaaaaaaaaaaaaaaaaaaa

SEQ ID NO: 149 - DNA, 2149 bp, human
gttctgtgttcgcttgggtagaggaagccgtgaggccggagcttaggtcgggaagggatggatcgctgagccgatagcgtccgctaggctgtctgcctcggtacctgttactgctgctacttcctcgtttgacaccttcctggaatctctcttgatttttgaggaaatacctagtaacaaacatgactgagttctggcttatatctgctcctggggagaaaacctgtcagcaaacatgggagaaattgcatgcggcaacttcaaagaacaataatcttgctgtcacttccaagttcaatattcctgacttaaaggttggcacgttggatgtcttggttggcttgtcagatgaactggctaaactggatgcatttgtagaaggagtggttaagaaagtagctcaatacatggctgatgtattggaagatagcaaagacaaagttcaagagaatctgttggctaatggagtggacttggttacttatataacaaggttccagtgggacatggccaaatatccaatcaagcagtccctgaaaaatatttctgaaataattgccaagggagtaactcagattgataatgacctgaaatctcgagcatctgcatacaataacctgaaaggaaatcttcagaatttggaacgaaagaatgcaggaagtttgctaactagaagtctagcagaaattgtgaagaaggatgactttgttcttgattcagagtatctcgtcacattactggtagtagttcccaagttaaaccacaacgactggattaagcagtatgaaacactagccgaaatggtagttccaaggtctagcaatgttctttcagaggaccaagacagttacctgtgtaatgtcaccttgtttaggaaggcagttgatgacttcagacacaaagccagagaaaacaaattcattgttcgtgacttccagtataatgaagaggagatgaaagcagataaagaagaaatgaacaggctttctactgataagaaaaaacaatttggaccacttgtacggtggctgaaagtgaattttagtgaagcatttattgcatggattcacgtgaaagcattacgggttttcgttgagtctgttttaaggtatggcttgccagtgaacttccaagcaatgctacttcagcccaataagaaaactttgaagaaactgagagaagtattacatgaattgtataaacatctagacagcagtgcagcagctattattgatgctcctatggatattccaggtttaaacctgagtcaacaagaatactacccctatgtgtactacaagattgattgcaacttgctggaattcaagtgaaaatgggctcctcccccgacaatcctgtccttgtgtttgtgtgtgctaacagaaataagttgcagtatggtcgtacttttaactctagtatcctttgcttgcttcttaccccctttcctaggtgaattctcccacagtggtctgtatctcaacattttctttttaaaggaaaaaatatatatatatagtttctttttattgatcaggtctgtaaatgtgtactaaaaaaatcagagtttatttataaacagaatagtttatttaaagagaaggtctcttccttattgatatcatggtatgcattaattccatttgttactattgtgcacaaaagccctgttcacaggggaatggtgtaaacatttatactgttttgttcactgtatttagtagacataactgttgaatagttactgaatcatgatgtaaagaatatgtgaccatcttcaggtatgggatttctgaacgtttcaaatttcaatcaatgagcactgtcaacacccacaggagagaataaaattacctgtgcaaaggtgtattgtggtgtgtgtaacttaagattacagttctgtttgagagttaaatgatgtcatagctcacttgctatgctgcttccaggattttgttatatgctgaggtgtaaccatttgtgttgtctgactttcgtatgatttaattgagccaaatttgggtcagaacacaaatttgaagatgacttttcagtatatgatgggtatttacatttgaacactagaattttaggtctctcaaataattaagaatagagccagttttgaataaagtctagcagaactatg

SEQ ID NO: 150 - DNA, 2055 bp, human
gcagtggaggctgaggctatgatggcggccatggcgacggctcgagtgcggatggggccgcggtgcgcccaggcgctctggcgcatgccgtggctgccggtgtttttgtcgttggcggcggcggcggcggcggcagcggcggagcagcaggtcccgctggtgctgtggtcgagtgaccgggacttgtgggctcctgcggccgacactcatgaaggccacatcaccagcgacttgcagctctctacctacttagatcccgccctggagctgggtcccaggaatgtgctgctgttcctgcaggacaagctgagcattgaggatttcacagcatatggcggtgtgtttggaaacaagcaggacagcgccttttctaacctagagaatgccctggacctggccccctcctcactggtgcttcctgccgtcgactggtatgcagtcagcactctgaccacttacctgcaggagaagctcggggccagccccttgcatgtggacctggccaccctgcgggagctgaagctcaatgccagcctccctgctctgctgctcattcgcctgccctacacagccagctctggtctgatggcacccagggaagtcctcacaggcaacgatgaggtcatcgggcaggtcctgagcacactcaagtccgaagatgtcccatacacagcggccctcacagcggtccgcccttccagggtggcccgtgatgtagccgtggtggccggagggctaggtcgccagctgctacaaaaacagccagtatcacctgtgatccatcctcctgtgagttacaatgacaccgctccccggatcctgttctgggcccaaaacttctctgtggcgtacaaggaccagtgggaggacctgactcccctcacctttggggtgcaggaactcaacctgactggctccttctggaatgactcctttgccaggctctcactgacctatgaacgactctttggtaccacagtgacattcaagttcattctggccaaccgcctctacccagtgtctgcccggcactggtttaccatggagcgcctcgaagtccacagcaatggctccgtcgcctacttcaatgcttcccaggtcacagggcccagcatctactccttccactgcgagtatgtcagcagcctgagcaagaagggtagtctcctcgtggcccgcacgcagccctctccctggcagatgatgcttcaggacttccagatccaggctttcaacgtaatgggggagcagttctcctacgccagcgactgtgccagcttcttctcccccggcatctggatggggctgctcacctccctgttcatgctcttcatcttcacctatggcctgcacatgatcctcagcctcaagaccatggatcgctttgatgaccacaagggccccactatttctttgacccagattgtgtgaccctgtgccagtgggggggttgagggtgggacggtgtccgtgttgttgctttcccaccctgcagcgcactggactgaagagcttccctcttcctactgcagcatgaactgcaagctcccctcagcccatcttgctccctcttcagcccgctgaggagctttcttgggctgcccccatctctcccaacaaggtgtacatattctgcgtagatgctagaccaaccagcttcccagggttcgtcgctgtgaggcgtaagggacatgaattctagggtctcctttctccttatttattcttgtggctacatcatccctggctgtggatagtgcttttgtgtagcaaatgctccctccttaaggttatagggctccctgagtttgggagtgtggaagtactacttaactgtctgtcctgcttggctgtcgttatcgttttctggtgatgttgtgctaacaataagcagtacacgggtttatttctgtggcctgagaaggaagggacctccacgacaggtgggctgggtgcgatcgccggctgtttggcatgttcccaccgggagtgccgggcaggagcatggggtgcttggttgtttccttcctaataaaataaacgcgggtcgccatg

SEQ ID NO: 151 - DNA, 5014 bp, human
gagtggagttctggaggaatgtttaccagacacagagcccagagggacagcgcccagagcccagatagagagacacggcctcactggctcagcaccagggtccccttccccctcctcagctccctccctggcccctttaagaaagagctgatcctctcctctcttgagttaacccctgattgtccaggtggcccctggctctggcctggtgggcggaggcaaagggggagccaggggcggagaaagggttgcccaagtctgggagtgagggaaggaggcaggggtgctgagaaggcggctgctgggcagagccggtggcaagggcctcccctgccgctgtgccaggcaggcagtgccaaatccggggagcctggagctggggggagggccggggacagcccggccctgccccctcccccgctgggagcccagcaacttctgaggaaagtttggcacccatggcgtggcggtgccccaggatgggcagggtcccgctggcctggtgcttggcgctgtgcggctgggcgtgcatggcccccaggggcacgcaggctgaagaaagtcccttcgtgggcaacccagggaatatcacaggtgcccggggactcacgggcacccttcggtgtcagctccaggttcagggagagccccccgaggtacattggcttcgggatggacagatcctggagctcgcggacagcacccagacccaggtgcccctgggtgaggatgaacaggatgactggatagtggtcagccagctcagaatcacctccctgcagctttccgacacgggacagtaccagtgtttggtgtttctgggacatcagaccttcgtgtcccagcctggctatgttgggctggagggcttgccttacttcctggaggagcccgaagacaggactgtggccgccaacacccccttcaacctgagctgccaagctcagggacccccagagcccgtggacctactctggctccaggatgctgtccccctggccacggctccaggtcacggcccccagcgcagcctgcatgttccagggctgaacaagacatcctctttctcctgcgaagcccataacgccaagggggtcaccacatcccgcacagccaccatcacagtgctcccccagcagccccgtaacctccacctggtctcccgccaacccacggagctggaggtggcttggactccaggcctgagcggcatctaccccctgacccactgcaccctgcaggctgtgctgtcagacgatgggatgggcatccaggcgggagaaccagaccccccagaggagcccctcacctcgcaagcatccgtgcccccccatcagcttcggctaggcagcctccatcctcacaccccttatcacatccgcgtggcatgcaccagcagccagggcccctcatcctggacccactggcttcctgtggagacgccggagggagtgcccctgggcccccctgagaacattagtgctacgcggaatgggagccaggccttcgtgcattggcaagagccccgggcgcccctgcagggtaccctgttagggtaccggctggcgtatcaaggccaggacaccccagaggtgctaatggacatagggctaaggcaagaggtgaccctggagctgcagggggacgggtctgtgtccaatctgacagtgtgtgtggcagcctacactgctgctggggatggaccctggagcctcccagtacccctggaggcctggcgcccagggcaagcacagccagtccaccagctggtgaaggaaccttcaactcctgccttctcgtggccctggtggtatgtactgctaggagcagtcgtggccgctgcctgtgtcctcatcttggctctcttccttgtccaccggcgaaagaaggagacccgttatggagaagtgtttgaaccaacagtggaaagaggtgaactggtagtcaggtaccgcgtgcgcaagtcctacagtcgtcggaccactgaagctaccttgaacagcctgggcatcagtgaagagctgaaggagaagctgcgggatgtgatggtggaccggcacaaggtggccctggggaagactctgggagagggagagtttggagctgtgatggaaggccagctcaaccaggacgactccatcctcaaggtggctgtgaagacgatgaagattgccatctgcacgaggtcagagctggaggatttcctgagtgaagcggtctgcatgaaggaatttgaccatcccaacgtcatgaggctcatcggtgtctgtttccagggttctgaacgagagagcttcccagcacctgtggtcatcttacctttcatgaaacatggagacctacacagcttcctcctctattcccggctcggggaccagccagtgtacctgcccactcagatgctagtgaagttcatggcagacatcgccagtggcatggagtatctgagtaccaagagattcatacaccgggacctggcggccaggaactgcatgctgaatgagaacatgtccgtgtgtgtggcggacttcgggctctccaagaagatctacaatggggactactaccgccagggacgtatcgccaagatgccagtcaagtggattgccattgagagtctagctgaccgtgtctacaccagcaagagcgatgtgtggtccttcggggtgacaatgtgggagattgccacaagaggccaaaccccatatccgggcgtggagaacagcgagatttatgactatctgcgccagggaaatcgcctgaagcagcctgcggactgtctggatggactgtatgccttgatgtcgcggtgctgggagctaaatccccaggaccggccaagttttacagagctgcgggaagatttggagaacacactgaaggccttgcctcctgcccaggagcctgacgaaatcctctatgtcaacatggatgagggtggaggttatcctgaaccccctggagctgcaggaggagctgaccccccaacccagccagaccctaaggattcctgtagctgcctcactgcggctgaggtccatcctgctggacgctatgtcctctgcccttccacaacccctagccccgctcagcctgctgataggggctccccagcagccccagggcaggaggatggtgcctgagacaaccctccacctggtactccctctcaggatccaagctaagcactgccactggggaaaactccaccttcccactttcccaccccacgccttatccccacttgcagccctgtcttcctacctatcccacctccatcccagacaggtccctccccttctctgtgcagtagcatcaccttgaaagcagtagcatcaccatctgtaaaaggaaggggttggattgcaatatctgaagccctcccaggtgttaacattccaagactctagagtccaaggtttaaagagtctagattcaaaggttctaggtttcaaagatgctgtgagtctttggttctaaggacctgaaattccaaagtctctaattctattaaagtgctaaggttctaaggcctacttttttttttttttttttttttttttttttttttgcgatagagtctcactgtgtcacccaggctggagtgcagtggtgcaatctcgcctcactgcaaccttcacctaccgagttcaagtgattttcctgccttggcctcccaagtagctgggattacaggtgtgtgccaccacacccggctaatttttatatttttagtagagacagggtttcaccatgttggccaggctggtctaaaactcctgacctcaagtgatctgcccacctcagcctcccaaagtgctgagattacaggcatgagccactgcactcaaccttaagacctactgttctaaagctctgacattatgtggttttagattttctggttctaacatttttgataaagcctcaaggttttaggttctaaagttctaagattctgattttaggagctaaggctctatgagtctagatgtttattcttctagagttcagagtccttaaaatgtaagattatagattctaaagattctatagttctagacatggaggttctaaggcctaggattctaaaatgtgatgttctaaggctctgagagtctagattctctggctgtaaggctctagatcataaggcttcaaaatgttatcttctcaagttctaagattctaatgatgatcaattatagtttctgaggctttatgataatagattctcttgtataagatcctagatcctaagggtcgaaagctctagaatctgcaattcaaaagttccaagagtctaaagatggagtttctaaggtccggtgttctaagatgtgatattctaagacttactctaagatcttagattctctgtgtctaagattctagatcagatgctccaagattctagatgattaaataagattctaacggtctgttctgtttcaaggcactctagattccattggtccaagattccggatcctaagcatctaagttataagactctcacactcagttgtgactaactagacaccaaagttctaataatttctaatgttggacacctttaggttctttgctgcattctgcctctctaggaccatggttaagagtccaagaatccacatttctaaaatcttatagttctaggcactgtagttctaagactcaaatgttctaagtttctaagattctaaaggtccacaggtctagactattaggtgcaatttcaaggttctaaccctatactgtagtattctttggggtgcccctctccttcttagctatcattgcttcctcctccccaactgtgggggtgtgcccccttcaagcctgtgcaatgcattagggatgcctcctttcccgcaggggatggacgatctcccacctttcgggccatgttgcccccgtgagccaatccctcaccttctgagtacagagtgtggactctggtgcctccagaggggctcaggtcacataaaactttgtatatcaacgaaaaaaa

SEQ ID NO: 152 - DNA, 2165 bp, human
atggctgtgcgcggcgccaacaccttgacgtccttctccatccaggcgatcctcaacaagaaagaggagcgcggcgggctggccgcgccagaggggcgcccggcgcccgggggcacagcggcatcggtggccgcggctcccgctgtctgctgttggcggctctttggggagagggacgcgggcgcgttggggggcgccgaggactctctgctggcgtctcctgccggtaccagaacagctgcggggcggactgcggagagcccggaaggctgggactcggactccgcgctcagcgaggagaacgagagcaggcggcgctgcgcggacgcgcggggggccagcggggccggccttgcggggggatccttgagcctcggccagccggtctgtgagctggccgcttccaaagacctagaggaggaagccgcgggccggagcgacagcgagatgtccgccagcgtctcaggcgaccgcagcccaaggaccgaggacgacggtgttggccccagaggtgcacacgtgtccgcgctgtgcagcggggccggcggcgggggcggcagcgggccggcaggcgtcgcggaggaggaggaggagccggcggcgcccaagccacgcaagaagcgctcgcgggccgctttctcccacgcgcaggtcttcgagctggagcgccgctttaaccaccagcgctacctgtccgggcccgagcgcgcagacctggccgcgtcgctgaagctcaccgagacgcaggtgaaaatctggttccagaaccgtcgctacaagacaaagcgccggcagatggcagccgacctgctggcctcggcgcccgccgccaagaaggtggccgtaaaggtgctggtgcgcgacgaccagagacaatacctgcccggcgaagtgctgcggccaccctcgcttctgccactgcagccctcctactattacccgtactactgcctcccaggctgggcgctctccacctgcgcagctgccgcaggcacccagtgaacccgcttgggctgaggcagcgagtgattcccgcgctccggctccggaccggcgctgacagctgtaggctgtagcctgcacggggcgccccgccaaggaggcacctggaggtgaaacccagctccagctcccgttagccaggacttgtcccctggcagctgggctgagtctgccctgagggggcgcctttttctaatttgaacagaggcaccctatggcctaggggccctgatcgcccacctgcctggaagcccctgggctctatttattatcatgacaatgttggaattaaattttgattcgaatatgtctgcctgggggtggggttttccctgagcggcaactcctggagaccacatagcctgaatcctcagaatttcaggcctgctgggagctttctgcactaggccacactagttcatggtatccatgctaccaatctatgtgtatctacatatcttttatttttggaaattgcatttgtaaccaaggggtgcgaaaccctggcagtcccaggcagcaccaggccaggggttgatttgaaacgtgaaggattgggttttcaggccctctgctccacccctcctgtgtgtcagagctagggtgggggtgcccgattcgggtgctgaatgtaaggaggggagcctccaagtgtggtgcaagccgggggtctccacatcttccttctctgaagtccaggtacctgcacaagcaggaagcgcctgggagtcccggaaggaggagagcgcacacccaggcagccctctgcggaaactttccttggtttctttttatttgtgtaaaggaggttaagacgtgtcgcacttttcagttgtttgtattcaaatgacgattatttttctactcaatgtgaatatccctggccagcctttccacggcgcccaccgcagtgccgctgcctggccctcagtgtctaccttctgccctctgcgactccagtgctctggcccgggactcccctatccgcccctcacttacccttaaacaggtgatcccacctgtcttgtcaacctcgccgcttttcgcctccttaatggcactgtgcactcaactagagtattaactgtaaaaagatttgtgaagtttggaagctctattcgctgtattttttctttaatttataaacttttagtttaacatgc

SEQ ID NO: 153 - DNA, 2444 bp, human
agtaacagttgattgttacattcagtaacactgaatgtcagtgcagtccaatttacaggctggagcagcagctgcatcctgcatttccccgaagtattacatgattttcactccttgcaaactttaccatctttgttgcagagaatcggaaatcaatatgcatagcaaagtcacaatcatatgcatcagatttctcttttggtttcttttgctctgcatgcttattgggaagtcacatactgaagatgacatcataattgcaacaaagaatggaaaagtcagagggatgaacttgacagtttttggtggcacggtaacagcctttcttggaattccctatgcacagccacctcttggtagacttcgattcaaaaagccacagtctctgaccaagtggtctgatatttggaatgccacaaaatatgcaaattcttgctgtcagaacatagatcaaagttttccaggcttccatggatcagagatgtggaacccaaacactgacctcagtgaagactgtttatatctaaatgtatggattccagcacctaaaccaaaaaatgccactgtattgatatggatttatggtggtggttttcaaactggaacatcatctttacatgtttatgatggcaagtttctggctcgggttgaaagagttattgtagtgtcaatgaactatagggtgggtgccctaggattcttagctttgccaggaaatcctgaggctccagggaacatgggtttatttgatcaacagttggctcttcagtgggttcaaaaaaatatagcagcctttggtggaaatcctaaaagtgtaactctctttggagaaagtgcaggagcagcttcagttagcctgcatttgctttctcctggaagccattcattgttcaccagagccattctgcaaagtggatcctttaatgctccttgggcggtaacatctctttatgaagctaggaacagaacgttgaacttagctaaattgactggttgctctagagagaatgagactgaaataatcaagtgtcttagaaataaagatccccaagaaattcttctgaatgaagcatttgttgtcccctatgggactcctttgtcagtaaactttggtccgaccgtggatggtgattttctcactgacatgccagacatattacttgaacttggacaatttaaaaaaacccagattttggtgggtgttaataaagatgaagggacagcttttttagtctatggtgctcctggcttcagcaaagataacaatagtatcataactagaaaagaatttcaggaaggtttaaaaatattttttccaggagtgagtgagtttggaaaggaatccatcctttttcattacacagactgggtagatgatcagagacctgaaaactaccgtgaggccttgggtgatgttgttggggattataatttcatatgccctgccttggagttcaccaagaagttctcagaatggggaaataatgcctttttctactattttgaacaccgatcctccaaacttccgtggccagaatggatgggagtgatgcatggctatgaaattgaatttgtctttggtttacctctggaaagaagagataattacacaaaagccgaggaaattttgagtagatccatagtgaaacggtgggcaaattttgcaaaatatgggaatccaaatgagactcagaacaatagcacaagctggcctgtcttcaaaagcactgaacaaaaatatctaaccttgaatacagagtcaacaagaataatgacgaaactacgtgctcaacaatgtcgattctggacatcattttttccaaaagtcttggaaatgacaggaaatattgatgaagcagaatgggagtggaaagcaggattccatcgctggaacaattacatgatggactggaaaaatcaatttaacgattacactagcaagaaagaaagttgtgtgggtctctaattaatagatttaccctttatagaacatattttcctttagatcaaggcaaaaatatcaggagcttttttacacacctactaaaaaagttattatgtagctgaaacaaaaatgccagaaggataatattgattcctcacatctttaacttagtattttacctagcatttcaaaacccaaatggctagaacatgtttaattaaatttcacaatataaagttctacagttaattatgtgcatattaaaacaatggcctggttcaatttctttctttccttaataaatttaagttttttccccccaaaattatcagtgctctgcttttagtcacgtgtattttcattaccactcgtaaaaaggtatcttttttaaatgaattaaatattgaaacactgtacaccatagtttacaatattatgtttcctaattaaaataagaattgaatgtcaatatgagatattaaaataagcacagaaaatc

SEQ ID NO: 154 - DNA, 1557 bp, human
attgaaagaatacacagaaagcctggaaaaggtttccaggggtgtcaatacgccctgtcaactgagaattaagaggatccggctggtcacttgcctggagaggatcctgcatgctgatagtgctgaggcacctgccagctaagaaccaccgggaggaactgggccattctaacacccgttgctaccatgctggccacccgcctctccagacccctgtcacggctcccaggaaaaaccctaagtgcctgtgatagagaaaatggagcaagacgcccactattgcttggttctacttcctttatcccgattggccgtcggacttatgccagtgcggcggagccggttggcagcaaagctgtcctggtcacaggctgtgactctggatttgggttctcattggccaagcatctgcattcaaaaggcttccttgtgtttgctggctgcttgatgaaggacaaaggccatgatggggtcaaggagctggacagcctaaacagtgaccgattgagaaccgtccagctcaatgtctgcagcagcgaagaggtggagaaagtggtggagattgtccgctcgagcctgaaggaccctgagaaaggcatgtggggcctcgttaacaatgccggcatctcaacgttcggggaggtggagttcaccagcctggagacctacaagcaggtggcagaagtgaacctttggggcacagtgcggatgacgaaatcctttctccccctcatccgaagggccaaaggccgcgtcgtcaatatcagcagcatgctgggccgcatggccaacccggcccgctccccgtactgcatcaccaagttcggggtagaggctttctcggactgcctgcgctatgagatgtaccccctgggcgtgaaggtcagcgtggtggagcccggcaacttcatcgctgccaccagcctttacagccctgagagcattcaggccatcgccaagaagatgtgggaggagctgcctgaggtcgtgcgcaaggactacggcaagaagtactttgatgaaaagatcgccaagatggagacctactgcagcagtggctccacagacacgtcccctgtcatcgatgctgtcacacacgccctgaccgccaccaccccctacacccgctaccaccccatggactactactggtggctgcgaatgcagatcatgacccacttgcctggagccatctccgacatgatctacatccgctgaagagtctcgctgtggcctctgtcagggatccctggtggaaggggaggggagggaggaacccatatagtcaactcttgattatccacgtgtggattatccaccatgccaggaagacccataactggttttaacactaactagagggaatgacttctttgcatagtgagtgacttgggccttcacaaacagggtgtggagtggcaggcagaggcctctaaatctcagggcaaacatggtgaatctatctctccggagataatttcatacagagattttaagaaaacatctttatattaaaaacagatctcatttgatccttaaaaaaaaaaaaaaaaaaaa

SEQ ID NO: 155 - DNA, 9348 bp, human
cagctgccacttttcaccgttagaagtagagctttttccagacctcctaccttttagtctactttgaaaggtgaaagaaagaacatcgtttcaggaataaaaatgcacagtagtagttatagttaccgtagcagtgattctgtgtttagtaacactaccagcactcgaaccagtcttgattcaaatgaaaatcttctcttggttcattgtggtccaacactgatcaactcttgcattagcttcggcagtgaatcctttgatggacacaggttagaaatgttgcaacagattgccaacagagttcagagggacagtgtcatctgtgaagacaaactgattcttgctggaaatgctcttcagtctgattctaaaagattagaatcaggagtgcagtttcagaatgaagcagaaattgctgggtatatacttgaatgtgagaaccttttacgccagcatgtaattgatgtacagattcttattgatggaaaatactaccaggcagatcaattggtacagagggttgcaaaactgcgtgacgaaattatggccttaaggaacgaatgttcttctgtgtacagcaaaggacgcatactgacaacagaacagacaaagctcatgatatcaggaatcactcaaagtttaaactcaggatttgcacagaccttacaccctagtctgacctcagggctgacccagagtttaacaccttccctaacctcttctagtatgacttctggcctgtcatcagggatgacttcccgcctgactccatctgtcactccagcttatacacctggtttcccatcaggattagttccaaatttcagttcaggagtagagccaaattcattgcaaactttgaagttgatgcagatccgaaaaccccttctaaagtcttctttgctggatcaaaatttaacagaagaagaaatcaatatgaaatttgttcaggatcttttgaattgggttgatgagatgcaggtacaactggaccgcactgagtggggctcagatttgccaagtgttgaaagccatttagaaaatcataaaaatgttcatagagctattgaagaatttgaatctagtctcaaagaagctaaaatcagtgagattcaaatgacagcacctcttaaactgacttatgcagaaaagttgcacagattagagagtcagtatgcaaaactcttgaatacatccaggaatcaagaacggcaccttgatacactccataattttgtaagtcgtgcgactaatgaacttatttggttgaatgaaaaagaagaggaggaagttgcttatgactggagtgagagaaacaccaacatagctaggaaaaaagattatcatgctgaattaatgagagaacttgatcaaaaggaagaaaatattaaatcagttcaggagatagcagagcagctacttctagaaaatcatccagcccggttaactattgaggcctacagagcggcaatgcagacgcagtggagctggatcttacagctctgccagtgtgtggagcagcacataaaggagaacacagcgtatttcgagtttttcaatgatgccaaagaagctactgattacttaaggaatctaaaagatgccattcagcggaagtacagctgtgatagatcaagcagcattcacaagctagaagaccttgttcaggaatcaatggaagagaaagaagaacttctgcagtacaaaagcactatagcaaacctaatgggaaaagcaaaaacaataattcaactgaagccaaggaattctgactgtccactcaaaacttctattccgatcaaagctatctgtgactacagacaaattgagataaccatttacaaagacgatgaatgtgttttggcgaataactctcatcgtgctaaatggaaggtcattagtcctactgggaatgaggctatggtcccatctgtgtgcttcaccgttcctccaccaaacaaagaagcggtggaccttgccaacagaattgagcaacagtatcagaatgtcctgactctttggcatgagtctcacataaacatgaagagtgtagtatcctggcattatctcatcaatgaaattgatagaattcgagctagcaatgtggcttcaataaagacaatgctacctggtgaacatcagcaagttctaagtaatctacaatctcgttttgaagattttctggaagatagccaggaatcccaagtcttttcaggctcagatataacacaactggaaaaggaggttaatgtatgtaagcagtattatcaagaacttcttaaatctgcagaaagagaggagcaagaggaatcagtttataatctctacatctctgaagttcgaaacattagacttcggttagagaactgtgaagatcggctgattagacagattcgaactcccctggaaagagatgatttgcatgaaagtgtgttcagaatcacagaacaggagaaactaaagaaagagctggaacgacttaaagatgatttgggaacaatcacaaataagtgtgaggagtttttcagtcaagcagcagcctcttcatcagtccctaccctacgatcagagcttaatgtggtccttcagaacatgaaccaagtctattctatgtcttccacttacatagataagttgaaaactgttaacttggtgttaaaaaacactcaagctgcagaagccctcgtaaaactctatgaaactaaactgtgtgaagaagaagcagttatagctgacaagaataatattgagaatctaataagtactttaaagcaatggagatctgaagtagatgaaaagagacaggtattccatgccttagaggatgagttgcagaaagctaaagccatcagtgatgaaatgtttaaaacgtataaagaacgggaccttgattttgactggcacaaagaaaaagcagatcaattagttgaaaggtggcaaaatgttcatgtgcagattgacaacaggttacgggacttagagggcattggcaaatcactgaagtactacagagacacttaccatcctttagatgattggatccagcaggttgaaactactcagagaaagattcaggaaaatcagcctgaaaatagtaaaaccctagccacacagttgaatcaacagaagatgctggtgtccgaaatagaaatgaaacagagcaaaatggacgagtgtcaaaaatatgcagaacagtactcagctacagtgaaggactatgaattacaaacaatgacctaccgggccatggtagattcacaacaaaaatctccagtgaaacgccgaagaatgcagagttcagcagatctcattattcaagagttcatggacctaaggactcgatatactgccctggtcactctcatgacacaatatattaaatttgctggtgattcattgaagaggctggaagaggaggagaagtcactggaagaagaaaagaaagaacatgttgaaaaagccaaagaattgcaaaaatgggtatcaaatatcagcaagacattgaaagatgcagagaaggctggaaaacctcccttctctaagcaaaagatttccagtgaggaaatatcaaccaagaaggaacaattatcggaagcacttcaaactatacagctttttttggcaaaacatggagacaaaatgacagatgaagaaagaaatgaattggaaaaacaagtgaaaactcttcaggaaagttataatttattattcagtgaatctctgaaacagctacaagaatcacaaacctcaggagatgtaaaggtagaggagaagctggataaagtgattgcaggcaccattgatcagacaactggagaagtcctttcagtctttcaagcagttttaagaggcctcattgactatgacacaggaattaggttgcttgagacacagctaatgatttctggtctaatttcaccagaattaagaaagtgctttgaccttaaagatgccaaaagtcatggccttattgatgaacaaattctgtgccaactcaaagaactaagtaaagctaaggagattatttctgctgcgtcacctaccacaattccagtactggatgctctagctcaaagcatgataacagaatccatggccatcaaagttcttgagatactgctttctacaggctctctggttattccagccacaggagaacagttgaccctacagaaggctttccaacagaacttggtttcctcagcattattttctaaagttctggaaaggcaaaatatgtgcaaagatcttattgacccctgcacctctgagaaggtttctttaatagatatggtacaaagaagtactttacaggaaaacacagggatgtggcttctacctgtgagaccacaagaaggaggtagaataacattaaaatgtggaagaaacataagcattttaagagcagctcatgaaggtctcatagaccgtgaaaccatgtttaggttgttaagtgcacagcttctttctggaggtctgatcaattccaactctggccaaagaatgactgttgaagaagctgtcagagaaggggtgattgacagggacactgctagcagtatcctcacatatcaggttcaaactggtggaatcatccagtcaaaccctgccaagcgtttaactgtagacgaagcagtacagtgtgatttaataacttccagcagtgctcttctggtcctggaagctcagcgaggctatgttggactcatttggccccattctggtgaaatatttcccacatcatcttccttgcagcaagaattgattacaaatgaattggcctacaaaatcctgaatggcagacaaaaaatagctgctctttatattccagaaagttctcaagtcattggtttggatgctgctaaacagctaggaattatagacaacaacacagcatcaattttaaaaaatataacactgcctgataaaatgccagatttaggagatttagaagcttgtaaaaatgccagaagatggctctctttttgtaaatttcaaccctccacagttcatgattacagacaagaagaggatgtttttgatggagaagaacctgtcactactcagacctcagaagaaactaaaaaattatttctatcttatttaatgataaatagctatatggatgcaaacacagggcaaaggcttttgctgtacgatggagacttggatgaggctgttggcatgctactggaaggctgtcatgcagaatttgatggaaacacagccataaaagaatgtctcgatgtcttaagctcatctggtgtatttcttaataatgcttcaggtagagaaaaggatgaatgtacagctacaccaagtagtttcaataaatgtcactgtggagaacctgaacatgaagagactcctgaaaatagaaagtgtgctatagatgaagaatttaatgaaatgagaaatactgttatcaatagtgaattttctcagtcaggaaaactggcaagtacaatatcaattgatcctaaagttaacagttcacccagtgtgtgtgttcccagtctcatatcatatttaacacagactgaacttgcagacattagcatgcttagaagtgactctgaaaacatacttacaaactatgaaaatcaaagccgagtggaaacaaatgaacgtgcaaatgaatgtagtcattctaaaaacattcaaaactttccaagtgatttaatagaaaatcctattatgaaatcaaaaatgagtaaattctgtggtgtgaatgaaacagagaatgaagataatacaaacagggattcacctatctttgactattcccccaggctaagtgccttgttaagtcatgataaattgatgcacagtcagggaagttttaatgatacacacaccccagagagcaatggaaataagtgtgaagccccagccttatcattcagtgacaaaaccatgttgtcaggtcaaagaataggagaaaaatttcaagaccagtttctgggaattgcagctattaacatcagtttaccaggagagcagtatggacagaaatctttaaatatgatttctagtaatcctcaagtacaatatcacaatgataaatacatttcaaatacttctggtgaggatgaaaaaacacatccaggttttcagcagatgcctgaagacaaggaagatgagtctgaaatagaagagtattcctgtgctgtgactccagggggtgatactgataatgccattgtgtctcttacttgtgctacaccattgcttgatgaaaccatcagtgctagtgactatgaaacgtcactgctgaatgatcagcagaataacacaggaacagacactgatagtgatgatgatttttatgatactcccttgtttgaagatgatgaccatgattctttgcttcttgatggtgatgatcgtgattgcctgcaccctgaggactacgacacactgcaagaggaaaatgatgagacggcttctcctgctgatgttttttatgatgtctcaaaagagaatgaaaattccatggttccccagggggcaccagttggtagcttaagtgtgaagaacaaagcacattgtcttcaggatttccttatggatgttgagaaagatgaattagattctggtgaaaaaatacatttaaatcctgttggctcagataaggtgaatggacagtcactggaaactggatcagaaagggaatgcacaaatatccttgaaggtgatgaatctgactcattgactgattatgatattgtaggaggaaaagagagcttcactgcatcattaaaatttgatgacagtggcagttggagaggaagaaaggaagagtatgtaactggacaggaatttcactccgatactgatcatttagattctatgcaaagtgaagaaagttatggggattatatatatgacagtaatgatcaggatgacgatgatgatgatggcattgatgaagaaggaggaggtataagagatgagaatggaaagcccaggtgccaaaatgtggctgaagatatggatatccagttgtgtgcctctattttaaatgaaaacagtgatgaaaatgaaaatattaatacaatgattcttctggataaaatgcacagttgtagctctttagaaaaacagcaaagggtaaatgttgtacagctagcatcacctagtgaaaataacttagttactgaaaaaagcaaccttccagaatatacaactgagattgctggaaaaagcaaagaaaatctgttgaaccatgagatggtacttaaggatgtattgccgcctatcattaaagacactgaatctgaaaaaacttttggccctgcaagtatttcacatgataataataatatcagttcaacttctgaattaggtactgatctagcaaacacaaaggttaagttgattcaagggtcagaattgccagaattgactgattctgtgaaaggtaaagatgaatattttaagaatatgacaccaaaagttgactcatctcttgatcacatcatttgtactgagcctgatttaataggaaaacctgctgaggaaagccatttgtcattgatagcctctgtaactgacaaagatcctcaaggaaatggaagcgatctcattaaagggagagatggcaaaagtgatattctaatagaagatgaaacatcaattcagaaaatgtacttgggtgaaggagaagtgcttgtagaaggtctagtagaagaagaaaataggcatctcaaacttttgcctggtaaaaatacaagggatagtttcaagttaattaatagtcagtttccatttccacaaatcacaaacaatgaagaacttaatcagaaaggaagccttaaaaaagcaactgtaactcttaaagatgaaccaaataatctacaaataatagttagtaaaagtcctgttcagtttgagaatcttgaagaaatttttgacacatcagtttccaaagagattagtgatgacattacttcagacattacatcgtgggaagggaatacacattttgaggagtcattcactgatggacctgagaaagagcttgatctgtttacttacttaaaacattgtgctaaaaatataaaagcaaaagatgtagccaaaccaaatgaagatgtcccaagccatgttttaataactgcccctcccatgaaagaacatttacaattaggagttaataatacaaaagagaagtccactagtacccaaaaagactcacctcttaatgacatgatccaaagcaatgatctttgtagtaaagaaagcatctcaggaggaggaacagaaatttctcagttcacaccagaaagtattgaagccacactttcaatattatctcgtaaacatgtagaagatgttgggaaaaatgattttctgcagtcggagcggtgtgcaaatggattaggaaatgataactccagtaacactttaaatactgactattcattcttagaaattaataataagaaagaaagaattgagcaacagctaccaaaagaacaagccttgtctccaagatcccaagaaaaggaggttcagattcctgaattgtctcaggtatttgtggaggatgtaaaggatatcttaaaaagcaggttgaaagaaggtcatatgaaccctcaagaggttgaagaaccttcagcctgtgcagacactaaaattttaattcaaaatttaattaaaaggattaccacatcacagttggtaaatgaggcatctactgtgcccagcgactctcaaatgagtgactcttctggagtttcccccatgactaactcatcagaactaaagccagaaagtagagatgatcctttctgtattggaaatcttaagtctgagcttctccttaatatattgaagcaagatcaacatagccaaaaaattacaggagtatttgaattgatgagagaattaactcatatggagtatgacctagagaaaagaggcattacgtctaaagtacttccactgcagcttgaaaatattttctacaaactgcttgctgatggatattcagagaaaatagaacatgttggagactttaatcaaaaagcatgttctacatctgagatgatggaagaaaagccacatattcttggtgatattaaaagcaaagaaggaaactactattctcctaatttagaaactgtaaaagaaattggactagaaagctctactgtgtgggcatcaacattgccaagagatgagaagctcaaggatctgtgtaatgatttcccaagccatttggaatgtacttcagggtctaaagagatggcttctggagatagctcaaccgaacaagtaagttgacctatacattttatacagaaaaagctgcatgaaccatgtgagaataatcccatacat

SEQ ID NO: 156 - DNA, 1521 bp, human
ggatccacgtcccacgggccggacccgcggccgcgttcggaaatcagcctgagcctgagtaccgctaaggctttaatcacgggtcccgagagccctaagtcttctctttgcttgctgatctcgtaccttaatgtgcaaaagaatcacgttgggaactgaaaattcagaatcctgggcctcactcccagaggatctgatctacatgtgtggagatgcccaggaatctgctttattctcttttgtcctcccacctgtccccccatttcagcacctcggtaacctctgccaaagtggctgtgaatggcgttcagctgcattaccagcagactggagagggagatcacgcagtcctgctacttcctgggatgttaggaagtggagagactgattttggacctcagctcaagaacctcaataagaagctcttcacggtggtcgcctgggatcctcgaggctatggacattccaggcccccagatcgcgatttcccagcagacttttttgaaagggatgcaaaagatgctgttgatttgatgaaggcgctgaagtttaagaaggtttctctgctggggtggagtgatgggggcataaccgcactcattgctgctgcaaaatatccatcttacatccacaagatggtgatctggggcgccaacgcctacgtcactgacgaagacagcatgatatatgagggcatccgagatgtttccaaatggagtgagagaacaagaaagcctctagaagccctctatgggtatgactactttgccagaacctgtgaaaagtgggtggatggcataagacagtttaaacatctcccagatggtaacatctgccggcacctgctgccccgggtccagtgccccgccttgattgtgcacggtgagaaggatcctctggtcccacggtttcatgccgacttcattcataagcacgtgaaaggctcacggctgcatttgatgccagaaggcaaacacaacctgcatttgcgttttgcagatgaattcaacaagttagcagaagacttcctacaatgagaatgcacactccagtcttggtggttccttcgtgtggggcttgatcgtgttgctgcctgttaacatgatgcctttgaaactctccgcctttgaaactttctacccctcccttcaatcttatcctaaccaaatgagaataatgacatattgaaaacagcctctagcttcaggctgggcacggtggctcacagctataatctcagcactttgggaggctgaggtgggagaattgcctgagcccaggagttcaagaccagcttgtgcaatatagggagactccggctctacaaaaaagagtttttcaaaattagccaggcgaagtggcacacatctgtggtcccaggtgctcaggaagctgaggtgggaggatcacttgagcccaattcaaagctgcagtgagctgtaattgcatcactgcactccaacctgggcaacagagtaagaccttgtcttaaaaaaaaataaaaacataaaaaaaaaaaaa

SEQ ID NO: 157 - DNA, 3022 bp, human
cggagtcagaaaggcgaggggcgccgggaactggcgtgtgggactccagacaggagaggctgcgccttccccgcaccgggaccttcgcgacacaccagatcctcgcccctggctcgcgcgaacgcacaggatgaccaccaccctcgtgtctgccaccatcttcgacttgagcgaagttttatgcaagggtaacaagatgctcaactatagtgctcccagtgcagggggttgcctgctggacagaaaggcagtgggcacccctgctggtgggggcttccctcggaggcactcagtcaccctgcccagctccaagttccaccagaaccagctcctcagcagcctcaagggtgagccagcccccgctctgagctcgcgagacagccgcttccgagaccgctccttctcggaagggggcgagcggctgctgcccacccagaagcagcccgggggcggccaggtcaactccagccgctacaagacggagctgtgccgcccctttgaggaaaacggtgcctgtaagtacggggacaagtgccagttcgcacacggcatccacgagctccgcagcctgacccgccaccccaagtacaagacggagctgtgccgcaccttccacaccatcggcttttgcccctacgggccccgctgccacttcatccacaacgctgaagagcgccgtgccctggccggggcccgggacctctccgctgaccgtccccgcctccagcatagctttagctttgctgggtttcccagtgccgctgccaccgccgctgccaccgggctgctggacagccccacgtccatcaccccaccccctattctgagcgccgatgacctcctgggctcacctaccctgcccgatggcaccaataacccttttgccttctccagccaggagctggcaagcctctttgcccctagcatggggctgcccgggggtggctccccgaccaccttcctcttccggcccatgtccgagtcccctcacatgtttgactctccccccagccctcaggattctctctcggaccaggagggctacctgagcagctccagcagcagccacagtggctcagactccccgaccttggacaactcaagacgcctgcccatcttcagcagactttccatctcagatgactaagccagggtagggagggacctcctgcctactccagcccctaccctgcacccacatcccataccctcttctccctacccatcccattccccacaggccctacattaacaaggttaagctcaacccctttcccccagcacctcagaatgtgccctccctctccccctcataaccccacctaacataaggacaagtcaatttgtcagtagcttcttctggcttgaaaccccctccctggattttatagcccacttaccatgcataacagacaagtcccatattttgtcagtagatgcctttttttttccggcttaagccttaagtgccaaatcacaagagaaaaagcagtaacagtttacagaagcaacttagtgccttgtaatctaactttgtcactgtgactacattacctcttcagcgccagagggcacccgtgggcctcccggagcctctgcccatggcggggtggagacccggaaccagcagccccctccactggcgacacaactgcaccttccctcatttcagtctcccgcacacttattcctcctcccctcttcccggtggcacctctccacctgtacccgcccccccaccccccccacccctgccccttggaagagttgttgccagaccagggttttgggggaaacctgtcttgacattcaaaacctttttcttcccgatctgaacccctgttgactaatcttgcctgggtttgtgtaggtctgcaggaaggaaggctgaaaaagcggacgaagattttgacttaagtgggactttgtgatttaattttttcttttttttaagtggggaggaaggggaagctagatggactaggagagacttgattttggtgctaaagttccccagttcatatgtgacatctttttaaaaaaaataacaacaaaaaaaaaatgagagaaaagctaaaaaaaaaaaagtaaggggtgagcagttaatggtattcattccacatacaatatctgtgtaaaacgatttcctgtagaagtagctttaatggtttttgctctagaataccgtaggtctatccttagagcactcacgccatgctttcttccctgggttttaaacttcatataactttcagaaattggagagcaaaaattttgcttgtcactgcacatcaatataaaaaagcttatttaacttatcaaaacgtatttattgccaaactatgcttttttttgttaattttgttcatatttatcgggatgacaaatccatagaatatattcttttatgttaaattatgatcttcatattaatcttaaaattttgtgacgtgtctttttcctttttttccacagttttaatatattattcttcaacgacattttttgtaactttacacttttttggttattttattttaaaaaaatgaaaaattaatttaaaaaaatgcaaaaaactgttggattatttattttagaaattcccccctttgtgttggactgcaaattgagtttctttctctttaggcctttcacaactaggactgagaatgtatgtaaaagttctgtgacagtacagaaggaaaacaactttttatgtatagcttctaaaaggggaaaaaaaaaaaaagagaaaccctttgacttccacgtgcccatctcaagacattccactcacagatttgaggttctggattccaggtctggagttttccaatgttaatgtaaacagaactggcacacacacattaagatgaatgtaattattattcctcttgctggtcactaccgtcgctttctatttctctttctttgtgtgaatttatttaaaagaaaaaaaaactttttgtaacgactatttgcagtttaaaaatcaataaaccccgttttttcaagaaacatt

SEQ ID NO: 158 - DNA, 636 bp, human
agcggcctggctaactcctgccaggcagtgcccttcccggagcgtgccctcgccgctggtacggctcctacctggtctggaaagagctgggaggcttcacagagaaggctgtggttcccctgggcctctacactgggcagctggccctgaactgggcatggccccccatcttctttggtgcccgacaaatgggctgggccttggtggatctcctgctggtcagtggggcggcggcagccactaccgtggcctggtaccaggtgagcccgctggccgcccgcctgctctacccctacctggcctggctggccttcgcgaccacactcaactactgcgtatggcgggacaaccatggctggcatgggggacggcggctgccagagtgagtgcccggcccaccagggactgcagctgcaccagcaggtgccatcacgcttgtgatgtggtggccgtcacgctttcatgaccactgggcctgctagtctgtcagggccttggcccaggggtcagcagagcttcagaggttgccccacctgagcccccacccgggagcagtgtcctgtgctttctgcatgcttagagcatgttcttggaacatggaattttataagctgaataaagtttttgacttccttt

SEQ ID NO: 159 - DNA, 2114 bp, human
ccgcgcagtcgtcacccgcccgggatcaggaggccgggggcgcccgccggtcgggcctgggcggccgcatgaagctgacgcggaagatggttctgacccgagccaaggcctcggagctgcacagcgtgcgcaagctcaactgctggggcagccgcctcacagatatctccatttgccaggagatgcccagcctggaggtgatcacgctcagtgtcaacagcatctccaccctggagcctgtgagccggtgccagcgcctgagtgagctgtacctgcggaggaaccgcatccccagcctggctgagctcttctacctgaaggggctgccgcgtctgcgggtgctgtggctggccgagaacccgtgctgcggcaccagcccccaccgctaccgcatgaccgtgctgcgcaccctgccgcgcctacagaagctggacaaccaggctgtgacggaggaggagctgtcccgtgcactgagtgagggagaggagatcactgcggccccagagagagagggcacaggccacggcggccccaagctatgctgcacactgagctccctcagctccgctgctgagactggccgggacccgctggacagcgaggaggaggcaaccagcggcgcccaggatgaacgtggcctgaagccgccttcccggggccagtttccttccctctcagccagggatgcctcgagcagccacaggggcaggaacgtcctgactgccatcctgctgctgctgcgggagctggatgcagaggggctggaggccgtgcagcagactgtgggcagccggctgcaggccctgcgtggggaagaggtgcaggagcacgccgagtgaccgcaggacctgaacgccgctccagcctccacggggaccccagcgtcttccccagcccccgggagctggagggtggctgccatggccgcagccccggccccacacaaaagcctccccggtttgccacatcggccgagggcaggagtgggtgttaggtactggctaaccggggcggtggagatgcctgtctacaccagtcctgtccccaggactccccttctgtggtctggaggttctaggctggcctgggctcttaaagggaggattttgcaggctgtcctccctaataaaagattttcccaaggttgatctggaggtgacgtttcccaaggcatggttgtgacagtcttcctgaaagcaagggccgtttctccacagaatgaggaggtcttcacggatggctttgccgattccagcccttggtccttggatagatttctgttgggcaagggagacttcgagaatgctggcacccatagcgacatctgccctgagctgctcagcaggcaggcagcagcctcccgcacccatgggagagagttttgttttcttggccgggctgggcaggtgcgccttcctttctctctcctgtgaagaactgcaggagggccctcagctgtgaggttgtggatgaacaggcctgttcgccctggggtccgggcctggcacaggaagcagctagactaggggagtccttggagcatctgagaggggttttctttcctctgggaagagtcgcaagtcttatgaggatgccacaatctgggcagtgacccgtggccctggggaccttcctagtgccccccaaaaccaaggaagcattcacgtgagatggggagtcagccttccagctggtgtgtaggaaagccaggtccctgggcccttgtcccatgtggggttgagatccagatctccatgagatattcccatcctccgccgagcggtgatgcgtgaccgtgtgtgcaggccgctgttctcccaagctcggggccatgccgtgccaccgtcaccagagccagctgcagcactggggcagccactgtcgccggacttggggaagcccagggtgaagacagtcactcatccgtgcaagctctccagaagggatgcaagctctccagaaggggtgtgatctctgagcagtggggagtggagtcaccactcgggacatagagggtggacagttcaggcctgtgtctgcctccttgggactgtggagtgggtgccctcagtaaagcgctttgttggaatggtaaaaaaaaaaaaaaaaaaaaa

SEQ ID NO: 160 - DNA, 2531 bp, human
agggagagaactctggaggaacgctgagctgagcagcaccgaggacagcgcccggcagcgcccgcgcccaggtctccctccgcagccctgactcgcgcacacgctgagcttttgctcactccccttcgcgcggacacagacacacgcatattcacacacccagacacacaccccgctgtacaatggcagaatcccacctgcagtcatccctcatcacagcctcacagtttttcgagatctggctccatttcgacgctgacggaagtggttacctggaaggaaaggagctgcagaacttgatccaggagctccagcaggcgcgaaagaaggctggattggagttatcacctgaaatgaaaacttttgtggatcagtatgggcaaagagatgatggaaaaataggaattgtagagttggctcacgtattacccacagaagagaatttcctgctgctcttccgatgccagcagctgaagtcctgtgaggaattcatgaagacatggagaaaatatgatactgaccacagtggcttcatagaaactgaggagcttaagaactttctaaaggacctgctagaaaaagcaaacaagactgttgatgacacaaaattagccgagtatacagacctaatgctgaaactatttgattcaaataatgatgggaagctggaattaactgagatggccaggttactaccagtgcaggagaattttcttcttaaattccagggaatcaaaatgtgtgggaaagagttcaataaggcttttgagctgtatgatcaggacggcaatggatacatagatgaaaatgaactggatgctttactgaaggatctgtgcgagaagaataaacaggatctggatattaataatattacaacatacaagaagaacataatggctttgtcggatggagggaagctgtaccgaacggatcttgctcttattctctgtgctggggataactagagttggtggccgcaaccacttgctagtgatacactgtatctaaaaaataactgtgcactataagggagtaggctgtattttcttttatatctgtaaatttaactgcatatagataattatccaggatgtgtggctcattcttttcagcttgtttctatactgtttgtaatatacagtttttgtaaccatatgattgaaaagaagaaagtctatgcttaggccagtcagtacacccaattttaaaaaataacatattcttgctttcacaaatatagttgaacaagatttccctaaaaattccaccaggattaatctctaaaattctagtctctgatttgcaaatgcacatttgtcactgaataatggaattatgtataacaagccaaacattcttattttagacaaccatagaactgtcccacaaaatatttctaagcttatttctaactattaggaggaatgtgcttttccatctaaaatactcaccaaaatatagttaattgtggctttatgaagttaacagtctcattacagatttagtttaccaatcaacagcatgtctactgcttggatccatacaaaactatcggttcaagttgatgtgacaagggaagggagcaccagatgacacataaatctgtctgattctatgcctgtatttccaacaaacttactgtcagagaatatgacctaaatccattttctaaactgttttcatgtgttgcaaattattctagtcaactgctgttttatgtcatactctgtgtaatctctgattaaatttaatatactgcatatcctggtgtctagtttgcatacttcctggattttctttctatgtagaactgttcatttccaccaagggtatctgctgcctctgaaaatatttttttctagctataacaactctattttttactacataattaaattttaatgtaaaattcatagcatcctgattattgaatgttatatcatcaatacttttgtgtattctgtggattctatatttcatattgagatcagcattcaaaatagttctatttctatctgcaaatagtttcaaatgagtttaaaaaaataacatctgaaaagaaatgctaatgtaatcatttatcttatctagcaagaagattctaaaacattctttaacatacatctaagtcagtttcacatatttgtagctagaatatcctatactggttatagttgatatgtaacagttggtgattttagatttctttgattgtgaaacagggagctatgagagatgtgtccatgtgaaatttacagttactgcctaggagttaatgatcgttctgggtcagcttgaatgtccccattctataaattcaacacttattttctgaattcataaaaataaccaaaaaatgtgagctataatgtttccctcaagaacaaacagaaacgagatttgccaaaaactaaaattcaacaaatgatgttgagtgggagattggctttgcctttagcgtgtaaatggaagcactgccattagactgaatttaactactaagaataaataaagaagaaaataacctt

SEQ ID NO: 161 - DNA, 1899 bp, human
gtccgtactgcagagccgctgccggagggtcgttttaaagggccgcgttgccgccccctcggcccgccatgctgctatccgtgccgctgctgctcggcctcctcggcctggccgtcgccgagcccgccgtctacttcaaggagcagtttctggacggagacgggtggacttcccgctggatcgaatccaaacacaagtcagattttggcaaattcgttctcagttccggcaagttctacggtgacgaggagaaagataaaggtttgcagacaagccaggatgcacgcttttatgctctgtcggccagtttcgagcctttcagcaacaaaggccagacgctggtggtgcagttcacggtgaaacatgagcagaacatcgactgtgggggcggctatgtgaagctgtttcctaatagtttggaccagacagacatgcacggagactcagaatacaacatcatgtttggtcccgacatctgtggccctggcaccaagaaggttcatgtcatcttcaactacaagggcaagaacgtgctgatcaacaaggacatccgttgcaaggatgatgagtttacacacctgtacacactgattgtgcggccagacaacacctatgaggtgaagattgacaacagccaggtggagtccggctccttggaagacgattgggacttcctgccacccaagaagataaaggatcctgatgcttcaaaaccggaagactgggatgagcgggccaagatcgatgatcccacagactccaagcctgaggactgggacaagcccgagcatatccctgaccctgatgctaagaagcccgaggactgggatgaagagatggacggagagtgggaacccccagtgattcagaaccctgagtacaagggtgagtggaagccccggcagatcgacaacccagattacaagggcacttggatccacccagaaattgacaaccccgagtattctcccgatcccagtatctatgcctatgataactttggcgtgctgggcctggacctctggcaggtcaagtctggcaccatctttgacaacttcctcatcaccaacgatgaggcatacgctgaggagtttggcaacgagacgtggggcgtaacaaaggcagcagagaaacaaatgaaggacaaacaggacgaggagcagaggcttaaggaggaggaagaagacaagaaacgcaaagaggaggaggaggcagaggacaaggaggatgatgaggacaaagatgaggatgaggaggatgaggaggacaaggaggaagatgaggaggaagatgtccccggccaggccaaggacgagctgtagagaggcctgcctccagggctggactgaggcctgagcgctcctgccgcagagcttgccgcgccaaataatgtctctgtgagactcgagaactttcatttttttccaggctggttcggatttggggtggattttggttttgttcccctcctccactctcccccaccccctccccgccctttttttttttttttttaaactggtattttatcctttgattctccttcagccctcacccctggttctcatctttcttgatcaacatcttttcttgcctctgtgccccttctctcatctcttagctcccctccaacctggggggcagtggtgtggagaagccacaggcctgagatttcatctgctctccttcctggagcccagaggagggcagcagaagggggtggtgtctccaaccccccagcactgaggaagaacggggctcttctcatttcacccctccctttctcccctgcccccaggactgggccacttctgggtggggcagtgggtcccagattggctcacactgagaatgtaagaactacaaacaaaatttctattaaattaaattttgtgtctc

SEQ ID NO: 162 - DNA, 2140 bp, human
gcggccgctgggctcaggctgtccgctctgggctccgcggcctcggccccgctgcactccacctccgccccctcggactccctcccctctgcttctactcctcctgctccagtgcggatcgtttcgcaactgcttgccactcgtcccgtgcctggctgtttttccatttcccggccccctcttcttgagtactttaccccctgcatttggggacagggactggaaaaggggcgggtggagcgtccagtggagaagaaggaagcgaggcccgcaggaggaggaggatcggcggactgtggggaggagaccccacgccaccctttctggtcatctcccctcccgccccgcccctgcgcacactccctcgcgggcgagctactttcggaccaggaaagtaagagcggccctgggtgacagcgccgcggggccagtcccggggttagccgcgcgtctgctcgcttctggtccgtcgcgctcccagccagggcacagcccggaccgaggatggcttcgaccacaacctgcaccaggttcacggacgagtatcagcttttcgaggagcttggaaagggggcattctcagtggtgagaagatgtatgaaaattcctactggacaagaatatgctgccaaaattatcaacaccaaaaagctttctgctagggatcatcagaaactagaaagagaagctagaatctgccgtcttttgaagcaccctaatattgtgcgacttcatgatagcatatcagaagagggctttcactacttggtgtttgatttagttactggaggtgaactgtttgaagacatagtggcaagagaatactacagtgaagctgatgccagtcattgtatacagcagattctagaaagtgttaatcattgtcacctaaatggcatagttcacagggacctgaagcctgagaatttgcttttagctagcaaatccaagggagcagctgtgaaattggcagactttggcttagccatagaagttcaaggggaccagcaggcgtggtttggttttgctggcacacctggatatctttctccagaagttttacgtaaagatccttatggaaagccagtggatatgtgggcatgtggtgtcattctctatattctacttgtggggtatccacccttctgggatgaagaccaacacagactctatcagcagatcaaggctggagcttatgattttccatcaccagaatgggacacggtgactcctgaagccaaagacctcatcaataaaatgcttactatcaaccctgccaaacgcatcacagcctcagaggcactgaagcacccatggatctgtcaacgttctactgttgcttccatgatgcacagacaggagactgtagactgcttgaagaaatttaatgctagaagaaaactaaagggtgccatcttgacaactatgctggctacaaggaatttctcagcagccaagagtttgttgaagaaaccagatggagtaaaggagtcaactgagagttcaaatacaacaattgaggatgaagatgtgaaagcacgaaagcaagagattatcaaagtcactgaacaactgatcgaagctatcaacaatggggactttgaagcctacacaaaaatctgtgacccaggccttactgcttttgaacctgaagctttgggtaatttagtggaagggatggattttcaccgattctactttgaaaatgctttgtccaaaagcaataaaccaatccacactattattctaaaccctcatgtacatctggtaggggatgatgccgcctgcatagcatatattaggctcacacagtacatggatggcagtggaatgccaaagacaatgcagtcagaagagactcgtgtgtggcaccgccgggatggaaagtggcagaatgttcattttcatcgctcggggtcaccaacagtacccatcaagccaccctgtattccaaatgggaaagaaaacttctcaggaggcacctctttgtggcaaaacatctaaggcctgaaaaccattcacatatgggtcttctaaatttcaacagtgccacttctgcattctctgttctcaaggcacctggatggtgaccctgggccgtcctctcctcctcttcatgcatgtttctgagtgcatgaag

SEQ ID NO: 163 - DNA, 4191 bp, human
ggcacgtgacggtcgggccgcctccgcctctctctttactgcggcgcggggcaaggtgtgcgggcgggaaggggcacgggcacccccgcggtccccgggaggctagagatcatggaagggaagtggttgctgtgtatgttactggtgcttggaactgctattgttgaggctcatgatggacatgatgatgatgtgattgatattgaggatgaccttgacgatgtcattgaagaggtagaagactcaaaaccagataccactgctcctccttcatctcccaaggttacttacaaagctccagttccaacaggggaagtatattttgctgattcttttgacagaggaactctgtcagggtggattttatccaaagccaagaaagacgataccgatgatgaaattgccaaatatgatggaaagtgggaggtagaggaaatgaaggagtcaaagcttccaggtgataaaggacttgtgttgatgtctcgggccaagcatcatgccatctctgctaaactgaacaagcccttcctgtttgacaccaagcctctcattgttcagtatgaggttaatttccaaaatggaatagaatgtggtggtgcctatgtgaaactgctttctaaaacaccagaactcaacctggatcagttccatgacaagaccccttatacgattatgtttggtccagataaatgtggagaggactataaactgcacttcatcttccgacacaaaaaccccaaaacgggtatctatgaagaaaaacatgctaagaggccagatgcagatctgaagacctattttactgataagaaaacacatctttacacactaatcttgaatccagataatagttttgaaatactggttgaccaatctgtggtgaatagtggaaatctgctcaatgacatgactcctcctgtaaatccttcacgtgaaattgaggacccagaagaccggaagcccgaggattgggatgaaagaccaaaaatcccagatccagaagctgtcaagccagatgactgggatgaagatgcccctgctaagattccagatgaagaggccacaaaacccgaaggctggttagatgatgagcctgagtacgtacctgatccagacgcagagaaacctgaggattgggatgaagacatggatggagaatgggaggctcctcagattgccaaccctagatgtgagtcagctcctggatgtggtgtctggcagcgacctgtgattgacaaccccaattataaaggcaaatggaagcctcctatgattgacaatcccagttaccagggaatctggaaacccaggaaaataccaaatccagatttctttgaagatctggaacctttcagaatgactccttttagtgctattggtttggagctgtggtccatgacctctgacattttttttgacaactttatcatttgtgctgatcgaagaatagttgatgattgggccaatgatggatggggcctgaagaaagctgctgatggggctgctgagccaggcgttgtggggcagatgatcgaggcagctgaagagcgcccgtggctgtgggtagtctatattctaactgtagcccttcctgtgttcctggttatcctcttctgctgttctggaaagaaacagaccagtggtatggagtataagaaaactgatgcacctcaaccggatgtgaaggaagaggaagaagagaaggaagaggaaaaggacaagggagatgaggaggaggaaggagaagagaaacttgaagagaaacagaaaagtgatgctgaagaagatggtggcactgtcagtcaagaggaggaagacagaaaacctaaagcagaggaggatgaaattttgaacagatcaccaagaaacagaaagccacgaagagagtgaaacaatcttaagagcttgatctgtgatttcttctccctcctcccctgcaagagtggtcctaggagaggacctggcacaccttaggttgacattcagaaaacttcaagacatcaccatcagcaggctccagttgaacactagtctgtgtaactttaaacatctagcagtaaatacttgcagttgtgatataaaggaccctgtttctgtagaaaagaaaacatttaacataatggttgtgaaatgtaacatgaagcaaactaactttttttttttaacatctttgtttttaaaatagaatgatagaactttgccagtctttaagatcttggcttaatttaatgtattaatctgtttgtgcaaacataataccaccatttaaaaatgttagggagatgagttgcagtttttataatagattttttttaaagtttggtattgtaaaacattcacacctctgtccctcaaaattgataattacgtttaaagtgcagtcatttgtggttagaatcttgttttgtttgcttccattattgagttcctcctaaggaaattgaggagagggactgaatagaagcccaaattcatataaaagttgcgtttaagttgtattaaaaatagatatataagaaaaaattctttcacttgatgtttgttagaccagaaagtgtgtgtgttctgtagctcagttcccagacagctttttaggtagtggaggaggtggcttcatgtggcacttgggcatttatattccacttgggagggtcaggctgtggccttctggagcaggtggcttgttaaggaacgctagcagggcatggcacgtgagctccggaatagatgtcttcatcacttcttccactgtgtgttgacactgttttccttacctatttcctcagatccccagctttctcctctgctatgcattttcttcacagtgcagcttgcagtccgttgctgaaaatgattataagccctgcataatgttaagctttattgtgattacgtgtatgtttcttctttcttttaagcagacccatacctttccagggtcaaagtacagaatagaatacattgatacaaagtacagaaaaatactttgatttttatccatttcttttactctgtgtaaagactttagaagtctaattcacaggcaaaccaatacagaattgactgcagttgaacagactagaagtatttgtgggaggagtgacatgaagcatgagttatctgattttttttgtagctgctatatattttaagccttcatttgcaattcatgtaacagttgtgtcataaattacacaataaagcagtcctgttcaaatttttttttaacgtggcttgtagaatttttaaaaaagtgatcttaggtttgttttttcatgcgggatgcagatgggtgctatcagagcctctcccacaccactatagtgtaataatgttattattactctacactgaaacgtattcagagttagatattattttagcttcagttgttctttagaggctttcaaatgtaccgatgatactgtttcttgcactgaatatataaacactccacagtgtttatattgggaagatattgggaaggaaatatatttgtaaaagatgaaggctgtatctatttttttttctttttaaactggttcacttaaattcttttgaggatgggatgtatttttcttgctgttcagtgctttttccttttcatctgttgttctgtggtcacagtgaccttagctacatagcagactttcccaaatgtattgattacaaataaacagttgttacttagcaagacctgaaaatatgtctgcaggtttctccttgaagcaaatgtgtgggatcattgcatttccagaaatctgcctccttcaccctccgttgacagtatatgtcatgcctcactttcttctagctgagctttaaatcattagagcttaaattgtcagatcgttcattgcctttccagggttatttagtaaagtttgttgaaaacaaaaacgccttttcttggttcttttttcagttattttgaaggtccagcatcctgattaaatgtctgacacattaatgaatgaccagcagcagctttcagctcttaaaaagacacttatattttgattttacatgctggttacctgttccattgttgtcaaatgcccactctccatcagatgtgttcctccattttcttatccacaaagtactcctcacttttcaatttgtcatgttactaaatggtgttacattaaagccctgtgttaagtgtcaaaaaaaaaaaaaaaaaaaaaa

SEQ ID NO: 164 - DNA, 2385 bp, human
atggccgacttcgatgatcgtgtgtcggatgaggagaaggtacgcatagctgctaaattcatcactcatgcacccccaggggaatttaatgaagtattcaatgacgttcggctactacttaataatgacaatctcctcagggaaggggcagcacatgcatttgcccagtataacatggatcagttcacgcctgtgaagatagaaggatatgaagatcaggtcttaattacagagcacggtgacctgggtaatagcagatttttagatccaagaaacaaaatttcctttaaatttgaccacttacggaaagaagcaagtgacccccagccagaagaagcagatggaggtctgaagtcttggagagaatcctgtgacagtgctttaagagcctatgtgaaagaccattattccaacggcttctgtactgtttatgctaaaactatcgatgggcaacagactattattgcatgtattgaaagccaccagtttcagcctaaaaacttctggaatggtcgttggagatcagagtggaagttcaccatcacaccacctacagcccaggtggttggcgtgcttaagattcaggttcactattatgaagatggcaatgttcagttggttagtcataaagatgtacaggattcactaactgtttcgaatgaagcccaaactgccaaggagtttattaaaatcatagagaatgcagaaaatgagtatcagacagcaattagtgaaaactatcaaacaatgtcagataccacattcaaggccttgcgccgccagcttccagttacccgcaccaaaatcgactggaacaagatactcagctacaagattggcaaagaaatgcagaatgcttaaaggctgaatgtaggattcttcagtatgtggaaagacaaggattcaacgtgtggtcatatgataaataagtgatttataaacaagagtgatattttgctagggctttcaaagttaaccggttttctagcctcatggaatactgttgaacctatagcgttgtcttgattcttttgtgttctctgccttgtaattttctgttactgctatatctacgtgtaaatctttttttctttttttttttttttttttttcttttttggttaattctgccacatttaatgttggtgagagagtgatctatcctaatgacatttactgtttaaaaaagtttcctagccatgaagccctgctactgatttagacaaggtattatggtcattactttgtacccctatccttccaagcacttctggtacttcagtcgtttttactgatccaccaacacctaaagaggctatgctacagtctctagctaaatggaagacacattcatccttctccctctgactgctttgatcatcatttattgcatcgtcatatcatatttatcgcatctcataactaactttctaaagtttggattgggacttttcaggtcctttttggagggcaaaggaagttccagcttctctggggaacttgtttttaaatccaaagacttgaaccacattccctgcacatgaacatgtttgcttttatcccttctctcattggctccttcccatcttagtaccattgtagttatacatctgcattttttagaagcattttacccatttatttttttaaacattcaagaactgctgacgtactgtggatgtagagtataaaacttgaaaaatgcagatgttgaaggaataataggtatcttgtgctttaatactttatggcaggattgtactataagcaaatgaattaaacagctatgtaaatcataaagaaaaactaaaaatgaaccaaagtgaaaggataacttccaggcagtatctttctattgtaacctgttatttaaggaaatactagtgatttcttctaaataggatgtaaacttctttcaaattactcttcctcagtctgcctgccaagaactcaagtgtaactgtgataaaataacctttcccaggtatattcggcaggtatgtgtgtaatctcagaatacacaggtgacatagatatgatatgacaactggtaatggtggattcatttacattgtttacacttctatgaccaggccttaagggaaggtcagttttttaaaaaaccaagtagtgtcttcctacctatctccagatacatgtcaaaaagaaaaggtgtttgtgctccgttttgtttctgctcagtaatatagtcaagcaagtttgttccaggtgacccattgagctgtgtatgcatttttgtttatttcaataaaatatatttgtattatttgtccttcatactatccatccataccacactatcttctgtatcaggtagtctaatagaaatatacctgttttgttctaaaaaaaaaaaaaaaaaaa

SEQ ID NO: 165 - DNA, 2373 bp, human
cccctcccttagcgggggcgcgcggcgctgaggaccgcacggaaacggggaagtcaggtggccgctgccgccgccgccgccgcggtttgtcgccagaaggaagatggcggatctggaggagcagttgtctgatgaagagaaggtgcgtatagcagcaaaattcatcattcatgcccctcctggagaatttaatgaggttttcaatgatgttcggttactgcttaataatgacaatcttctcagggaaggagcagcccatgcatttgcacagtataacttggaccagtttactccagtaaaaattgaaggttatgaagatcaggtattgataacagaacatggcgacttgggaaatggaaagtttttggatccaaagaacagaatctgttttaaatttgatcacttaaggaaggaggcaactgatccaagaccctgtgaagtagaaaatgcagttgaatcatggagaacttcagtagaaactgctctgagagcttacgtaaaagaacattacccgaatggagtctgcactgtgtatggcaaaaaaatagatggacagcaaaccattattgcatgcatagaaagccatcagttccaagcaaaaaatttttggaatggtcgttggaggtcagaatggaagtttacaatcactccttcaaccactcaagtggttggcatcttgaaaattcaggttcattattatgaagatggtaatgttcagctagtgagtcataaagatatacaagattccctaacagtgtctaatgaagtgcaaacagcaaaagaatttataaagattgtagaagctgcagaaaatgaataccagactgccatcagtgagaattatcagacaatgtcggacactactttcaaagccttacgtcgacagttgccagttacacgcactaagattgattggaacaagatccttagctacaagattggcaaagagatgcagaatgcataagatgaacattgcatgaccggatcattttagtgtctttgcgttaaaaaatcattgcaaaagtattctgaactgtcaagctgcccagtcagatgggctgttgccatttaaaatcactgtaattaattagtttgattagagcacaaagcttagctaatcaaccattatttttcattttgtttgttctaagaggattgaaaatcagtttagtttaaatgtctttctgttaggcctttctttcttacaatgaagagatgattcttctagtttatggttaaaagtttttgaagtgtctcaaaaatattttactaactgtaaccctaaaattgatgtcttttggtttatgaaatcagtaatttttgatatttccccagttctttttaatggggtcaataatggacattctagtttaaggtggttgatggatttagccatatatgctgctaaagaaattgtctaccttttcttcctcacctgttccatttatgtaaagttgagattagagggaaagcattttctatatcaattgtgtttaaacctttcaagaaggttatttagctagcttagtgttgaactaaattttttttaaacaaggcaaggtctaatgctgttttgagattctgaaattaatgaaaatacttatttcagaaatgcatttaatgctttttttcttgtgacagttacgcaaatcagcttgaattccatatgtccctgagttatttttatcataaagccacaaatgtattataacaaggcaaattgtaatatatataatcctgaactcatgaccatgtctcggtttattttttttttcttggattgaaaagtactgaaattcaatgtgacattaaaatgcaaattttcctatttatttgagtagaaaatcacttaccagtgagcatatatattttaaaatactttctttggatattgtaattcttaactggttgtaaattagaaaagctgggattacatatggtgtgcggttacagtctaaattttttcatcctcctatgcatcataagcatgtttgtaatattttcaaaaatagttctactgatgctacaggaatttcaagcctgtggtgaatgttagtatttaccatagggagtgaagtggagttatggtttcattcaatagagtattgctgattatacttgagtggaatcctttcctcacgtactcccacagacgtctgggcctggaaattttttttttattttattttattgtttttttttttagaaaaacaccacttttattatgtacaataaaatatttcattagcttgaattgtatagatttttaaaaattcaatgaaagcatgttgtttaatttctttttaaaatcactgttgggctttgaaagcattgagaatataatatgaaattatgaaaaaaaaaaaaaaaaaa

SEQ ID NO: 166 - DNA, 2479 bp, human
agtgcagacgcggctcctagcggatgggtgctattgtgaggcggttgtagaagttaataaaggtatccatggagaacactgaaaactcagtggattcaaaatccattaaaaatttggaaccaaagatcatacatggaagcgaatcaatggactctggaatatccctggacaacagttataaaatggattatcctgagatgggtttatgtataataattaataataagaattttcataaaagcactggaatgacatctcggtctggtacagatgtcgatgcagcaaacctcagggaaacattcagaaacttgaaatatgaagtcaggaataaaaatgatcttacacgtgaagaaattgtggaattgatgcgtgatgtttctaaagaagatcacagcaaaaggagcagttttgtttgtgtgcttctgagccatggtgaagaaggaataatttttggaacaaatggacctgttgacctgaaaaaaataacaaactttttcagaggggatcgttgtagaagtctaactggaaaacccaaacttttcattattcaggcctgccgtggtacagaactggactgtggcattgagacagacagtggtgttgatgatgacatggcgtgtcataaaataccagtggaggccgacttcttgtatgcatactccacagcacctggttattattcttggcgaaattcaaaggatggctcctggttcatccagtcgctttgtgccatgctgaaacagtatgccgacaagcttgaatttatgcacattcttacccgggttaaccgaaaggtggcaacagaatttgagtccttttcctttgacgctacttttcatgcaaagaaacagattccatgtattgtttccatgctcacaaaagaactctatttttatcactaaagaaatggttggttggtggttttttttagtttgtatgccaagtgagaagatggtatatttggtactgtatttccctctcattttgacctactctcatgctgcagagggtactttaagacatactccttccatcaaatagaaccactatgaagctacctcaaacttccagtcaggtagttgcaattgaattaaattaggaataaataaaaatggatactggtgcagtcattatgagaggcaatgattgttaatttacagctttcatgattagcaagttacagtgatgctgtgctatgaattttcaagtaattgtgaaaaagttaaacattgaagtaatgaatttttatgatattccccccacttaagactgtgtattctagttttgtcaaactgtagaaatgatgatgtggaagaacttaggcatctgtgggcatggtcaaaggctcaaacctttattttagaattgatatacacggatgacttaactgcattttagaccatttatctgggattatggttttgtgatgtttgtcctgaacacttttgttgtaaaaaaataataataataatgtttaatattgagaaagaaactaatattttatgtgagagaaagtgtgagcaaactaacttgacttttaaggctaaaacttaacattcatagaggggtggagttttaactgtaaggtgctacaatgcccctggatctaccagcataaatatcttctgatttgtccctatgcatatcagttgagcttcatataccagcaatatatctgaagagctattatataaaaaccccaaactgttgattattagccaggtaatgtgaataaattctataggaacatatgaaaatacaacttaaataataaacagtggaatataaggaaagcaataaatgaatgggctgagctgcctgtaacttgagagtagatggtttgagcctgagcagagacatgactcagcctgttccatgaaggcagagccatggaccacgcaggaagggcctacagcccatttctccatacgcactggtatgtgtggatgatgctgccagggcgccatcgccaagtaagaaagtgaagcaaatcagaaacttgtgaagtggaaatgttctaaaggtggtgaggcaataaaaatcatagtactctttgtagcaaaattcttaagtatgttattttctgttgaagtttacaatcaaaggaaaatagtaatgttttatactgtttactgaaagaaaaagacctatgagcacataggactctagacggcatccagccggaggccagagctgagcactcagcccgggaggcaggctccaggcctcagcaggtgcggagccgtcactgcaccaagtctcactggctgtcagtatgacatttcacgggagatttcttgttgctcaaaaaatgagctcgcatttgtcaatgacagtttcttttttcttactagacctgtaacttttgtaaatacacacagcatgtaatggtatcttaaagtgtgtttctatgtgacaattttgtacaaatttgttattttccatttttatttcaaaatatacattcaaacttaaaatt

SEQ ID NO: 167 - DNA, 2586 bp, human
cgcccgcgcgcgggctcaactttgtagagcgaggggccaacttggcagagcgcgcggccagctttgcagagagcgccctccagggactatgcgtgcggggacacgggtcgctttgggctcttccacccctgcggagcgcactatcccgagccaggggcggtgcaagccccgcccggccctacccagggcggctcctccctccgcagcgccgagacttttagtttcgctttcgctaaaggggccccagacccttgctgcggagcgacggagagagactgtgccagtcccagccgccctaccgccgtgggaacgatggcagatgatcagggctgtattgaagagcagggggttgaggattcagcaaatgaagattcagtggatgctaagccagaccggtcctcgtttgtaccgtccctcttcagtaagaagaagaaaaatgtcaccatgcgatccatcaagaccacccgggaccgagtgcctacatatcagtacaacatgaattttgaaaagctgggcaaatgcatcataataaacaacaagaactttgataaagtgacaggtatgggcgttcgaaacggaacagacaaagatgccgaggcgctcttcaagtgcttccgaagcctgggttttgacgtgattgtctataatgactgctcttgtgccaagatgcaagatctgcttaaaaaagcttctgaagaggaccatacaaatgccgcctgcttcgcctgcatcctcttaagccatggagaagaaaatgtaatttatgggaaagatggtgtcacaccaataaaggatttgacagcccactttaggggggatagatgcaaaacccttttagagaaacccaaactcttcttcattcaggcttgccgagggaccgagcttgatgatggcatccaggccgactcggggcccatcaatgacacagatgctaatcctcgatacaagatcccagtggaagctgacttcctcttcgcctattccacggttccaggctattactcgtggaggagcccaggaagaggctcctggtttgtgcaagccctctgctccatcctggaggagcacggaaaagacctggaaatcatgcagatcctcaccagggtgaatgacagagttgccaggcactttgagtctcagtctgatgacccacacttccatgagaagaagcagatcccctgtgtggtctccatgctcaccaaggaactctacttcagtcaatagccatatcaggggtacattctagctgagaagcaatgggtcactcattaatgaatcacatttttttatgctcttgaaatattcagaaattctccaggattttaatttcaggaaaatgtattgattcaacagggaagaaactttctggtgctgtcttttgttctctgaattttcagagacttttttataatgttattcatttggtgactgtgtaactttctcttaagattaattttctctttgtatgtctgttaccttgttaatagacttaatacatgcaacagaagtgacttctggagaaagctcatggctgtgtccactgcaattggtggtaacagtggtagagtcatgtttgcacttggcaaaaagaatcccaatgtttgacaaaacacagccaaggggatatttactgctctttattgcagaatgtgggtattgagtgtgatttgaatgatttttcattggcttagggcagattttcatgcaaaagttctcatatgagttagaggagaaaaagcttaatgattctgatatgtatccatcaggatccagtctggaaaacagaaaccattctaggtgtttcaacagagggagtttaatacaggaaattgacttacatagatgataaaagagaagccaaacagcaagaagctgttaccacacccagggctatgaggataatgggaagaggtttggtttcctgtgtccagtagtgggatcatccagaggagctggaaccatggtgggggctgcctagtgggagttaggaccaccaatggattgtggaaaatggagccatgacaagaacaaagccactgactgagatggagtgagctgagacagataagagaataccttggtctcacctatcctgccctcacatcttccaccagcaccttactgcccaggcctatctggaagccacctcaccaaggaccttggaagagcaagggacagtgaggcaggagaagaacaagaaatggatgtaagcctggcccataatgtgaacataagtaatcactaatgctcaacaatttatccattcaatcatttattcattgggttgtcagatagtctatgtatgtgtaaaacaatctgttttggctttatgtgcaaaatctgttatagctttaaaatatatctggaactttttagattattccaagccttattttgagtaaatatttgttacttttagttctataagtgaggaagagtttatggcaaagatttttggcactttgttttcaagatggtgttatcttttgaattcttgataaatgactgtttttttctgcctaatagtaactggttaaaaaacaaatgttcatatttattgattaaaaatgtggttgcttaattcct

SEQ ID NO: 168 - DNA, 2279 bp, human
tgcctgctgagggtggagacccacgagccgaggcctcctgcagtgttctgcacagcaaaccgcacgctatggctgacagccgggatcccgccagcgaccagatgcagcactggaaggagcagcgggccgcgcagaaagctgatgtcctgaccactggagctggtaacccagtaggagacaaacttaatgttattacagtagggccccgtgggccccttcttgttcaggatgtggttttcactgatgaaatggctcattttgaccgagagagaattcctgagagagttgtgcatgctaaaggagcaggggcctttggctactttgaggtcacacatgacattaccaaatactccaaggcaaaggtatttgagcatattggaaagaagactcccatcgcagttcggttctccactgttgctggagaatcgggttcagctgacacagttcgggaccctcgtgggtttgcagtgaaattttacacagaagatggtaactgggatctcgttggaaataacacccccattttcttcatcagggatcccatattgtttccatcttttatccacagccaaaagagaaatcctcagacacatctgaaggatccggacatggtctgggacttctggagcctacgtcctgagtctctgcatcaggtttctttcttgttcagtgatcgggggattccagatggacatcgccacatgaatggatatggatcacatactttcaagctggttaatgcaaatggggaggcagtttattgcaaattccattataagactgaccagggcatcaaaaacctttctgttgaagatgcggcgagactttcccaggaagatcctgactatggcatccgggatctttttaacgccattgccacaggaaagtacccctcctggactttttacatccaggtcatgacatttaatcaggcagaaacttttccatttaatccattcgatctcaccaaggtttggcctcacaaggactaccctctcatcccagttggtaaactggtcttaaaccggaatccagttaattactttgctgaggttgaacagatagccttcgacccaagcaacatgccacctggcattgaggccagtcctgacaaaatgcttcagggccgcctttttgcctatcctgacactcaccgccatcgcctgggacccaattatcttcatatacctgtgaactgtccctaccgtgctcgagtggccaactaccagcgtgatggcccgatgtgcatgcaggacaatcagggtggtgctccaaattactaccccaacagctttggtgctccggaacaacagccttctgccctggagcacagcatccaatattctggagaagtgcggagattcaacactgccaatgatgataacgttactcaggtgcgggcattctatgtgaacgtgctgaatgaggaacagaggaaacgtctgtgtgagaacattgccggccacctgaaggatgcacaaattttcatccagaagaaagcggtcaagaacttcactgaggtccaccctgactacgggagccacatccaggctcttctggacaagtacaatgctgagaagcctaagaatgcgattcacacctttgtgcagtccggatctcacttggcggcaagggagaaggcaaatctgtgaggccggggccctgcacctgtgcagcgaagcttagcgttcatccgtgtaacccgctcatcactggatgaagattctcctgtgctagatgtgcaaatgcaagctagtggcttcaaaatagagaatcccactttctatagcagattgtgtaacaattttaatgctatttccccaggggaaaatgaaggttaggatttaacagtcatttaaaaaaaaaatttgttttgacggatgattggattattcatttaaaatgattagaaggcaagtttctagctagaaatatgattttatttgacaaaatttgttgaaattatgtatgtttacatatcacctcatggcctattatattaaaatatggctataaatatataaaaagaaaagataaagatgatctactcagaaatttttatttttctaaggttctcataggaaaagtacatttaatacagcagtgtcatcagaagataacttgagcaccgtcatggcttaatgtttattcctgataataattgatcaaattcatttttttcactggagttacattaatgttaattcagcactgatttcacaacagatcaatttgtaattgcttacatttttacaataaataatctgtacgtaagaaca

SEQ ID NO: 169 - DNA, 4265 bp, human
agggcagaggacacccagttggtggccgggagggcctcggctttccagggacagaggcccaactccaggacgccccagctggcccagcccctcctctttccctcaaggctgcaggaggtcgggaaaggcagtcctggtagaggcctgtcctgggctccaggttggcccctgagggtggccctcctcatgccggcttcaagactgagggacagggcagccagttcagcctcgggatccacctgtggctccatgtcccagacgcaccctgtgctggagagcggcctcctggcatctgccggctgctccgcaccccggggtcccaggaagggcggcccagccccagtggacaggaaagctaaggcctcagcgatgccggactccccagcggaggtgaagacgcagccccggtccacaccccccagcatgccgcccccaccgcctgccgcatcccagggggccacacgccccccctccttcacgccacacacacatcgagaggacgggcctgcgacgctgccccacggccgttttcatggctgcttaaaatggtctatggtctgtctcttgatgaacggcagcagccactcaccaacagccatcaatggtgcaccgtgcacacccaacggcttcagcaatggcccggccacctcgtccacagcctccttgtccacacagcacctgcccccagcctgcggggcccggcagctcagcaagctcaagcgcttcctcaccacactgcagcagtttggcagcgacatctccccagagattggggagcgcgtgcgcacactggtgctgggcctggtgaactcgacattgacgatcgaggagtttcattccaagcttcaggaggccaccaacttccctctgcggccgtttgtcattcccttcctgaaggcaaacctgcccttgctgcagcgggagctcctgcactgtgcacgcctggccaagcagacgcccgcccagtacttggcccagcatgagcagctcctgctggacgccagcgcctcctcccccatcgactcctcagagctgctactggaagtcaacgagaacggcaagaggaggacgcccgacaggaccaaagagaacgggtcagaccgcgacccgctgcaccccgagcacctcagcaaacggccatgcaccctgaaccctgcccagcgctacagccccagcaacgggccaccgcagcccacaccgccgccgcactaccgcctggaggacatagccatggcccaccacttccgagatgcctaccgccacccagacccccgggagctacgagagcgccatcggccgcttgtggtgcctgggtcccggcaggaagaagtgatcgaccacaagctcacagagcgtgagtgggcagaagagtggaagcacctcaacaacctcctgaactgcatcatggacatggtggagaagacgcggcgctcgctcacggtgctgcgcaggtgccaggaggccgaccgcgaggagctcaaccactgggcgcggcgctacagcgacgccgaggacacaaagaagggccccgctcccgccgcggcccggccccgcagcagctccgccggtcccgaagggcctcagctagacgtgcctcgcgagttcctgccgaggaccctcaccggctacgtgcctgaggacatctggaggaaggctgaagaggccgtgaatgaggtgaagcggcaggccatgtcggagctgcagaaagccgtgtcggacgcggagcgcaaagcgcacgagctcatcaccacggagcgtgccaagatggagcgggccctggccgaggcgaagcggcaggcctccgaggacgccctgacggtcatcaaccagcaggaggactccagcgagagctgctggaactgcgggcggaaagccagtgagacgtgcagcggctgcaacgcggcacgctactgcgggtccttctgccagcatcgggactgggagaagcatcaccacgtgtgtggccagagcctgcagggccccacagccgtggtggccgacccggtgcctggaccgcccgaagccgcccacagcctgggcccctccctgcctgtgggtgctgccagccccagcgaagccggctctgcggggccttctcgccccggctcccccagcccacctggcccactggacaccgtgccccgctgaccccactggcccctggcctgccggacacagcaccgtgccaaccccacccagctccaggcccaccggatgctgtgcctggcctccgatgcctggcctgccagacactgcgccccgcctgacctgggggagccgaccaattagtcactgctgctactgcccctctccgaaagaagacacagaaccaacaaaaccgcattcagtgcacctgcctcagctacctaatgattccgcgcggagacctcctgacaacgtctcttcaagcatcctcagaagcctcgactgagctttagacagcagagcagatgccgcaggcgcggcggctctgcccacctctcttttcctctctgtctgtctctccccctctgtcttctctatcctctctctctctatgactatcacacactttctcttcaatgaaaaaatcgaattggtggcttatattttcagcaaagaattttggggggttttgtgtgttggcaaaagagctactcagaaatggacaaagaaaacgggggggttctccccctcctgattaaaaagggagaaagaaaactgcgattttatagctggagatctgaacccagctgtgcccctcccccaggggcgtgaggctgatcagcgaagacgggaggaaagatttcgatttctgactcaagatgcatttttggtttcagatttttttttcctgtaatgttaaactctttggctttaagtaaaaatccaaaaagtttttttaaaaaagcaaaggaagcatacttgtgaactaccttgctagctagccagccaaggataccggacacacctctgctccaaaggaaatccaaaaaagcaaacacaagaaatcaaaatccaaaatttgtttgtcactgccaaagtatttttttcactgtttcacttgctcttgggtttgtttggatgtgggtctttttctcttctgttctgattttgtttgtgggtgtcgggatatttgggtgcagagggtttgtgcccagttagaagcgacttttgttctcttctgcgtaggcgttggtgcgtccgccgcgtgtgcgtggtccgtgtgccgttgctccggcctgcgtctccatatgtgtaggaaaggacacgccgtctgtcctcacgccccctgtgacttttcatatttccgttttccacttgtggaaaaaaagtgctaaagttttcttcccagagagagcataattccgaaacaaaactgtgacaatcttttgggttgattctcgactgcttttcgagcatgcggagccagcaggcctccctgaaacactgcttctcggccagcccgtcctcctctacctctctcctctccgcgccctccgacctctctcggccccctcaccccagctccgacctctctcagccccatcgccccaactccaacctctcggccccatcgccccaccgcagctactcccctttcttccaaacttttgcagaaaaaacaaaaaaactacaaacaaaagcagccctctgcctcctccccagggaagaccctgaccgtgtacatagccctggtgctcctgcccagccacccctcagatgcgttcgcctctggccctggggtgtgtctcggtgacgttttctatcagacgtgctccctcccatcctccagccctgcccaccctccctccactcctctcaactgcctcagcgatttcaagaaggaaataaagggataaagaaattcatgcttgcaccgagtacaaggacagacagcaggcacggcccgcagcctggcatctgtgcgtgtggcgtggcccgtggcttggcatctgtgtgcgtggtgtggcccgtggcctggcatctgtgtgcgtggcgtggcccgtggcctggcatctgtgtgtgtggcgtggcccgtggcctggcatctgtgcgcgtggcgtggcccgtggcctggcatctgtgtgcgtggctatcaggagttctaggaactcagtgcaatacgggagtgacccagctactgaaccagccacgaacagcccgccagaggcctgaagctgagcgtgtacgttaatgtgaatgtatatagtctttgcagaggtccaaatgatattcatgatggtaataaacgagatgtttgccaaataaaaaacagaaaccgc

SEQ ID NO: 170 - DNA, 3923 bp, human
agtgctgctgcggcgtcccgcggcctccccgagtcgggcgggaggggagagcgggtgtggatttgtcttgacggtaattgttgcgtttccacgtctcggaggcctgcgcgctgggttgctccttcttcgggagcgagctgttctcagcgatcccactcccagccggggctccccacacacactgggctgcgtgcgtgtggagtgggacccgcgcacacgcgtgtctctggacagctacggcgccgaaagaactaaaattccagatggcaaactcaatgaatggcagaaaccctggtggtcgaggaggaaatccccgaaaaggtcgaattttgggtattattgatgctattcaggatgcagttggaccccctaagcaagctgccgcagatcgcaggaccgtggagaagacttggaagctcatggacaaagtggtaagactgtgccaaaatcccaaacttcagttgaaaaatagcccaccatatatacttgatattttgcctgatacatatcagcatttacgacttatattgagtaaatatgatgacaaccagaaacttgcccaactcagtgagaatgagtactttaaaatctacattgatagccttatgaaaaagtcaaaacgggcaataagactctttaaagaaggcaaggagagaatgtatgaagaacagtcacaggacagacgaaatctcacaaaactgtcccttatcttcagtcacatgctggcagaaatcaaagcaatctttcccaatggtcaattccagggagataactttcgtatcacaaaagcagatgctgctgaattctggagaaagttttttggagacaaaactatcgtaccatggaaagtattcagacagtgccttcatgaggtccaccagattagctctggcctggaagcaatggctctaaaatcaacaattgatttaacttgcaatgattacatttcagtttttgaatttgatatttttaccaggctgtttcagccttggggctctattttgcggaattggaatttcttagctgtgacacatccaggttacatggcatttctcacatatgatgaagttaaagcacgactacagaaatatagcaccaaacccggaagctatattttccggttaagttgcactcgattgggacagtgggccattggctatgtgactggggatgggaatatcttacagaccatacctcataacaagcccttatttcaagccctgattgatggcagcagggaaggattttatctttatcctgatgggaggagttataatcctgatttaactggattatgtgaacctacacctcatgaccatataaaagttacacaggaacaatatgaattatattgtgaaatgggctccacttttcagctctgtaagatttgtgcagagaatgacaaagatgtcaagattgagccttgtgggcatttgatgtgcacctcttgccttacggcatggcaggagtcggatggtcagggctgccctttctgtcgttgtgaaataaaaggaactgagcccataatcgtggatccctttgatccaagagatgaaggctccaggtgttgcagcatcattgacccctttggcatgccgatgctcgacttggacgacgatgatgatcgtgaggagtccttgatgatgaatcggttggcaaacgtccgaaagtgcactgacaggcagaactcaccagtcacatcaccaggatcctctccccttgcccagagaagaaagccacagcctgacccactccagatcccacatctaagcctgccacccgtgcctcctcgcctggatctaattcagaaaggcatagttagatctccctgtggcagcccaacgggttcaccaaagtcttctccttgcatggtgagaaaacaagataaaccactcccagcaccacctcctcccttaagagatcctcctccaccgccacctgaaagacctccaccaatcccaccagacaatagactgagtagacacatccatcatgtggaaagcgtgccttccaaagacccgccaatgcctcttgaagcatggtgccctcgggatgtgtttgggactaatcagcttgtgggatgtcgactcctaggggagggctctccaaaacctggaatcacagcgagttcaaatgtcaatggaaggcacagtagagtgggctctgacccagtgcttatgcggaaacacagacgccatgatttgcctttagaaggagctaaggtcttttccaatggtcaccttggaagtgaagaatatgatgttcctccccggctttctcctcctcctccagttaccaccctcctccctagcataaagtgtactggtccgttagcaaattctctttcagagaaaacaagagacccagtagaggaagatgatgatgaatacaagattccttcatcccaccctgtttccctgaattcacaaccatctcattgtcataatgtaaaacctcctgttcggtcttgtgataatggtcactgtatgctgaatggaacacatggtccatcttcagagaagaaatcaaacatccctgacttaagcatatatttaaagggagatgtttttgattcagcctctgatcccgtgccattaccacctgccaggcctccaactcgggacaatccaaagcatggttcttcactcaacaggacgccctctgattatgatcttctcatccctccattaggtgaagatgcttttgatgccctccctccatctctcccacctcccccacctcctgcaaggcatagtctcattgaacattcaaaacctcctggctccagtagccggccatcctcaggacaggatctttttcttcttccttcagatccctttgttgatctagcaagtggccaagttcctttgcctcccgctagaaggttaccaggtgaaaatgtcaaaactaacagaacatcacaggactatgatcagcttccttcatgttcagatggttcacaggcaccagccagaccccctaaaccacgaccgcgcaggactgcaccagaaattcaccacagaaaaccccatgggcctgaggcggcattggaaaatgtcgatgcaaaaattgcaaaactcatgggagagggttatgcctttgaagaggtgaagagagccttagagatagcccagaataatgtcgaagttgcccggagcatcctccgagaatttgccttccctcctccagtatccccacgtctaaatctatagcagccagaactgtagacaccaaaatggaaagcaatcgatgtattccaagagtgtggaaataaagagaactgagatggaattcaagagagaagtgtctcctcctcgtgtagcagcttgagaagaggcttgggagtgcagcttctcaaaggagaccgatgcttgctcaggatgtcgacagctgtggcttccttgtttttgctagccatatttttaaatcagggttgaactgacaaaaataatttaaagacgtttacttcccttgaactttgaacctgtgaaatgctttaccttgtttacaatttggcaaagttgcagtttgttcttgtttttagtttagttttgttttggtgttttgatacctgtactgtgttcttcacagaccctttgtagcgtggtcaggtctgctgtaacatttcccaccaactctcttgctgtccacatcaacagctaaatcatttattcatatggatctctaccatccccatgccttgcccaggtccagttccatttctctcattcacaagatgctttgaaggttctgattttcaactgatcaaactaatgcaaaaaaaaaagtatgtattcttcactactgagtttcttctttggaaaccatcactattgagagatgggaaaaacctgaatgtataaagcatttatttgtcaataaactgccttttgtaaggggttttcacaaaaaaaaaaaaaaaa

SEQ ID NO: 171 - DNA, 4513 bp, human
tgaatgaaggagcgggcggaggaggaagtgtcatggcgtcgggccgtggagcttcttctcgctggttctttactcgggaacagctggagaacacgccgagccgccgctgcggagtggaggcggataaagagctctcgtgccgccagcaggcggccaacctcatccaggagatgggacagcgtctcaatgtctctcagcttacaataaacactgcgattgtttatatgcacaggttttatatgcaccattctttcaccaaattcaacaaaaatataatatcgtctactgcattatttttggctgcaaaagtggaagaacaggctcgaaaacttgaacatgttatcaaagtagcacatgcttgtcttcatcctctagagccactgctggatactaaatgtgatgcttaccttcaacagactcaagaactggttatacttgaaaccataatgctacaaactctaggttttgagatcaccattgaacacccacacacagatgtggtgaaatgtacccagttagtaagagcaagcaaggatttggcacagacatcctatttcatggctaccaacagtctgcatcttacaaccttctgtcttcagtacaaaccaacagtgatagcatgtgtatgcattcatttggcttgcaaatggtccaattgggagatccctgtatcaactgatggaaagcattggtgggaatatgtggatcctacagttactctagaattattagatgagctaacacatgagtttctacaaatattggagaaaacgcctaataggttgaagaagattcgaaactggagggctaatcaggcagctaggaaaccaaaagtagatggacaggtatcagagacaccacttcttggttcatctttggtccagaattccattttagtagatagtgtcactggtgtgcctacaaacccaagttttcagaaaccatctacatcagcattccctgcgccagtacctctaaattcaggaaatatttctgttcaagacagccatacatctgataatttgtcaatgctagcaacaggaatgccaagtacttcatacggtttatcatcacaccaggaatggcctcaacatcaagactcagcaaggacagaacagctatattcacagaaacaggagacatctttgtctggtagccagtacaacatcaacttccagcagggaccttctatatcactgcattcaggattacatcacagacctgacaaaatttcagatcattcttctgttaagcaagaatatactcataaagcagggagcagtaaacaccatgggccaatttccactactccaggaataattcctcagaaaatgtctttagataaatatagagaaaagcgtaaactagaaactcttgatctcgatgtaagggatcattatatagctgcccaggtagaacagcagcacaaacaagggcagtcacaggcagccagcagcagttctgttacttctcccattaaaatgaaaatacctatcgcaaatactgaaaaatacatggcagataaaaaggaaaagagtgggtcactgaaattacggattccaataccacccactgataaaagcgccagtaaagaagaactgaaaatgaaaataaaagtttcttcttcagaaagacacagctcttctgatgaaggcagtgggaaaagcaaacattcaagcccacatattagcagagaccataaggagaagcacaaggagcatccttcaagccgccaccacaccagcagccacaagcattcccactcgcatagtggcagcagcagcggtggcagtaaacacagtgccgacggaataccacccactgttctgaggagtcctgttggcctgagcagtgatggcatttcctctagctccagctcttcaaggaagaggctgcatgtcaatgatgcatctcacaaccaccactccaaaatgagcaaaagttccaaaagttcaggtgggctacggacatctcagcaccctcgtgaaactggacaagaagccagtggagaccaacggtcctgatgccaatcacgagtacagtacaagcagccagcatatggactacaaagacacattcgacatgctggactcactgttaagtgcccaaggaatgaacatgtaataatttgtttaggtcaatttttcctttacttttttaatttaaaaattgttagaatggaaaaattccttctgatctagcagtggtaacccctgctgttgctgccactgcttcaatatttgtaagtgctgctttattcttcattctgaaaagaagagattatagtaaacaagtctttatctccacatatgatagtgttataaatactgtaaaagcatggaaggtgcaaaactcagtatttctacaattgcagctaagaacattaggatgaatggctggctgcttctaggaatataagatgcctcaagcattcattatttatgatttgaatactgtagctattttttgttgcttggcttttgaatgagtgtaaattgttttcttttgtgtatttatacttgtatgtatgatttgcatgtttcaatgataaagggataaaacagtatactgacaactgtttacaagaaagtggagaaaaatgtacatacatttttgtatgtttagatattaccgtaaatactcaggattggagctgcttgtaagtataacaatatacagaataactttattttatcttgtcagagtccatcactaatctaaaacaaaggtggcacttttttatgttaaccttaaactctaggccttactggaagccactgataggggaccattcactaccagatgtgtgcagtgcaacagatggtcatatacactgtgaggcactgaaattttgccttcagaggttctgaccagattggctgctgaaatagcccctaactttctgaaggcttgaagaggaaaaaataaagtttacatactcttgatgtgaagtgcatttaaatgtttgttggcttgttgcagttctatgaaacagagctgttaataatggttatgtggattactgtgatttgaaaactaaattcacaataacttacctagtagagatttagtgagttgtttcctttaaagaattttacactacatattttaatagtaaacagggatcacttttcctttagcattcagaatgacaccatattcttaaatatactccttccctgaagcgtgtttgtgtgtgatgccatatttctttttcaggtaaatgtagtcttccttataaaaatgaaattaaacctatgctctcaattcttttatattctaacaataaataaaaaagaaaagattactgactgtgcattgtacctgtatttatagtttatggttatcaggaagctctgtaagaaagaaaaggtcagcctcccaggcaaaccagtagtggaggttttacatttgtttgcacatctcagtatatttctgttgaggtaaagtttgcacagtcatctgacttctgatcaagcattagattttaacttgtttagattttgtcttaaacaccagtaatatggctcttgtttatcagctaatcttgaatttattctgtggtaaatcttttgagttgttgagtatatttgagattgattggattcgacctcttgttgaactgaaaacttaattttttctctgtatttttgttacaaagccactgatacgtgcacaattgtaattaagtatgttgcagttgtaaatattagagtttaatctcatgctctacctttatttagcaattacctaatttgccagtagctttataatttttaaagataattgttcattattttgtcaatgttatttgaacttggggtacttaggagcctctttgtagggactgtgcctaggtagcatgtcctaacatttgttctggtcttgcataacttcagtaatctttgtcattatatgtaactttgttgctctgtatggcataatattgtatccataaacatggtaattttgatacagttatacttttacagtggtacataatccaaggactagtatagaattaagctgagtgcaagatgagggagggaagggctttcttggtaatttagatgtgaaacctctacagagctatcatgtaaaaactacataaggtggttgtgctactgtataattgggggtgataataccaggaattttaataagattttgtaaagaatatccagaaaagtagtgaacttattttcagtagacatagaaaacaatgtgaatatttaaggtctgtgactatagttaaacttcactaagaatttgcagaattgttttgagatgtgtgaataaaggtaattttattgaatcttcattggtgctaatgatggacagttaaaaagatagctagtgtatattgttatgggtcagtacttattagtacttccaaaattgaatttgaaatgctatgtattcacttttcactctgtaaatgtaattctttacaatgactttatttattaaagggcagccagttgtcatttgtaaaaaaaaaaaaaaaaaaaaa

SEQ ID NO: 172 - DNA, 916 bp, human
ggccggggggcgcagctagagagccccggagccgcggcgggagaggaacgcgcagccagccttgggaagcccaggcccggcagccatggcggtggaaggaggaatgaaatgtgtgaagttcttgctctacgtcctcctgctggccttttgcgcctgtgcagtgggactgattgccgtgggtgtcggggcacagcttgtcctgagtcagaccataatccagggggctacccctggctctctgttgccagtggtcatcatcgcagtgggtgtcttcctcttcctggtggcttttgtgggctgctgcggggcctgcaaggagaactattgtcttatgatcacgtttgccatctttctgtctcttatcatgttggtggaggtggccgcagccattgctggctatgtgtttagagataaggtgatgtcagagtttaataacaacttccggcagcagatggagaattacccgaaaaacaaccacactgcttcgatcctggacaggatgcaggcagattttaagtgctgtggggctgctaactacacagattgggagaaaatcccttccatgtcgaagaaccgagtccccgactcctgctgcattaatgttactgtgggctgtgggattaatttcaacgagaaggcgatccataaggagggctgtgtggagaagattgggggctggctgaggaaaaatgtgctggtggtagctgcagcagcccttggaattgcttttgtcgaggttttgggaattgtctttgcctgctgcctcgtgaagagtatcagaagtggctacgaggtgatgtaggggtctggtctcctcagcctcctcatctgggggagtggaatagtatcctccaggtttttcaattaaacggattattttttcagaccgaaaagaaaaaaaaaaaaaaaaaaaaaa

SEQ ID NO: 173 - DNA, 1543 bp, human
cgcccccgcagctgccgccgccgccagggcccggactcggacgcgtggtagcctagagtcctggggagcttctgtccacctgtcctgcagaggagtcgtttccagcccggctgccccaggatgggtgagttcaacgagaagaagacaacatgtggcaccgtttgcctcaagtacctgctgtttacctacaattgctgcttctggctggctggcctggctgtcatggcagtgggcatctggacgctggccctcaagagtgactacatcagcctgctggcctcaggcacctacctggccacagcctacatcctggtggtggcgggcactgtcgtcatggtgactggggtcttgggctgctgcgccaccttcaaggagcgtcggaacctgctgcgcctgtacttcatcctgctcctcatcatctttctgctggagatcatcgctggtatcctcgcctacgcctactaccagcagctgaacacggagctcaaggagaacctgaaggacaccatgaccaagcgctaccaccagccgggccatgaggctgtgaccagcgctgtggaccagctgcagcaggagttccactgctgtggcagcaacaactcacaggactggcgagacagtgagtggatccgctcacaggaggccggtggccgtgtggtcccagacagctgctgcaagacggtggtggctctttgtggacagcgagaccatgcctccaacatctacaaggtggagggcggctgcatcaccaagttggagaccttcatccaggagcacctgagggtcattggggctgtggggatcggcattgcctgtgtgcaggtctttggcatgatcttcacgtgctgcctgtacaggagtctcaagctggagcactactgaccctgccttgggccttgctgctgctgcacccaactactgagctgagaccactgagtaccaggggctgggctccctgatgacacccaccctgtgccatcaccataacctctggggaccccaacctcagaggcagcttcaagtgccttttgctgcgcaccaatgcccagcaggggaggtgaggggggctggcggggcgaagtttggggggtgttttgtggggctccccggacatactctctgcctggtggtcagatgcaggttggaaggggccttgctgagtggcgcaaggccgagcgttcccagcagggggagaaacccttcacaccccaggcccttcaggaactggggctttgccttgcagccacatggccccatcccagttggggaagccaggtgagctctgacccttgggcctgggcctctgcccctcccaacccagccgtcgtctccctcgacagcgcccctgctgtcttccccaccgcagtcaccaccacccgaaatgccacgtggtcactgtgcactgccctgttcatgtgcctctgcggggcagggccttcctggttttgtacactgctgtacccagatgcctacaaccatccctgccacatacaggtgctcaataaacacttgtagagcagatggaaaaaaaaaaaaaaaaaaa

SEQ ID NO: 174 - DNA, 3659 bp, human
gcagccagtcgcggaggcggggaggctgcgcggtcagaggcgcctggagcgagcgaatcctggcccaccgcctgcccaaccgcgtgaccttgattgagttaatgaacttcacgcctcagcgtccaggtctgtaaaatggggtgtctaacgcagaccgtacagcccagctgggtttagcaaacttccgggagccagttggagcctctccccatccctagcggtgatcccaggtgacgacatgccgcggggggtcctgcggaggccaccctagggcgttgctgctgcctttgggagtgtggagctccaaaccatgtcgcgagaggcggattttgggaggccgggatcctcgcgccagggggatgtgcgagggtgtgggataaatcttaattcctccggcccacccaaagcctggaaatccagcctccgcgcctcttgccctgcgggccccgccctcagtcccgccctcatctaacccgctaccccattggtggcgtccggcggcgcggctgctgttatttttcgaatatataaggaggtggaagtggcagctgcaactagaggcttccctggctggtgcctgagcccggcgtccctcgccccccgccctccccgcatccctctcctccctcgcgcctggccctgtggctcttcctccctccctccttccccccccccccacccctcgcccgctgcctccctcggcccagccagctgtgccggcgtttgttggctgccctgcgcccggccctccagccagccttctgccggccccgccgcgatggaggtgccccagccggagcccgcgccaggctcggctctcagtccagcaggcgtgtgcggtggcgcccagcgtccgggccacctcccgggcctcctgctgggatctcatggcctcctggggtccccggtgcgggcggccgcttcctcgccggtcaccaccctcacccagaccatgcacgacctcgccgggctcggcagccgcagccgcctgacgcacctatccctgtctcgacgggcatccgaatcctccctgtcgtctgaatcctccgaatcttctgatgcaggtctctgcatggattcccccagccctatggacccccacatggcggagcagacgtttgaacaggccatccaggcagccagccggatcattcgaaacgagcagtttgccatcagacgcttccagtctatgccggtgaggctgctgggccacagccccgtgcttcggaacatcaccaactcccaggcgcccgacggccggaggaagagcgaggcgggcagtggagctgccagcagctctggggaagacaaggagaatgatggatttgtcttcaagatgccatggaagcccacacatcccagctccacccatgctctggcagagtgggccagccgcagggaagcctttgcccagagacccagctcggcccccgacctgatgtgtctcagtcctgaccggaagatggaagtggaggagctcagccccctggccctaggtcgcttctctctgacccctgcagagggggatactgaggaagatgatggatttgtggacatcctagagagtgacttaaaggatgatgatgcagttcccccaggcatggagagtctcattagtgccccactggtcaagaccttggaaaaggaagaggaaaaggacctcgtcatgtacagcaagtgccagcggctcttccgctctccgtccatgccctgcagcgtgatccggcccatcctcaagaggctggagcggccccaggacagggacacgcccgtgcagaataagcggaggcggagcgtgacccctcctgaggagcagcaggaggctgaggaacctaaagcccgcgtcctccgctcaaaatcactgtgtcacgatgagatcgagaacctcctggacagtgaccaccgagagctgattggagattactctaaggccttcctcctacagacagtagacggaaagcaccaagacctcaagtacatctcaccagaaacgatggtggccctattgacgggcaagttcagcaacatcgtggataagtttgtgattgtagactgcagatacccctatgaatatgaaggcgggcacatcaagactgcggtgaacttgcccctggaacgcgacgccgagagcttcctactgaagagccccatcgcgccctgtagcctggacaagagagtcatcctcattttccactgtgaattctcatctgagcgtgggccccgcatgtgccgtttcatcagggaacgagaccgtgctgtcaacgactaccccagcctctactaccctgagatgtatatcctgaaaggcggctacaaggagttcttccctcagcacccgaacttctgtgaaccccaggactaccggcccatgaaccacgaggccttcaaggatgagctaaagaccttccgcctcaagactcgcagctgggctggggagcggagccggcgggagctctgtagccggctgcaggaccagtgaggggcctgcgccagtcctgctacctcccttgcctttcgaggcctgaagccagctgccctatgggcctgccgggctgagggcctgctggaggcctcaggtgctgtccatgggaaagatggtgtgggtgtcctgcctgtctgccccagcccagattcccctgtgtcatcccatcattttccatatcctggtgccccccacccctggaagagcccagtctgttgagttagttaagttgggttaataccagcttaaaggcagtattttgtgtcctccaggagcttcttgtttccttgttagggttaacccttcatcttcctgtgtcctgaaacgctcctttgtgtgtgtgtcagctgaggctgggggagagccgtggtccctgaggatgggtcagagctaaactccttcctggcctgagagtcagctctctgccctgtgtacttcccgggccagggctgcccctaatctctgtaggaaccgtggtatgtctgccatgttgcccctttctcttttcccctttcctgtcccaccatacgagcacctccagcctgaacagaagctcttactctttcctatttcagtgttacctgtgtgcttggtctgtttgactttacgcccatctcaggacacttccgtagactgtttaggttcccctgtcaaatatcagttacccactcggtcccagttttgttgccccagaaagggatgttattatccttgggggctcccagggcaagggttaaggcctgaatcatgagcctgctggaagcccagcccctactgctgtgaaccctggggcctgactgctcagaacttgctgctgtcttgttgcggatggatggaaggttggatggatgggtggatggccgtggatggccgtggatgcgcagtgccttgcatacccaaaccaggtgggagcgttttgttgagcatgacagcctgcagcaggaatatatgtgtgcctatttgtgtggacaaaaatatttacacttagggtttggagctattcaagaggaaatgtcacagaagcagctaaaccaaggactgagcaccctctggattctgaatctcaagatgggggcagggctgtgcttgaaggccctgctgagtcatctgttagggccttggttcaataaagcactgagcaagttgagaaaaaaaaaaaaaaaaaaaaaaaaaaaaa

SEQ ID NO: 175 - DNA, 1143 bp, human
tgcaacgccggggccagagtcttaaaaccgagggcccgcaggggtccccgcggccgccgcgatgcagaaatacgagaaactggaaaagattggggaaggcacctacggaactgtgttcaaggccaaaaaccgggagactcatgagatcgtggctctgaaacgggtgaggctggatgacgatgatgagggtgtgccgagttccgccctccgggagatctgcctactcaaggagctgaagcacaagaacatcgtcaggcttcatgacgtcctgcacagcgacaagaagctgactttggtttttgaattctgtgaccaggacctgaagaagtattttgacagttgcaatggtgacctcgatcctgagattgtaaagtcattcctcttccagctactaaaagggctgggattctgtcatagccgcaatgtgctacacagggacctgaagccccagaacctgctaataaacaggaatggggagctgaaattggctgattttggcctggctcgagcctttgggattcccgtccgctgttactcagctgaggtggtcacactgtggtaccgcccaccggatgtcctctttggggccaagctgtactccacgtccatcgacatgtggtcagccggctgcatctttgcagagctggccaatgctgggcggcctctttttcccggcaatgatgtcgatgaccagttgaagaggatcttccgactgctggggacgcccaccgaggagcagtggccctctatgaccaagctgccagactataagccctatccgatgtacccggccacaacatccctggtgaacgtcgtgcccaaactcaatgccacagggagggatctgctgcagaaccttctgaagtgtaaccctgtccagcgtatctcagcagaagaggccctgcagcacccctacttctccgacttctgtccgccctaggccccgggacccccggcctccaggctggggcctggcctatttaagccccctcttgagaggggtgagacagtgggggtgcctggtgcgctgtgctccagcagtgctgggcccagccggggtggggtgcctgagcccgaatttctcactccctttgtggactttatttaatttcataaattggctcctttcccacagtcaaaaaa

SEQ ID NO: 176 - DNA, 11611 bp, human
ggcttcagccctgcagggaaagaaaagtgcaatgattctggactgagacgcgcttgggcagaggctatgtaatcgtgtctgtgttgaggacttcgcttcgaggagggaagaggagggatcggctcgctcctccggcggcggcggcggcggcgactctgcaggcggagtttcgcggcggcggcaccagggttacgccagccccgcggggaggtctctccatccagcttctgcagcggcgaaagccccagcgcccgagcgcctgagccggcggggagcaagtaaagctagaccgatctccggggagccccggagtaggcgagcggcggccgccagctagttgagcgcaccccccgcccgccccagcggcgccgcggcgggcggcgtccaggcggcatggagaaggacggcctgtgccgcgctgaccagcagtacgaatgcgtggcggagatcggggagggcgcctatgggaaggtgttcaaggcccgcgacttgaagaacggaggccgtttcgtggcgttgaagcgcgtgcgggtgcagaccggcgaggagggcatgccgctctccaccatccgcgaggtggcggtgctgaggcacctggagaccttcgagcaccccaacgtggtcaggttgtttgatgtgtgcacagtgtcacgaacagacagagaaaccaaactaactttagtgtttgaacatgtcgatcaagacttgaccacttacttggataaagttccagagcctggagtgcccactgaaaccataaaggatatgatgtttcagcttctccgaggtctggactttcttcattcacaccgagtagtgcatcgcgatctaaaaccacagaacattctggtgaccagcagcggacaaataaaactcgctgacttcggccttgcccgcatctatagtttccagatggctctaacctcagtggtcgtcacgctgtggtacagagcacccgaagtcttgctccagtccagctacgccacccccgtggatctctggagtgttggctgcatatttgcagaaatgtttcgtagaaagcctctttttcgtggaagttcagatgttgatcaactaggaaaaatcttggacgtgattggactcccaggagaagaagactggcctagagatgttgcccttcccaggcaggcttttcattcaaaatctgcccaaccaattgagaagtttgtaacagatatcgatgaactaggcaaagacctacttctgaagtgtttgacatttaacccagccaaaagaatatctgcctacagtgccctgtctcacccatacttccaggacctggaaaggtgcaaagaaaacctggattcccacctgccgcccagccagaacacctcggagctgaatacagcctgaggcctcagcagccgccttaagctgatcctgcggagaacacccttggtggcttatgggtccccctcagcaagccctacagagctgtggaggattgctatctggaggccttccagctgctgtcttctggacaggctctgcttctccaaggaaaccgcctagtttactgttttgaaatcaatgcaagagtgattgcagctttatgttcatttgtttgtttgtttgtctgtttgtttcaagaacctggaaaaattccagaagaagagaagctgctgaccaattgtgctgccatttgatttttctaaccttgaatgctgccagtgtggagtgggtaatccaggcacagctgagttatgatgtaatctctctgcagctgccgggcctgatttggtacttttgagtgtgtgtgtgcatgtgtgtgtgtgtgtgtgtgtgtgtgtgtgtgtatgtgagagattctgtgatcttttaaagtgttactttttgtaaacgacaagaataattcaattttaaagactcaaggtggtcagtaaataacaggcatttgttcactgaaggtgattcaccaaaatagtcttctcaaattagaaagttaaccccatgtcctcagcatttcttttctggccaaaagcagtaaatttgctagcagtaaaagatgaagttttatacacacagcaaaaaggagaaaaaattctagtatattttaagagatgtgcatgcattctatttagtcttcagaatgctgaatttacttgttgtaagtctattttaaccttctgtatgacatcatgctttatcatttcttttggaaaatagcctgtaagctttttattacttgctataggtttagggagtgtacctcagatagattttaaaaaaaagaatagaaagcctttatttcctggtttgaaattcctttcttccctttttttgttgttgttattgttgtttgttgttgttattttgtttttgtttttaggaatttgtcagaaactctttcctgttttggtttggagagtagttctctctaactagagacaggagtggccttgaaattttcctcatctattacactgtactttctgccacacactgccttgttggcaaagtatccatcttgtctatctcccggcacttctgaaatatattgctaccattgtataactaataacagattgcttaagctgttcccatgcaccacctgtttgcttgctttcaatgaacctttcataaattcgcagtctcagcttatggtttatggcctcgattctgcaaacctaacagggtcacatatgttctctaatgcagtccttctacctggtgtttacttttgctacccaaataatgagtaggatcttgttttcgtatacccccaccactcccattgctaccaactgtcaccttgtgcactccttttttatagaagatattttcagtgtctttacctgagggtatgtctttagctatgttttagggccatacatttactctatcaaatgatcttttctccatcccccaggctgtgcttatttctagtgccttgtgctcactcctgctctctacagagccagcctggcctgggcattgtaaacagcttttcctttttctcttactgttttctctacagtcctttatatttcataccatctctgccttataagtggtttagtgctcagttggctctagtaaccagaggacacagaaagtatcttttggaaagtttagccacctgtgctttctgactcagagtgcatgcaacagttagatcatgcaacagttagattatgtttagggttaggattttcaaagaatggaggttgctgcactcagaaaataattcagatcatgtttatgcattattaagttgtactgaattctttgcagcttaatgtgatatatgactatcttgaacaagagaaaaaactaggagatgtttctcctgaagagcttttggggttgggaactattcttttttaattgctgtactacttaacattgttctaattcagtagcttgaggaacaggaacattgttttctagagcaagataataaaggagatgggccatacaaatgttttctactttcgttgtgacaacattgattaggtgttgtcagtactataaatgcttgagatataatgaatccacagcattcaaggtcaggtctactcaaagtctcacatggaaaagtgagttctgcctttcctttgatcgagggtcaaaatacaaagacatttttgctagggcctacaaattgaatttaaaaactcactgcactgattcatctgagctttttggttagtattcatggctagagtgaacatagctttagtttttgctgttgtaaaagtgttttcataagttcactcaagaaaaatgcagctgttctgaactggaatttttcagcattctttagaattttaaatgagtagagagctcaacttttattcctagcatctgcttttgactcatttctaggcagtgcttatgaagaaaaattaaagcacaaacattctggcattcaatcgttggcagattatcttctgatgacacagaatgaaagggcatctcagcctctctgaactttgtaaaaatctgtccccagttcttccatcggtgtagttgttgcatttgagtgaatactctcttgatttatgtattttatgtccagattcgccatttctgaaatccagatccaacacaagcagtcttgccgttagggcattttgaagcagatagtagagtaagaacttagtgactacagcttattcttctgtaacatatggtttcaaacatctttgccaaaagctaagcagtggtgaactgaaaagggcatattgccccaaggttacactgaagcagctcatagcaagttaaaatattgtgacagatttgaaatcatgtttgaatttcatagtaggaccagtacaagaatgtccctgctagtttctgtttgatgtttggttctggcggctcaggcattttgggaactgttgcacagggtgcagtcaaaacaacctacatataaaaattacataaaagaaccttgtccatttagctttcataagaaatcccatggcaaagagtaataaaaaggacctaatcttaaaaatacaatttctaagcacttgtaagaacccagtgggttggagcctcccactttgtccctcctttgaagtggatgggaactcaaggtgcaaagaacctgttttggaagaaagcttggggccatttcagccccctgtattctcatgattttctctcaggaagcacacactgtgaatggcagacttttcatttagccccaggtgacttactaaaaatagttgaaaattattcacctaagaatagaatctcagcattgtgttaaataaaaatgaaagctttagaaggcatgagatgttcctatcttaaataaagcatgtttcttttctatagagaaatgtatagtttgactctccagaatgtactatccatcttgatgagaaaactcttaaatagtaccaaacattttgaactttaaattatgtatttaaagtgagtgtttaagaaactgtagctgcttcttttacaagtggtgcctattaaagtcagtaatggccattattgttccattgtggaaattaaattatgtaagcttcctaatatcataaacatattaaaattcttctaaaatattgcttttcttttaagtgacaatttgactattcttatgataagcacatgagagtgtcttacattttccaaaagcaggctttaattgcatagttgagtctaggaaaaaataatgttaaaagtgaatatgccaccataattacttaattatgttagtatagaaactacagaatatttaccctggaaagaaaatattggaatgttattataaactcttagatatttatataattcaaaagaatgcatgtttcacattgtgacagataaagatgtatgatttctaaggctttaaaaattattcataaaacagtgggcaatagataaaggaaattctggagaaaatgaaggtatttaaagggtagtttcaaagctatatatattttgaaggatatattctttatgaacaaatatattgtaaaaatttatactaaggtcatctggtaactgtgggattaatatggtcgaaaacaaatgttatggagaagctgtcccaagcaaactaaattacctgtacttttttcccatttcaagggaagaggcaaccacatgaagcaatacttcttacacatgcctaagaacgttcattgaaaaaataaatttttaaaaggcatgtgtttcctatgccaccaatacttttgaaaaattgtgaaccttacccaaaaccatttatcatgtccattaagtatatttgggtatataattaggaagatatttacatgttccatctccacagtggaaaaacttattgaggctaccaaagtgtgccaagaaatgtaagtccttagagtaattagaaatgctgttttcctcaaaagcatgagaaactagcattttcatttcttatttactccctttctatatcaatgcaattcacaacccaattttaatacatccctatatctcaagcatttctatcttgtactttttcagaaaataaaccaaaaataatcctttggtctctctatcttctgacctttgtaagcaacagaaatgtaaaaacagaaggggtccaatttttacacgtttttttctcaagtagcctttctggggatttttattttcttaatgaagtgccaatcagcttttcaaaatgttttctatttctcagcatttccaggaagtgataacgtttagctaaatgagtagaagtggacttccttcaacatattgttaccttgtctagccttaggaagaaaacaagagccacctgaaaataaatacaggctcttttcgagcatctgctgaaatactgttacagcaatttgaagttgatgtggtaggaaaggaaggtgacttttcttgcaaaagtctttctaaacattcacactgtcctaagagatgagctttcttgttttattccggtatattccacaaggtggcacttttagagaaaaacaaatctgatgaagactaaagaggtacttctaaaagagatttcattctaactttatttttctgcgcatatttaactctttcctagcacttgttttttgggatgattaatagtctctataatgttctgtaacttcaatattttacttgttacctaggttctgaacaattgtctgcaaataaattgttcttaaggatggataatacacccattttgatcatttaagtaaagaaagcctagtcattcattcagtcaagaaaaaatttttgaagtacccagttaccttacttttctagattaaaacaggcttagttactaaaaaggcagtcctcatctgtgaacaggatagtttcgttagaagtataaaactcctttagtggccccagttaaaacacacataccctctctgctgctttcaaattccctagcatggtggcctttcaacattgattaaattttaaaatcctaatttaaagatcaggtgagcaaaatgagtagcacatcagtaattcagtagacaaaacttttgtctgaaaaattgctgtattgaaacagagccctaaaataccaaaagaccaggtaattttaacatttgtggaatcacaaatgtaaattcataagaagctctaattaaaaaaaaaaagtctgaagtatatgagcataacaacttaggagtgtgtctacatacttaacttttgaagttttttggcaactttatatactttttttaaatttacaagtctacttaaagacttcttataccccaaatgattaagttaattttagaggtcacctttctcacagcagtgtcacttgaaatttagtagggaaggatattgcagtatttttcagtttccttagcacagcaccacagaaagcagcttattccttttgagtggcagacactcgacggtgcctgcccaactttcctcctgagtggcaagcagatgagtctcagtaattcatactgaaccaaaatgccacatacactaggggcagtcagaaactggctgagaaatcccccgcctcattcgcccctctgctcccaggaactagagtccagttaaagcccctatgcgaaaggccgaattccaccccagggtttgttataacagtggccagtctgaaccccatttgctcgtgctcaaaacttgattcccacttgaaagccttccgggcgcgctgcctcgttgccccgcccctttggcaggagagaggcagtgggcgaggccgggctggggccccgcctcccactcacctgccggtgcctgaaattatgtgcggccccgcgggctgctttccgaggtcagagtgccctgctgctgtctcagaggcatctgttctgcaaatcttaggaagaaaaatgtccctagtagcaaacgggtgtcttctgtgcataaataagtacaacacaattctccgaaagttcgggtaaaaagagatgcggtagcagctgccctgtgtgaagctgtctaccccgcatctctcaggcgctaagctcagtttttgtttttgtttttgtttttttaaagaaaagatgtataattgcaggaatttttttttatttttttattttccatcattctatatatgtgatggtgaaagatatgcctggaaaagttttgttttgaaaagtttattttctgcttcgtcttcagttggcaaaagctctcaattctttagcttccagtttcttttctctctttttctttgttaggtaattaaaggtatgtaaacaaattatctcatgtagcaggggattttcatgttgagaggaatcttccgtgtgagttgtttggtcacacaaataaccctttctcaattttaggagtttggattgtcaaatgtaggtttttctcaaagggggcatataactacatattgactgccaagaactatgactgtagcactaatcagcacacatagagccacacaattatttaatttctaactctctgtggtccctagaaaaattccgttgatgtgcttaggttaaagttctgaagatacccgttgtacccttacttgaaagtttctaatcttaagttttatgaaatgcaataatatgtatcagctagcaatatttctgtgatcaccaacaactctcagtttgatcttaaagtctgaataataaaacaaatcccagcagtaatacatttcttaaacctcacagtgcatgatatatcttttcattctgatcctgtgtttgcaaaaatatacacatgtatatcatagttcctcactttttattcatttgttttcctattacctgtagtaaatatattagttagtacatggaatttatagcatcagctacccccaggaacagcacctgacaggcgggggattttttttcaagttgttctacatttgcataaattatttctattattattcatgtatgttatttatttctgaatcacactagtcctgtgaaagtacaactgaaggcagaaagtgttaggattttgcatctaatgttcattatcatggtattgatggacctaagaaaataaaaattagactaagcccccaaataagctgcatgcatttgtaacatgattagtagatttgaatatatagatgtagtattttgggtatctaggtgttttatcattatgtaaaggaattaaagtaaaggactttgtagttgtttttattaaatatgcatatagtagagtgcaaaaatatagcaaaaataaaaactaaaggtagaaaagcattttagatatgccttaatttagaaactgtgccaggtggccctcggaatagatgccaggcagagaccagtgcctgggtggtgcctcctcttgtctgccctcatgaagaagcttccctcacgtgatgtagtgccctcgtaggtgtcatgtggagtagtgggaacaggcagtactgttgagaggagagcagtgtgagagtttttctgtagaagcagaactgtcagcttgtgccttgaggcttccagaacgtgtcagatggagaagtccaagtttccatgcttcaggcaacttagctgtgtacagaagcaatccagtgtggtaataaaaagcaaggattgcctgtataatttattataaaataaaagggattttaacaaccaacaattcccaacacctcaaaagcttgttgcattttttggtatttgaggtttttatctgaaggttaaagggcaagtgtttggtatagaagagcagtatgtgttaagaaaagaaaaatattggttcacgtagagtgcaaattagaactagaaagttttatacgattatcattttgagatgtgttaaagtaggttttcactgtaaaatgtattagtgtttctgcattgccatagggcctggttaaaactttctcttaggtttcaggaagactgtcacatacagtaagcttttttccttctgacttataatagaaaatgttttgaaagtaaaaaaaaaaaatctaatttggaaatttgacttgttagtttctgtgtttgaaatcatggttctagaaatgtagaaattgtgtatatcagatactcatctaggctgtgtgaaccagcccaagatgaccaacatccccacacctctacatctctgtcccctgtatctcttcctttctaccactaaagtgttccctgctaccatcctggcttgtccacatggtgctctccatcttcctccacatcatggaccacaggtgtgcctgtctaggcctggccaccactcccaacttgacctagccacattcatctagagatggttcctgatgctgggcacagactgtgctcatggcacccattagaaatgcctctagcatctttgtatgcatcttgatttttaaaccaagtcattgtacagagcattcagttttggctgtggtaccaagagaaaaactaatcaagaatataaaccacattccaggctgctgttttctctccatctacaggccacacttttactgtatttcttcatacttgaaattcattctgctattttcatatcagggtacagacttataagggtgcatgttccttaaaggtgcataattattcttattccgtttgcttatattgctacagaatgctctgttttggtgctttgagttctgcagacccaagaagcagtgtggaaattcactgcctgggacacagtcttataagaatgttggcaggtgactttgtatcagatgttgcttctcttttctctgtacacagattgagagttaccacagtggcctgtcgggtccaccctgtgggtgcagcacagctctctgaaagcaagaaccttcctacctattctaacgtttttgccctctaagaaaaatggcctcaggtatggtatagacatagcaagaggggaagggctgtctcactctagcaaccatccctccattacacacagaaagccctcttgaagcaaaagaagaagaaagaaagaaagcttatctctaaggctactgtcttcagaatgctctgagctgaatgctcttgctcctttcccaagaggcagatgaaaatatagccagtttatctatacccttcctatctgaggaggagaatagaaaagtagggtaaatatgtaacgtaaaatatgtcattcaaggaccaccaaaactttaagtaccctatcattaaaaatctggttttaaaagtagctcaagtaagggatgctttgtgacccagggtttctgaagtcagatagccattcttacctgccccttactctgacttattgggaaagggagaactgcagtggtgtttctgttgcagtggcaaaggtaacatgtcagaaaattcagagggttgcataccaataatcctttggaaactggatgtcttactgggtgctagaatgaaaatgtaggtatttattgtcagatgatgaagttcattgtttttttcaaaattggtgttgaaatatcactgtccaatgtgttcacttatgtgaaagctaaattgaatgaggcaaaaagagcaaatagtttgtatatttgtaataccttttgtatttcttacaataaaaatattggtagcaaataaaaataataaaaacaataactttaaactgctttctggagatgaattactctcctggctattttcttttttactttaatgtaaaatgagtataactgtagtgagtaaaattcattaaattccaagttttagcagaaaaaaaaaaaaaaaaaaaa

SEQ ID NO: 177 - DNA, 1556 bp, human
cggtcagatttgtgtgtgcaccgcgtctccagcgatcccggatccactgcgctgccaggggcctgggggtgggtctcttgctgtctctgcgacgacatccttacgtttcggcactctaatgctgggtttgtgcgtgtgtgtctgcttagcggtctagcgggctgttaggctccctcgcccccagctccttggctcgctcagctcctccaccgcagcccagcagtgagacgcgcgcgcagccagctccccacgagatggaacagaccgaagtgctgaagccacggaccctggctgatctgatccgcatcctgcaccagctctttgccggcgatgaggtcaatgtagaggaggtgcaggccatcatggaagcctacgagagcgaccccatcgagtgggcaatgtacgccaagttcgaccagtacaggtatacccgaaatcttgtggatcaaggaaatggaaaatttaatctgatgattctctgttggggtgaaggacatggcagcagtattcatgatcataccaactcccactgctttctgaagatgctacagggaaatctaaaggagacattatttgcctggcctgacaaaaaatccaatgagatggtcaagaagtctgaaagagtcttgagggaaaaccagtgtgcctacatcaatgattccattggcttacatcgagtagagaacatcagccatacggaacctgctgtgagccttcacttgtacagtccaccttttgatacatgccatgcctttgatcaaagaacaggacataaaaacaaagtcacaatgacattccatagtaaatttggaatcagaactccaaatgcaacttcgggctcgctggagaacaactaaggggcaccaaaccctctgaggttttactttaaggttcgctgtatgtttgccttggacaaaaaggctacctaccacgtgctatccagtaatatacttaaataagccaatacttagatctactgtaaggcagatgctaattataaggcattaagtaagcaaatagtgccctcagctactgcagaagaaaagtcccactgaggaaaagaaagtcttgtgatttttaaaggcaagttttcaagtgctctcatagttctatcctctaattccattaaatccatactaggagcgtcagtgagggttttcatagcttttggaaatactttggtctctgaactgtaattagcaagaagtaaaaacagaaacgtcaaacgtcaaatgtttgctttgttacctggaggactaaatgtagatgtctttagtatactttgtatgttcttaaatattggaagataattttgtgaatctgtagattttattttttcagtcttaccttacaaatttcttttctatgaataatagaggaactcacggcactctgccacttgttaatgaaaggaagtgcagaggatttagaaaagtacatgatccccagaccacaacaaaccaaaacataaactcatgtctgtgtcccatggtcatagtcaaagattttgtactgctaaaattaccaaataatttaaataaagtggatttgaacac

SEQ ID NO: 178 - DNA, 1389 bp, human
cgcggacttctgccaagcaccggctcatgtgaggctcgcggcacagcgttctctgggctccccagaagccagcctttcgctcccggacccggcagcccgagcaggagccgtgggaccgggcgccagcaccctctgcggcgtgtcatgggcccgcgccgccggagccgaaagcccgaggccccgaggaggcgcagcccgagcccgaccccgacccccggcccctcccggcggggcccctccttaggcgcttcctcccatcaacacagtcggcggagacaaggttggctaaaggagatccgaaagcttcagaagagcacacacctcttgataaggaagctgcccttcagccgcctggcaagagaaatatgtgttaaattcactcgtggtgtggacttcaattggcaagcccaggccctattggccctacaagaggcagcagaagcatttctagttcatctctttgaggacgcctatctcctcaccttacatgcaggccgagttactctcttcccaaaggatgtgcaactggcccggaggatccggggccttgaggagggactcggctgagctcctgcacccagtgtttctgtcagtctttcctgctcagccaggggggatgataccggggactctccagagccatgactagatccaatggattctgcgatgctgtctggactttgctgtctctgaacagtatgtgtgtgttgctttaaatatttttcttttttttgagaaggagaagactgcatgactttcctctgtaacagaggtaatatatgagacaatcaacaccgttccaaaggcctgaaaataattttcagataaagagactccaaggttgactttagtttgtgagttactcatgtgactatttgaggattttgaaaacatcagatttgctgtggtatgggagaaaaggttatgtacttattattttagctctttctgtaatatttacattttttaccatatgtacatttgtacttttattttacacataagggaaaaaataagaccactttgagcagttgcctggaaggctgggcatttccatcatatagacctctgcccttcagagtagcctcaccattagtggcagcatcatgtaactgagtggactgtgcttgtcaacggatgtgtagcttttcagaaacttaattggggatgaatagaaaacctgtaagctttgatgttctggttacttctagtaaattcctgtcaaaatcaattcagaaattctaacttggagaatttaacattttactcttgtaaatcatagaagatgtatcataacagttcagaattttaaagtacattttcgatgcttttatgggtatttttgtagtttctttgtagagagataataaaaatcaaaatatttaatga

SEQ ID NO: 179 - DNA, 2103 bp, human
gaggctttgagaaaggagtaggagcctagcattccggcagaggaagaaaaacggcccatcttttagagtccgacctctggaaatgtccacacctctgcatccctgcaccaggactcaccaagacgcccatcctggaaaaggtcccccgtaagatggcagcaaaaactcccagcagtgaggagtctgggctgcccaaactgcccgtgcccccgctgcagcagaccctggccacgtacctgcagtgcatgcgacacttggtgtctgaggagcagttcaggaagagccaggccattgtgcagcagtttggggcccctggtggcctcggcgagaccctgcagcagaaactcctggagcggcaggagaagacagccaactgggtgtctgagtactggctgaatgacatgtatctcaacaaccgcctggccctgcctgtcaactccagccctgccgtgatctttgctcggcagcacttccctggcaccgatgaccagctgaggtttgcagccagcctcatctctggtgtactcagctacaaggccctgctggacagccactccattcccactgactgtgccaaaccggagctgtcagggcagcccctttgcatgaagcaatactatgggctcttctcctcctaccggctccccggccatacccaggacacgctggtggctcagaacagcagcatcatgccggagcctgagcacgtcatcgtagcctgctgcaatcagttctttgtcttggatgttgtcattaatttccgccgtctcagtgagggggatctgttcactcagttgagaaagatagtcaaaatggcttccaacgaggacgagcgtttgcctccaattggcctgctgacgtctgacgggaggagcgagtgggccgaggccaggacggtcctcgtgaaagactccaccaaccgggactcgctggacatgattgagcgctgcatctgccttgtatgcctggacggcccaggaggcgtggagctcagcgacacccacagggcactccagctccttcacggcggaggctacagcaagaacggggccaatcgctggtacgacaagtccctgcagtttgtggtgggccgagacgcgacctgcggtgtggtgtgcgaacactccccattcgatggcatcgtcctggtgcagtgcactgagcatctgctcaagcacatgacgcagagcagcaggaagctgatccgagcagactccgtcagcgagctccccgccccccggaggctgcggtggaaatgctccccggaaattcaaggccacttagcctcctcggcagaaaaacttcaacgaatagtaaagaaccttgacttcattgtctataagtttgacaactatgggaaaacattcattaagaagcagaaatgcagccctgatgccttcatccaggtggccctccagctggccttctacaggctccaccgaagactggtgcccacctacgagagcgcgtccatccgccgattccaggagggacgcgtggacaacatcagatcggccactccagaggcactggcttttgtgagagccgtgactgaccacaaggctgctgtgccagcttctgagaagcttctgctcctgaaggatgccatccgtgcccagactgcatacacagtcatggccataacagggatggccattgacaaccacctgctggcactgcgggagctggcccgggccatgtgcaaggagctgcccgagatgttcatggatgaaacctacctgatgagcaaccggtttgtcctctccactagccaggtgcccacaaccacggagatgttctgctgctatggtcctgtggtcccaaatgggtatggtgcctgctacaacccccagccagagaccatccttttctgcatctctagctttcacagctgcaaagagacttcttctagcaagtttgcaaaagctgtggaagaaagcctcattgacatgagagacctctgcagtctgctgccgcctactgagagcaagccattggcaacaaaggaaaaagccacgaggcccagccagggacaccaaccttgactcctgccactaggtttcacctcccaaacccagcctctagaacagccagaccctgcag

SEQ ID NO: 180 - DNA, 2667 bp, human
gagggtgggtcgaccccgggaattcggcacgagcggcggcggggccacccgcgagtccagcgtcgccgcagccccccaatgcggccgcgagaagcagcgggggggcaggcgatcgaaggagccttcacgtaaatgggtccagtcatgcctcccagtaagaagccagaaagctcaggaattagtgtctccagtggactgagtcagtgttacgggggcagcggtttctccaaggcccttcaggaagacgatgacctcgacttttctctgcctgacatccgattagaagagggggccatggaagatgaagagctgaccaacctgaactggctgcacgagagcaagaacttgctgaagagctttggggagtcggtcctcaggagtgtcagccccgtccaggacctggacgatgacacccccccatcccctgcccactctgacatgccctacgatgccaggcagaaccccaactgcaaacccccctactccttcagctgcctcatatttatggccatcgaggactctccaaccaagcgcctgccagtgaaggatatctacaactggatcttggaacattttccgtattttgcaaatgcacctactgggtggaaaaactcagtgagacacaatttatcattgaataagtgttttaagaaagtggacaaagagaggagtcagagtattgggaaagggtcgttgtggtgcatagacccagagtatagacaaaatctaattcaggctttgaaaaagacaccttatcacccacacccacacgtgttcaatacacctcccacctgtcctcaggcatatcaaagcacatcaggtccacccatctggccgggcagtaccttcttcaagagaaatggagcccttctccaagatcctgacattgatgctgccagtgccatgatgcttttgaatactccccctgagatacaagcaggttttcctccaggagtgatccaaaatggagcgcgggtcctgagccgagggctgtttcctggcgtgcggccgctgccaatcactcccattggggtgacagcggccatgaggaatggcatcaccagctgccggatgcggactgagagtgagccatcttgtggctccccagtggtcagcggagaccccaaggaggatcacaactacagcagtgccaagtcctccaacgcccggagcacctcgcccaccagcgactccatctcctcctcctcctcctcagccgacgaccactatgagtttgccaccaaggggagccaggagggcagcgagggcagcgaggggagcttccggagccacgagagccccagcgacacggaagaggacgacaggaagcacagccagaaggagcccaaggattctctgggggacagcgggtacgcatcccagcacaagaagcgccagcacttcgccaaggccaggaaggtccccagcgacacactgcccctcaaaaagagacgcaccgaaaagccccccgagagcgatgatgaggagatgaaagaagcggcagggtccctcctgcacttagcagggatccggtcctgtttgaataacatcaccaatcggacggcaaaggggcagaaagagcaaaaggaaaccacaaaaaattaaaaacaagtcactgatttgttttgaacttacgaccatttggtttcagcatgtcaggagatttctaatgatttgtggcaatatcagcaattttttttcttttttcttgtttggggtttggttttctttcttttcttttccttttattgggttttaatttgccccctcttctttgttttggacccttaagaattttatttttaaaggagattgaagccatagaactcatattgacactcagctgttttacaaaagcttttcattatctgaagacaaaaccgaaaaagccaaaattaccattgcttcctccagcttgtcagaaacctgtggctgaatccgcagggatgtcaacgtcaatatcacaggaacacacattcggcacctagaaggcacgtgggcaaagtaatcatcgttcaggcccaacccttaggtttaaaaagtcaggttgtccatcccattggggttcactgagtgaaggcacataaagcaattgaggaggaggaggaacccctcgtccccctaggagcagacccaagcttgtggcaccaggcatctgatggtgccaggaaagccactggaattgtcacacggcgagcacagagggccggccaccagtcctcgatgcttctgaaccctgaaccccgatgacatcttacgaggtggacgttggactgttcatgcgcatcgggtgtcagtgactcatggagaagaaatggggtaaatttttagtgatgttgctaatcattgaattctgttctctattaaattaagaaaatgttccaaaagccataagcctgaagattggccctgtgcacgcacgcacacacacacacacacacacacacacacacacacacacacgaaggagagagagagaaaactgatggggaaaacaagctgtgtcttcttaactgcccaagtgaaaagcaaccaagtccaggaaattacaatagctgttaaggaaaggaaataatggtacagatctttttctgtctatcaaaactatttgatccaagtgaaaaaaaaaaaaaaactagaaagctacggaacctgcaatgcggccgc

SEQ ID NO: 181 - DNA, 1633 bp, human
ctgagctgcatcatggtgcggtctgtggcctgggcaggtttcatggtcctgctgatgatcccatggggctctgctgcaaaactggtctgctacttcaccaactgggcccagtacagacagggggaggctcgcttcctgcccaaggacttggaccccagcctttgcacccacctcatctacgccttcgctggcatgaccaaccaccagctgagcaccactgagtggaatgacgagactctctaccaggagttcaatggcctgaagaagatgaatcccaagctgaagaccctgttagccatcggaggctggaatttcggcactcagaagttcacagatatggtagccacggccaacaaccgtcagacctttgtcaactcggccatcaggtttctgcgcaaatacagctttgacggccttgaccttgactgggagtacccaggaagccaggggagccctgccgtagacaaggagcgcttcacaaccctggtacaggacttggccaatgccttccagcaggaagcccagacctcagggaaggaacgccttcttctgagtgcagcggttccagctgggcagacctatgtggatgctggatacgaggtggacaaaatcgcccagaacctggattttgtcaaccttatggcctacgacttccatggctcttgggagaaggtcacgggacataacagccccctctacaagaggcaagaagagagtggtgcagcagccagcctcaacgtggatgctgctgtgcaacagtggctgcagaaggggacccctgccagcaagctgatccttggcatgcctacctacggacgctccttcacactggcctcctcatcagacaccagagtgggggccccagccacagggtctggcactccaggccccttcaccaaggaaggagggatgctggcctactatgaagtctgctcctggaagggggccaccaaacagagaatccaggatcagaaggtgccctacatcttccgggacaaccagtgggtgggctttgatgatgtggagagcttcaaaaccaaggtcagctatctgaagcagaagggactgggcggggccatggtctgggcactggacttagatgactttgccggcttctcctgcaaccagggccgataccccctcatccagacgctacggcaggaactgagtcttccatacttgccttcaggcaccccagagcttgaagttccaaaaccaggtcagccctctgaacctgagcatggccccagccctggacaagacacgttctgccagggcaaagctgatgggctctatcccaatcctcgggaacggtccagcttctacagctgtgcagcggggcggctgttccagcaaagctgcccgacaggcctggtgttcagcaactcctgcaaatgctgcacctggaattgagtcgtaaagcccctccagtccagctttgaggctgggcccaggatcactctacagcctgcctcctgggttttcctgggggccgcaatctggctcctgcaggcctttctgtggtcttcctttatccaggctttctgctctcagccttgccttccttttttctgggtctcctgggctgcccctttcacttgcaaaataaatctttggtttgtgcccctcttca

SEQ ID NO: 182 - DNA, 1595 bp, human
cccgggccggggcacggagagagccgagcgccgcagccgtgagccgaatagagccggagagacccgagtatgaccggagaagcccaggccggccggaagaggagccgagcgcggccggaaggaaccgagcccgtccgaagggagcggagcgcagcctggcctggggcccggtcgagcccgcgccatggcggccgaggcgacagctgtggccggaagcggggctgttggcggctgcctggccaaagacggcttgcagcagtctaagtgcccggacactaccccaaaacggcggcgcgcctcgtcgctgtcgcgtgacgccgagcgccgagcctaccaatggtgccgggagtacttgggcggggcctggcgccgagtgcagcccgaggagctgagggtttaccccgtgagcggaggcctcagcaacctgctcttccgctgctcgctcccggaccacctgcccagcgttggcgaggagccccgggaggtgcttctgcggctgtacggagccatcttgcagggcgtggactccctggtgctagaaagcgtgatgttcgccatacttgcggagcggtcgctggggccccagctgtacggagtcttcccagagggccggctggaacagtacatcccaagtcggccattgaaaactcaagagcttcgagagccagtgttgtcagcagccattgccacgaagatggcgcaatttcatggcatggagatgcctttcaccaaggagccccactggctgtttgggaccatggagcggtacctaaaacagatccaggacctgcccccaactggcctccctgagatgaacctgctggagatgtacagcctgaaggatgagatgggcaacctcaggaagttactagagtctaccccatcgccagtcgtcttctgccacaatgacatccaggaagggaacatcttgctgctctcagagccagaaaatgctgacagcctcatgctggtggacttcgagtacagcagttataactataggggctttgacattgggaaccatttttgtgagtgggtttatgattatactcacgaggaatggcctttctacaaagcaaggcccacagactaccccactcaagaacagcagttgcattttattcgtcattacctggcagaggcaaagaaaggtgagaccctctcccaagaggagcagagaaaactggaagaagatttgctggtagaagtcagtcggtatgctctggcatcccatttcttctggggtctgtggtccatcctccaggcatccatgtccaccatagaatttggttacttggactatgcccagtctcggttccagttctacttccagcagaaggggcagctgaccagtgtccactcctcatcctgactccaccctcccactccttggatttctcctggagcctccagggcaggaccttggagggaggaacaacgagcagaaggccctggcgactgggctgagcccccaagtgaaactgaggttcaggagaccggcctgttcctgagtttgagtaggtccccatggctggcaggccagagccccgtgctgtgtatgtaacacaataaacaagcttcttcttcccaccctg

SEQ ID NO: 183 - DNA, 13449 bp, human
  misc_feature 11967, 12008, 12013: n = A,T,C or G
gcggccgcgtcgacgcggcggcggcagcggcgtcggctcggggttctccgggagagggggagtgcgcggcggccgcagctgccacaaaccaggtgaagctttgttctaagaatatttgtttcatctagtttatgagtccaaatgatatagactgtaaatgtcacagcagtggtgaaagactgctcggtcatgagcaccgacagtaactcactggcacgtgaatttctgaccgatgtcaaccggctttgcaatgcagtggtccagagggtggaggccagggaggaagaagaggaggagacgcacatggcaacccttggacagtaccttgtccatggtcgaggatttctattacttaccaagctaaattctataattgatcaggcattgacatgtagagaagaactcctgactcttcttctgtctctccttccactggtatggaagatacctgtccaagaagaaaaggcaacagattttaacctaccgctctcagcagatataatcctgaccaaagaaaagaactcaagttcacaaagatccactcaggaaaaattacatttagaaggaagtgccctgtctagtcaggtttctgcaaaagtaaatgtttttcgaaaaagcagacgacagcgtaaaattacccatcgctattctgtaagagatgcaagaaagacacagctctccacctcagattcagaagccaattcagatgaaaaaggcatagcaatgaataagcatagaaggccccatctgctgcatcattttttaacatcgtttcctaaacaagaccaccccaaagctaaacttgaccgcttagcaaccaaagaacagactcctccagatgctatggctttggaaaattccagagagattattccaagacaggggtcaaacactgacattttaagtgagccagctgccttgtctgttatcagtaacatgaacaattctccatttgacttatgtcatgttttgttatctttattagaaaaagtttgtaagtttgacgttaccttgaatcataattctcctttagcagccagtgtagtgcccacactaactgaattcctagcaggctttggggactgctgcagtctgagcgacaacttggagagtcgagtagtttctgcaggttggaccgaagaaccggtggctttgattcaaaggatgctctttcgaacagtgttgcatcttctgtcagtagatgttagtactgcagagatgatgccagaaaatcttaggaaaaatttaactgaattgcttagagcagctttaaaaattagaatatgcctagaaaagcagcctgacccttttgcaccaagacaaaagaaaacactgcaggaggttcaggaagattttgtgttttcaaagtatcgtcatagagcccttcttttacctgagcttttggaaggagttcttcagattctgatctgttgtcttcaaagtgcagcttcaaatcccttctacttcagtcaagccatggatttggttcaagaattcattcagcatcatggatttaatttatttgaaacagcagttcttcaaatggaatggctggttttaagagatggagttcctcccgaggcctcagagcatttgaaagccctaataaatagtgtgatgaaaataatgagcactgtcaaaaaagtgaaatcagagcaacttcatcattcgatgtgtacaagaaaaaggcacagacgatgtgaatattctcattttatgcatcatcaccgagatctctcaggtcttctggtttcggcttttaaaaaccaggtttccaaaaacccatttgaagagactgcagatggagatgtttattatcctgagcggtgctgttgcattgcagtgtgtgcccatcagtgcttgcgcttactacagcaggcttccttgagcagcacttgtgtccagatcctatcgggtgttcataacattggaatatgctgttgtatggatcccaaatctgtaatcattcctttgctccatgcttttaaattgccagcactgaaaaattttcagcagcatatattgaatatccttaacaaacttattttggatcagttaggaggagcagagatatcaccaaaaattaaaaaagcagcttgtaatatttgtactgttgactctgaccaactagcccaattagaagagacactgcagggaaacttatgtgatgctgaactctcctcaagtttatccagtccttcttacagatttcaagggatcctgcccagcagtggatctgaagatttgttgtggaaatgggatgctttaaaggcttatcagaactttgtttttgaagaagacagattacatagtatacagattgcaaatcacatttgcaatttaatccagaaaggcaatatagttgttcagtggaaattatataattacatatttaatcctgtgctccaaagaggagttgaattagcacatcattgtcaacacctaagcgttacttcagctcaaagtcatgtatgtagccatcataaccagtgcttgcctcaggacgtgcttcagatttatgtaaaaactctgcctatcctgcttaaatccagggtaataagagatttgtttttgagttgtaatggagtaagtcaaataatcgaattaaattgcttaaatggtattcgaagtcattctctaaaagcatttgaaactctgataatcagcctaggggagcaacagaaagatgcctcagttccagatattgatgggatagacattgaacagaaggagttgtcctctgtacatgtgggtacttcttttcatcatcagcaagcttattcagattctcctcagagtctcagcaaattttatgctggcctcaaagaagcttatccaaagagacggaagactgttaaccaagatgttcatatcaacacaataaacctattcctctgtgtggcttttttatgcgtaagtaaagaagcagagtctgacagggagtcggccaatgactcagaagatacttctggctatgacagcacagccagcgagcctttaagtcatatgctgccatgtatatctctcgagagccttgtcttgccttctcctgaacatatgcaccaagcagcagacatttggtctatgtgtcgttggatctacatgttgagttcagtgttccagaaacagttttataggcttggtggtttccgagtatgccataagttaatatttatgataatacagaaactgttcagaagtcacaaagaggagcaaggaaaaaaggagggagatacaagtgtaaatgaaaaccaggatttaaacagaatttctcaacctaagagaactatgaaggaagatttattatctttggctataaaaagtgaccccataccatcagaactaggtagtctaaaaaagagtgctgacagtttaggtaaattagagttacagcatatttcttccataaatgtggaagaagtttcagctactgaagccgctcccgaggaagcaaagctatttacaagtcaagaaagtgagacctcacttcaaagtatacgacttttggaagcccttctggccatttgtcttcatggtgccagaactagtcaacagaagatggaattggagttacctaatcagaacttgtctgtggaaagtatattatttgaaatgagggaccatctttcccagtcaaaggtgattgaaacacaactagcaaagccgttatttgatgccctgcttcgagttgccctcgggaattattcagcagattttgaacataatgatgctatgactgagaagagtcatcaatctgcagaagaattgtcatcccagcctggtgatttttcagaagaagctgaggattctcagtgttgtagttttaaacttttagttgaagaagaaggttacgaagcagatagtgaaagcaatcctgaagatggcgaaacccaggatgatggggtagacttaaagtctgaaacagaaggtttcagtgcatcaagcagtccaaatgacttactcgaaaacctcactcaaggggaaataatttatcctgagatttgtatgctggaattaaatttgctttctgctagtaaagccaaacttgatgtgcttgcccatgtatttgagagttttttgaaaattattaggcagaaagaaaagaatgtttttctgctcatgcaacagggaactgtgaaaaatcttttaggagggttcttgagtattttaacacaggatgattctgattttcaagcatgccagagagtattggtggatcttttggtatctttgatgagttcaagaacatgttcagaagagctaacccttcttttgagaatatttctggagaaatctccttgtacaaaaattcttcttctgggtattctgaaaattattgaaagtgatactactatgagcccttcacagtatctaaccttccctttactgcacgctccaaatttaagcaacggtgtttcatcacaaaagtatcctgggattttaaacagtaaggccatgggtttattgagaagagcacgagtttcacggagcaagaaagaggctgatagagagagttttccccatcggctgctttcatcttggcacatagccccagtccacctgccgttgctggggcaaaactgctggccacacctatcagaaggtttcagtgtttccctgtggtttaatgtggagtgtatccatgaagctgagagtactacagaaaaaggaaagaagataaagaaaagaaacaaatcattaattttaccagatagcagttttgatggtacagagagcgacagaccagaaggtgcagagtacataaatcctggtgaaagactcatagaagaaggatgtattcatataatttcactgggatccaaagcgttgatgatccaagtgtgggctgatccccacaatgccactcttatctttcgtgtgtgcatggattcaaatgatgacatgaaagctgttttactagcacaggttgaatcacaggagaatattttcctcccaagcaaatggcaacatttagtactcacctacttacagcagccccaagggaaaaggaggattcatgggaaaatctccatatgggtctctggacagaggaagcctgatgttactttggattttatgcttccaagaaaaacaagtttgtcatctgatagcaataaaacattttgcatgattggccattgtttatcatcccaagaagagtttttgcagttggctggaaaatgggacctgggaaatttgcttctcttcaacggagctaaggttggttcacaagaggccttttatctgtatgcttgtggacccaaccatacatctgtaatgccatgtaagtatggcaagccagtcaatgactactccaaatatattaataaagaaattttgcgatgtgaacaaatcagagaactttttatgaccaagaaagatgtggatattggtctcttaattgaaagtctttcagttgtttatacaacttactgtcctgctcagtataccatctatgaaccagtgattagacttaaaggtcaaatgaaaacccaactctctcaaagacccttcagctcaaaagaagttcagagcatcttattagaacctcatcatctaaagaatctccaacctactgaatataaaactattcaaggcattctgcacgaaattggtggaactggcatatttgtttttctctttgccagggttgttgaactcagtagctgtgaagaaactcaagcattagcactgcgagttatactctcattaattaaatacaaccaacaaagagtacatgaattagaaaattgtaatggactttctatgattcatcaggtgttgatcaaacaaaaatgcattgttgggttttacattttgaagacccttcttgaaggatgctgtggtgaagatattatttatatgaatgagaatggagagtttaagttggatgtagactctaatgctataatccaagatgttaagctgttagaggaactattgcttgactggaagatatggagtaaagcagagcaaggtgtttgggaaactttgctagcagctctagaagtcctcatcagagcagatcaccaccagcagatgtttaatattaagcagttattgaaagctcaagtggttcatcactttctactgacttgtcaggttttgcaggaatacaaagaggggcaactcacacccatgccccgagaggtttgtagatcatttgtgaaaattatagcagaagtccttggatctcctccagatttggaattattgacaattatcttcaatttccttttagcagttcaccctcctactaatacttacgtttgtcacaatcccacgaacttctacttttctttgcacatagatggcaagatctttcaggagaaagtgcggtcaatcatgtacctgaggcattccagcagtggaggaaggtcccttatgagccctggatttatggtaataagcccatctggttttactgcttcaccatatgaaggagagaattcctctaatattattccacaacagatggccgcccatatgctgcgttctagaagcctaccagcattccctacttcttcactactaacgcaatcacaaaaactgactggaagtttgggttgtagtatcgacaggttacaaaatattgcagatacttatgttgccacccaatcaaagaaacaaaattctttggggagttccgacacactgaaaaaaggcaaagaggacgcattcatcagtagctgtgagtctgcaaaaactgtttgtgaaatggaagctgtcctctcagcccaggtctctgtcagtgatgtcccaaagggagtgctgggatttccagtggtcaaagcagatcataaacagttgggagcagaacccaggtcagaagatgacagtcctggggatgagtcctgcccacgccgacctgattacctaaagggattggcctccttccagcgaagccacagcactattgcaagccttgggctagcttttccttcacagaacggatctgcagctgttggccgttggccaagtcttgttgatagaaacactgatgattgggaaaactttgcctattctcttggttatgagccaaattacaaccgaactgcaagtgctcacagtgtaactgaagactgtttggtacctatatgctgtggattatatgaactcctaagtggggttcttcttatcctgcctgatgttttgcttgaagatgtgatggacaagcttattcaagcagatacacttttggtcctcgttaaccacccatcaccagctatacaacaaggtgttattaaactattagatgcatattttgctagagcatctaaggaacaaaaagataaatttctgaagaatcgtggattttccttgctagccaaccagttgtatcttcatcgaggaactcaagaattgttagaatgcttcatcgaaatgttctttggtcgacatattggccttgatgaagaatttgatctggaagatgtgagaaacatgggattgtttcagaagtggtctgtcattcctattctgggactaatagagacctctctatatgacaacatactcttgcataatgctcttttacttcttctccaaattttaaattcttgttctaaggtagcagatatgttgctggataatggtctactctatgtgttatgtaatacagtagcagccctgaatggattagaaaagaacattcccatgagtgaatataaattgcttgcttgtgatatacagcaacttttcatagcagttacaattcatgcttgcagttcctcaggctcacaatattttagggttattgaagaccttattgtaatgcttggatatcttcaaaatagcaaaaacaagaggacacaaaatatggctgttgcactacagcttagagttctccaggctgctatggaatttataaggaccaccgcaaatcatgactctgaaaacctcacagattcactccagtcaccttctgctccccatcatgcagtagttcaaaagcggaaaagcattgctggtcctcgaaaatttccccttgctcaaactgaatcgcttctgatgaaaatgcgttcagtggcaaatgatgagcttcatgtgatgatgcaacggagaatgagccaagagaaccctagccaagcaactgaaacggaacttgcgcagagactacagaggctcactgttttagcagtcaacaggattatttatcaagaatttaattcagacattattgacattttgagaactccagaaaatgtaactcaaagcaagacctcagttttccagaccgaaatttctgaggaaaatattcatcatgaacagtcttctgttttcaatccatttcagaaagaaatttttacatatctggtagaaggattcaaagtatctattggttcaagtaaagccagtggttccaagcagcaatggactaaaattctgtggtcttgtaaggagaccttccgaatgcagcttgggagactactagtgcatattttgtcgccagcccacgctgcacaagagagaaagcaaatttttgaaatagttcatgaaccaaatcatcaggaaatactacgagactgtctcagcccatccctacaacatggagccaagttagttttgtatttgtcagagttgatacataatcaccaaggtgaattgactgaagaagagctaggcacagcagaactgcttatgaatgctttgaagttatgtggtcacaagtgcatccctcccagtgcatcaacaaaagcagaccttattaaaatgatcaaagaggaacaaaagaaatatgaaactgaagaaggagtgaataaagctgcttggcagaaaacagttaacaataatcaacaaagtctctttcagcgtctggattcaaaatcaaaggatatatctaaaatagctgcagatatcacccaggcagtgtctctctcccaaggaaatgagagaaaaaaggtgatccagcatattagaggaatgtataaagtagatttgagtgccagcagacattggcaggaacttattcagcagctgacacatgatagagcagtatggtatgaccccatctactatccaacctcatggcagttggatccaacagaagggccaaatcgagagaggagacgtttacagagatgttatttaactattccaaataagtatctccttagggatagacagaaatcagaagatgttgtcaaaccaccactctcttacctgtttgaagacaaaactcattcttctttctcttctactgtcaaagacaaagctgcaagtgaatctataagagtgaatcgaagatgcatcagtgttgcaccatctagagagacagctggtgaattgttactaggtaaatgtggaatgtattttgtggaagataatgcttctgatacagttgaaagttcgagccttcagggagagttggaaccagcatcattttcctggacatatgaagaaattaaagaagttcacaagcgttggtggcaattgagagataatgctgtagaaatctttctaacaaatggcagaacactcctgttggcatttgataacaccaaggttcgtgatgatgtataccacaatatactcacaaataacctccctaatcttctggaatatggtaacatcaccgctctgacaaatttatggtatactgggcaaattactaattttgaatatttgactcacttaaacaaacatgctggccgatccttcaatgatctcatgcagtatcctgtgttcccatttatacttgctgactacgttagtgagacacttgacctcaatgatctgttgatatacagaaatctctctaaacctatagctgttcagtataaagaaaaagaagatcgttatgtggacacatacaagtacttggaggaagagtaccgcaaaggagccagagaagatgaccccatgcctcccgtgcagccctatcactatggctcccactattccaatagcggcactgtgcttcacttcctggtcaggatgcctcctttcactaaaatgtttttagcctatcaagatcaaagttttgacattccagacagaacttttcattctacaaatacaacttggcgactctcatcttttgaatctatgactgatgtgaaagaacttatcccagagtttttctatcttccagagttcctagttaaccgtgaaggttttgattttggtgtgcgtcagaatggtgaacgggttaatcacgtcaaccttcccccttgggcgcgtaatgatcctcgtctttttatcctcatccatcggcaggctctagagtctgactacgtgtcgcagaacatctgtcagtggattgacttggtgtttgggtataagcaaaaggggaaggcttctgttcaagcgatcaatgtttttcatcctgctacatattttggaatggatgtctctgcagttgaagatccagttcagagacgagcgctagaaaccatgataaaaacctacgggcagactccccgtcagctgttccacatggcccatgtgagcagacctggagccaagctcaatattgaaggagagcttccagctgctgtggggttgctagtgcagtttgctttcagggagacccgagaacaggtcaaagaaatcacctatccgagtcctttgtcatggataaaaggcttgaaatggggggaatacgtgggttcccccagtgctccagtacctgtggtctgcttcagccagccccacggagaaagatttggctctctccaggctctgcccaccagagcaatctgtggtttgtcacggaatttctgtcttgtgatgacatatagcaaggaacaaggtgtgagaagcatgaacagtacggacattcagtggtcagccatcctgagctggggatatgctgataatattttaaggttgaagagtaaacaaagtgagcctccagtaaactttattcaaagttcacaacagtaccaggtgactagttgtgcttgggtgcctgacagttgccagctgtttactggaagcaaatgcggtgtcatcacagcctacacaaacagatttacaagcagcacgccatcagaaatagaaatggagactcaaatacatctctatggtcacacagaagagataaccagcttatttgtttgcaaaccatacagtatactgataagtgtgagcagagacggaacctgcatcatatgggatttaaacaggttatgctatgtacaaagtctggcgggacacaaaagccctgtcacagctgtctctgccagtgaaacctcaggtgatattgctactgtgtgtgattcagctggcggaggcagtgacctcagactctggacggtgaacggggatctcgttggacatgtccactgcagggagatcatctgttccgtggctttctccaaccagcctgagggagtatctatcaatgtaatcgctgggggattagaaaatggaattgtaaggttatggagcacatgggacttaaagcctgtgagagaaattacatttcccaaatcaaataagcccatcatcagccttacattttcttgtgatggccaccatttgtacacagcaaacagtgatgggaccgtgattgcctggtgtcggaaggaccagcagcgcttgaaacagccaatgttctattccttccttagcagctatgcagccgggtgaatgcgaatgaacttcacgttctccaaagcactttaactccaaactagatttgttgacttcaccagttttaggaggttgaacctaaagaaatggatgactggacaaaccatccaaataatgataaagtctattcatctgcacaaaattctgaagagtcacatgatcctaagaggaaagttctgttctattttagtgataatctggaagattgtgtcaatatgcactagccaacaagttttaagcctcgcatggtacattaaaatgatattcttaaaattttttcccaccaaggtattccaaagaaaatattaaggtctcccctttttctatgattccaaaaggaccagtagaatttaaattggttggttgatngtttatataaaacacactaaaattatattttaaaagtttantgccntgaaatactcctcccaccacacacacatgctccaaaagaggaaagaaaaaaagataatttttaggacttgataattgctttctttgagaagcaaattattcagtaggtgcctctgtaccaaatattttatggaatatctaaatactaaaataaactatgaatgaatctcaaaattaggcagtttttgccagttgctttcttagctcaaaggagaaccagaatttttttgacagccacaaacaagaatacaggtatcttggatttcagacacattctgtttcttcataaaaattttacttaaaatctgtaacgctagatattgactatccttagttgagtcactgaggtttaaacacaatggtaagtcttaaagtctgctatttacagagcattgaatctgtaccaatttgcaatagaaagccttcagtatgcaagaagtttgcatgggtattaagaacacagcctaaataaggcatttgatctaatctgcaggaagaattttcttccccaaaacagaattataaaagcttactttaaacaggaggcagaataattcttttaggaaaccatttcattctgtttctactaacctataccatctgagaattcctaaacatcttggagccgtctgtctctcccatatgatggctgtctgtatatttttacttggggtgctgctttattggctttgaaaacactgtcagataagctcagtaatatgttaccatgggataaaaatatgtatccctgcctaagaataacttgtgcatttgttatggaaatttaattcatatggtgtttacagtactacttttgtaacttccagactttctaaaacattctgcttaaaaaccatataaaatataattccaaagtctctgctgtcaagatagattcgagagaaagcacgtggccatgtatgctttaaccttaaactgcatacacatgtagtgatacctaggctgcatttagatcaccgtgtgctcaggccaggtgtgaatcctgaggtccatggaggtgcagagatgagattactcctattcacgttgaagtgatttgctttgttaacaaaaaattgcagctattgtctagctttcatttttttactgagaactttaaattagtcccctattagaatagggttgctactcatctttttttaaaaaccgaatttcatcatttatctaaagagaaaatatgcagaataactggtcttgttaagagtgcaatattatatttttatgtaaaaataaaaattaatttggggggattatttattcagcatgaaacctaatatgtatatgtttgaaatacttcataatgtgcatgttgtagcaaacatttctgtaaattatcacaagctctgttacctttatatacgctgcctcttcaatttggaaataaatttcataaaaaaaaaaaaaaaaaaaaaaaaa

SEQ ID NO: 184 - DNA, 1431 bp, human
gctgttcgcctgcgtcgctccgggagctgccgacggacggagcgcccccgcccccgcccggccgcccgcccgccgccgccatgcccttctccaacagccacaacgcactgaagctgcgcttcccggccgaggacgagttccccgacctgagcgcccacaacaaccacatggccaaggtgctgacccccgagctgtacgcggagctgcgcgccaagagcacgccgagcggcttcacgctggacgacgtcatccagacaggcgtggacaacccgggccacccgtacatcatgaccgtgggctgcgtggcgggcgacgaggagtcctacgaagtgttcaaggatctcttcgaccccatcatcgaggaccggcacggcggctacaagcccagcgatgagcacaagaccgacctcaaccccgacaacctgcagggcggcgacgacctggaccccaactacgtgctgagctcgcgggtgcgcacgggccgcagcatccgtggcttctgcctccccccgcactgcagccgcggggagcgccgcgccatcgagaagctcgcggtggaagccctgtccagcctggacggcgacctggcgggccgatactacgcgctcaagagcatgacggaggcggagcagcagcagctcatcgacgaccacttcctcttcgacaagcccgtgtcgcccctgctgctggcctcgggcatggcccgcgactggcccgacgcccgcggtatctggcacaatgacaataagaccttcctggtgtgggtcaacgaggaggaccacctgcgggtcatctccatgcagaaggggggcaacatgaaggaggtgttcacccgcttctgcaccggcctcacccagattgaaactctcttcaagtctaaggactatgagttcatgtggaaccctcacctgggctacatcctcacctgcccatccaacctgggcaccgggctgcgggcaggtgtgcatatcaagctgcccaacctgggcaagcatgagaagttctcggaggtgcttaagcggctgcgacttcagaagcgaggcacaggcggtgtggacacggctgcggtgggcggggtcttcgacgtctccaacgctgaccgcctgggcttctcagaggtggagctggtgcagatggtggtggacggagtgaagctgctcatcgagatggagcagcggctggagcagggccaggccatcgacgacctcatgcctgcccagaaatgaagcccggcccacacccgacaccagccctgctgcttcctaacttattgcctgggcagtgcccaccatgcacccctgatgttcgccgtctggcgagcccttagccttgctgtagagacttccgtcacccttggtagagtttatttttttgatggctaagatactgctgatgctgaaataaactagggttttggcctgcctgcgtctg

SEQ ID NO: 185 - DNA, 1936 bp, human
ccgaggcagcgggcagacgagcagggggcgggcggacatcttgggatccggagagtggccgggccggcagagcagggggccgaggacaccaggtctgttctcagagcgatgggccgcggagactgatctgccgccatgattggaggcttattcatctataatcacaagggggaggtgctcatctcccgagtctaccgagatgacatcgggaggaacgcagtggatgcctttcgggtcaatgttatccatgcccggcagcaggtgcgcagccccgtcaccaacattgctcgcaccagcttcttccacgttaagcggtccaacatttggctggcagcagtcaccaagcagaatgtcaacgctgccatggtcttcgaattcctctataagatgtgtgacgtgatggctgcctactttggcaagatcagcgaggaaaacatcaagaacaattttgtgctcatatatgagctgctggatgagattctagactttggctacccacagaattccgagacaggcgcgctgaaaaccttcatcacgcagcagggcatcaagagtcagcatcagacaaaagaagagcagtcacagatcaccagccaggtaactgggcagattggctggcggcgagagggtatcaagtatcgtcggaatgagctcttcctggatgtgctggagagtgtgaacctgctcatgtccccacaagggcaggtgctgagtgcccatgtgtcgggccgggtggtgatgaagagctacctgagtggcatgcctgaatgcaagtttgggatgaatgacaagattgttattgaaaagcagggcaaaggcacagctgatgaaacaagcaagagcgggaagcaatcaattgccattgatgactgcaccttccaccagtgtgtgcgactcagcaagtttgactctgaacgcagcatcagctttatcccgccagatggagagtttgagcttatgaggtatcgcacaaccaaggacatcatccttcccttccgggtgatcccgctagtgcgagaagtgggacgcaccaaactggaggtcaaggtggtcatcaagtccaactttaaaccctcactgctggctcagaagatcgaggtgaggatcccaaccccactgaacacaagcggggtgcaggtgatctgcatgaaggggaaggccaagtacaaggccagcgagaatgccatcgtgtggaagatcaagcgcatggcaggcatgaaggaatcgcagatcagcgcagagattgagcttctgcctaccaacgacaagaagaaatgggctcgaccccccatttccatgaactttgaggtgccattcgcgccctctggcctcaaggtgcgctacttgaaggtgtttgaaccgaagctgaactacagcgaccatgatgtcatcaaatgggtgcgctacattggccgcagtggcatttatgaaactcgctgctagctgccactaggcagctagcccacctccccagccaccctcctccacaggtccaggtgccgctccctcccccaccacacatcagtgtctcctccctcctgctttgctgccttccctttgcaccagcccgagtctaggtctgggccaagcacattacaagtgggaccggtggagcagcccctgggctccctgggcaggggagttctgaggctcctgctctcccatccacctgtctgtcctggcctaatgccaggctctgagttctgtgaccaaagccaggtgggttccctttccttcccacccctgtggccacagctctggagtgggagggttggttgcccctcacctcagagctcccccaaaggccagtaatggatccccggcctcagtccctactctgctttgggatagtgtgagcttcattttgtacacgtgtgacttcgtccagttacaaacccaataaactctgtagagtggaaaaaaaaaaaaaaaaaaa

SEQ ID NO: 186 - DNA, 667 bp, human
cgtgcaccctgagccggagctgcccagtcgccgcgggaccggggccgctggggtctggacgggggtcgccatgatccgctttatcctcatccagaaccgggcaggcaagacgcgcctggccaagtggtacatgcagtttgatgatgatgagaaacagaagctgatcgaggaggtgcatgccgtggtcaccgtccgagacgccaaacacaccaactttgtggaggtcttaaacgaatatttccacaatgtctgtgaactggacctggtgttcaacttctacaaggtttacacggtcgtggacgagatgttcctggctggcgaaatccgagagaccagccagacgaaggtgctgaaacagctgctgatgctacagtccctggagtgagggcaggcgagcaccccaccccggccccggcccctcctggaatcgcctgctcgcttccccttcccaggcccgtggccaacccagcagtccttccctcaactgcctaggaggaagggacccagctgggtctgggccacaagggaggagacttcaccccacttcctctgggccctggctgtgggcagaggccaccgtgtgtgtcccgagtaaccgtgccgttgtcgtgtgattccataagcgtctgtgcgtggagtccccaataaacctgtggtcctgcctggc

SEQ ID NO: 187 - DNA, 2486 bp, human
acccggagcgggaagatggcggcggcgcaggaggcggacggggcccgcagcgccgtggtggcggccgggggaggcagctccggtcaggtgaccagcaatggcagcatcgggagggacccgccagcggagacccagcctcagaacccaccggcccagccggcacccaatgcctggcaggtcatcaaaggtgtgctgtttaggatcttcatcatctgggccatcagcagttggttccgccgagggccggcccctcaggaccaggcgggccccggaggagccccacgcgtcgccagccgcaacctgttccccaaagacactttaatgaacctgcatgtgtacatctcagagcacgagcactttacagacttcaacgccacgtcggcactcttctgggaacagcacgatcttgtgtatggcgactggactagcggcgagaactcagacggctgctacgagcactttgctgagctcgatatcccacagagcgtccagcagaacggctccatctacatccacgtttacttcaccaagagtggcttccacccagacccccggcagaaggccctgtaccgccggcttgccacagtccacatgtcccggatgatcaacaaatacaagcgcagacgatttcagaaaaccaagaacctgctgacaggagagacagaagcggacccagaaatgatcaagagggctgaggactatgggcctgtggaggtgatctcccattggcaccccaacatcaccatcaacatcgtggacgaccacacgccgtgggtgaagggcagtgtgccccctcccctggatcaatatgtgaagttcgacgccgtgagcggtgactactatcccatcatctacttcaatgactactggaacctgcagaaggactactaccccatcaacgagagcctggccagcctgccgctccgcgtctccttctgcccactctcgctttggcgctggcagctctatgctgcccagagcaccaagtcgccctggaacttcctgggcgatgagttgtacgagcagtcagatgaggagcaggactcggtgaaggtggccctgctggagaccaacccctacctgctggcgctcaccatcatcgtgtctatcgttcacagtgtcttcgagttcctggccttcaagaatgatatccagttctggaacagccggcagtccctggagggcctgtccgtgcgctccgtcttcttcggcgttttccagtcattcgtggtcctcctctacatcctggacaacgagaccaacttcgtggtccaggtcagcgtcttcattggggtcctcatcgacctctggaagatcaccaaggtcatggacgtccggctggaccgagagcacagggtggcaggaatcttcccccgcctatccttcaaggacaagtccacgtatatcgagtcctcgaccaaagtgtatgatgatatggcattccggtacctgtcctggatcctcttcccgctcctgggctgctatgccgtctacagtcttctgtacctggagcacaagggctggtactcctgggtgctcagcatgctctacggcttcctgctgaccttcggcttcatcaccatgacgccccagctcttcatcaactacaagctcaagtctgtggcccaccttccctggcgcatgctcacctacaaggccctcaacacattcatcgacgacctgttcgcctttgtcatcaagatgcccgttatgtaccggatcggctgcctgcgggacgatgtggttttcttcatctacctctaccaacggtggatctaccgcgtcgaccccacccgagtcaacgagtttggcatgagtggagaagaccccacagctgccgcccccgtggccgaggttcccacagcagcaggggccctcacgcccacacctgcacccaccacgaccaccgccaccagggaggaggcctccacgtccctgcccaccaagcccacccagggggccagctctgccagcgagccccaggaagcccctccaaagccagcagaggacaagaaaaaggattagtcgagactggtcctcacctgctccggctcctggcgaccactacccctgcgtcccggccccctcgcctcccctccctgtcgccctttccctggacagatcaggccggggcggtgggaggcccgcctcaggtcagggcccagcgtgtgacgtaggggccggggcaggccagggtttgtttgtggaggcgctgtctgtccctctgtccctctgtgtttccagccatctcgccctgccagcccagcaccactgggaatcatggtgaagctgatgcagcgttgccgagggggtgggttgggcgggggtggggccgggcccccctacgggatgcccacggccgttcatcatcttgtccctcgtccccctaccacactccccctcctagaccgccgccctttaacacagtctggatttaataaattcatatgggtgtttaacttaaactcaaaaaaaaaaaaaaaaaa

SEQ ID NO: 188 - DNA, 6511 bp, human
gaagtccggccttccgagagctagctgtccgccgcggcccccgcacgccgggcagccgtccctcgccgcctcgggcgcgccaccatggggccccggctcagcgtctggctgctgctgctgcccgccgcccttctgctccacgaggagcacagccgggccgctgcgaagggtggctgtgctggctctggctgtggcaaatgtgactgccatggagtgaagggacaaaagggtgaaagaggcctcccggggttacaaggtgtcattgggtttcctggaatgcaaggacctgaggggccacagggaccaccaggacaaaagggtgatactggagaaccaggactacctggaacaaaagggacaagaggacctccgggagcatctggctaccctggaaacccaggacttcccggaattcctggccaagacggcccgccaggccccccaggtattccaggatgcaatggcacaaagggggagagagggccgctcgggcctcctggcttgcctggtttcgctggaaatcccggaccaccaggcttaccagggatgaagggtgatccaggtgagatacttggccatgtgcccgggatgctgttgaaaggtgaaagaggatttcccggaatcccagggactccaggcccaccaggactgccagggcttcaaggtcctgttgggcctccaggatttaccggaccaccaggtcccccaggccctcccggccctccaggtgaaaagggacaaatgggcttaagttttcaaggaccaaaaggtgacaagggtgaccaaggggtcagtgggcctccaggagtaccaggacaagctcaagttcaagaaaaaggagacttcgccaccaagggagaaaagggccaaaaaggtgaacctggatttcaggggatgccaggggtcggagagaaaggtgaacccggaaaaccaggacccagaggcaaacccggaaaagatggtgacaaaggggaaaaagggagtcccggttttcctggtgaacccgggtacccaggactcataggccgccagggcccgcagggagaaaagggtgaagcaggtcctcctggcccacctggaattgttataggcacaggacctttgggagaaaaaggagagaggggctaccctggaactccggggccaagaggagagccaggcccaaaaggtttcccaggactaccaggccaacccggacctccaggcctccctgtacctgggcaggctggtgcccctggcttccctggtgaaagaggagaaaaaggtgaccgaggatttcctggtacatctctgccaggaccaagtggaagagatgggctcccgggtcctcctggttcccctgggccccctgggcagcctggctacacaaatggaattgtggaatgtcagcccggacctccaggtgaccagggtcctcctggaattccagggcagccaggatttataggcgaaattggagagaaaggtcaaaaaggagagagttgcctcatctgtgatatagacggatatcgggggcctcccgggccacagggacccccgggagaaataggtttcccagggcagccaggggccaagggcgacagaggtttgcctggcagagatggtgttgcaggagtgccaggccctcaaggtacaccagggctgataggccagccaggagccaagggggagcctggtgagttttatttcgacttgcggctcaaaggtgacaaaggagacccaggctttccaggacagcccggcatgccagggagagcgggttctcctggaagagatggccatccgggtcttcctggccccaagggctcgccgggttctgtaggattgaaaggagagcgtggcccccctggaggagttggattcccaggcagtcgtggtgacaccggcccccctgggcctccaggatatggtcctgctggtcccattggtgacaaaggacaagcaggctttcctggaggccctggatccccaggcctgccaggtccaaagggtgaaccaggaaaaattgttcctttaccaggcccccctggagcagaaggactgccggggtccccaggcttcccaggtccccaaggagaccgaggctttcccggaaccccaggaaggccaggcctgccaggagagaagggcgctgtgggccagccaggcattggatttccagggccccccggccccaaaggtgttgacggcttacctggagacatggggccaccggggactccaggtcgcccgggatttaatggcttacctgggaacccaggtgtgcagggccagaagggagagcctggagttggtctaccgggactcaaaggtttgccaggtcttcccggcattcctggcacacccggggagaaggggagcattggggtaccaggcgttcctggagaacatggagcgatcggaccccctgggcttcaggggatcagaggtgaaccgggacctcctggattgccaggctccgtggggtctccaggagttccaggaataggcccccctggagctaggggtccccctggaggacagggaccaccggggttgtcaggccctcctggaataaaaggagagaagggtttccccggattccctggactggacatgccgggccctaaaggagataaaggggctcaaggactccctggcataacgggacagtcggggctccctggccttcctggacagcagggggctcctgggattcctgggtttccaggttccaagggagaaatgggcgtcatggggacccccgggcagccgggctcaccaggaccagtgggtgctcctggattaccgggtgaaaaaggggaccatggctttccgggctcctcaggacccaggggagaccctggcttgaaaggtgataagggggatgtcggtctccctggcaagcctggctccatggataaggtggacatgggcagcatgaagggccagaaaggagaccaaggagagaaaggacaaattggaccaattggtgagaagggatcccgaggagaccctgggaccccaggagtgcctggaaaggacgggcaggcaggacagcctgggcagccaggacctaaaggtgatccaggtataagtggaaccccaggtgctccaggacttccgggaccaaaaggatctgttggtggaatgggcttgccaggaacacctggagagaaaggtgtgcctggcatccctggcccacaaggttcacctggcttacctggagacaaaggtgcaaaaggagagaaagggcaggcaggcccacctggcataggcatcccagggctgcgaggtgaaaagggagatcaagggatagcgggtttcccaggaagccctggagagaagggagaaaaaggaagcattgggatcccaggaatgccagggtccccaggccttaaagggtctcccgggagtgttggctatccaggaagtcctgggctacctggagaaaaaggtgacaaaggcctcccaggattggatggcatccctggtgtcaaaggagaagcaggtcttcctgggactcctggccccacaggcccagctggccagaaaggggagccaggcagtgatggaatcccggggtcagcaggagagaagggtgaaccaggtctaccaggaagaggattcccagggtttccaggggccaaaggagacaaaggttcaaagggtgaggtgggtttcccaggattagccgggagcccaggaattcctggatccaaaggagagcaaggattcatgggtcctccggggccccagggacagccggggttaccgggatccccaggccatgccacggaggggcccaaaggagaccgcggacctcagggccagcctggcctgccaggacttccgggacccatggggcctccagggcttcctgggattgatggagttaaaggtgacaaaggaaatccaggctggccaggagcacccggtgtcccagggcccaagggagaccctggattccagggcatgcctggtattggtggctctccaggaatcacaggctctaagggtgatatggggcctccaggagttccaggatttcaaggtccaaaaggtcttcctggcctccagggaattaaaggtgatcaaggcgatcaaggcgtcccgggagctaaaggtctcccgggtcctcctggccccccaggtccttacgacatcatcaaaggggagcccgggctccctggtcctgagggccccccagggctgaaagggcttcagggactgccaggcccgaaaggccagcaaggtgttacaggattggtgggtatacctggacctccaggtattcctgggtttgacggtgcccctggccagaaaggagagatgggacctgccgggcctactggtccaagaggatttccaggtccaccaggccccgatgggttgccaggatccatggggcccccaggcaccccatctgttgatcacggcttccttgtgaccaggcatagtcaaacaatagatgacccacagtgtccttctgggaccaaaattctttaccacgggtactctttgctctacgtgcaaggcaatgaacgggcccatggccaggacttgggcacggccggcagctgcctgcgcaagttcagcacaatgcccttcctgttctgcaatattaacaacgtgtgcaactttgcatcacgaaatgactactcgtactggctgtccacccctgagcccatgcccatgtcaatggcacccatcacgggggaaaacataagaccatttattagtaggtgtgctgtgtgtgaggcgcctgccatggtgatggccgtgcacagccagaccattcagatcccaccgtgccccagcgggtggtcctcgctgtggatcggctactcttttgtgatgcacaccagcgctggtgcagaaggctctggccaagccctggcgtcccccggctcctgcctggaggagtttagaagtgcgccattcatcgagtgtcacggccgtgggacctgcaattactacgcaaacgcttacagcttttggctcgccaccatagagaggagcgagatgttcaagaagcctacgccgtccaccttgaaggcaggggagctgcgcacgcacgtcagccgctgccaagtctgtatgagaagaacataatgaagcctgactcagctaatgtcacaacatggtgctacttcttcttctttttgttaacagcaacgaaccctagaaatatatcctgtgtacctcactgtccaatatgaaaaccgtaaagtgccttataggaatttgcgtaactaacacaccctgcttcattgacctctacttgctgaaggagaaaaagacagcgataagctttcaatagtggcataccaaatggcacttttgatgaaataaaatatcaatattttctgcaatccaatgcactgatgtgtgaagtgagaactccatcagaaaaccaaagggtgctaggaggtgtgggtgccttccatactgtttgcccattttcattcttgtattataattaattttctacccccagagataaatgtttgtttatatcactgtctagctgtttcaaaatttaggtcccttggtctgtacaaataatagcaatgtaaaaatggttttttgaacctccaaatggaattacagactcagtagccatatcttccaaccccccagtataaatttctgtctttctgctatgtgtggtactttgcagctgcttttgcagaaatcacaattttcctgtggaataaagatggtccaaaaatagtcaaaaattaaatatatatatatattagtaatttatatagatgtcagcaattaggcagatcaaggtttagtttaacttccactgttaaaataaagcttacatagttttcttcctttgaaagactgtgctgtcctttaacataggtttttaaagactaggatattgaatgtgaaacatccgttttcattgttcacttctaaaccaaaaattatgtgttgccaaaaccaaacccaggttcatgaatatggtgtctattatagtgaaacatgtactttgagcttattgtttttattctgtattaaatattttcagggttttaaacactaatcacaaactgaatgacttgacttcaaaagcaacaaccttaaaggccgtcatttcattagtattcctcattctgcatcctggcttgaaaaacagctctgttgaatcacagtatcagtattttcacacgtaagcacattcgggccatttccgtggtttctcatgagctgtgttcacagacctcagcagggcatcgcatggaccgcaggagggcagattcggaccactaggcctgaaatgacatttcactaaaagtctccaaaacatttctaagactactaaggccttttatgtaatttctttaaatgtgtatttcttaagaattcaaatttgtaataaaactatttgtataaaaattaagcttttattaatttgttgctagtattgccacagacgcattaaaagaaacttactgcacaagctgctaataaatttgtaagctttgcataccttaaaaaaaaaaaaaaaaaa

SEQ ID NO: 189 - DNA, 1332 bp, human
cggactagacctggtcagacacaatgttggcactcttggttctggtgactgtggccctggcatctgctcatcatggtggtgagcactttgaaggcgagaaggtgttccgtgttaacgttgaagatgaaaatcacattaacataatccgcgagttggccagcacgacccagattgacttctggaagccagattctgtcacacaaatcaaacctcacagtacagttgacttccgtgttaaagcagaagatactgtcactgtggagaatgttctaaagcagaatgaactacaatacaaggtactgataagcaacctgagaaatgtggtggaggctcagtttgatagccgggttcgtgcaacaggacacagttatgagaagtacaacaagtgggaaacgatagaggcttggactcaacaagtcgccactgagaatccagccctcatctctcgcagtgttatcggaaccacatttgagggacgcgctatttacctcctgaaggttggcaaagctggacaaaataagcctgccattttcatggactgtggtttccatgccagagagtggatttctcctgcattctgccagtggtttgtaagagaggctgttcgtacctatggacgtgagatccaagtgacagagcttctcgacaagttagacttttatgtcctgcctgtgctcaatattgatggctacatctacacctggaccaagagccgattttggagaaagactcgctccacccatactggatctagcattggcacagaccccaacagaaattttgatgctggttggtgtgaaattggagcctctcgaaacccctgtgatgaaacttactgtggacctgccgcagagtctgaaaaggagaccaaggccctggctgatttcatccgcaacaaactctcttccatcaaggcatatctgacaatccactcgtactcccaaatgatgatctacccttactcatatgcttacaaactcggtgagaacaatgctgagttgaatgccctggctaaagctactgtgaaagaacttgcctcactgcacggcaccaagtacacatatggcccgggagctacaacaatctatcctgctgctgggggctctgacgactgggcttatgaccaaggaatcagatattccttcacctttgaacttcgagatacaggcagatatggctttctccttccagaatcccagatccgggctacctgcgaggagaccttcctggcaatcaagtatgttgccagctacgtcctggaacacctgtactagttgagaaagctgatggccttgtttcaaaattctcatttttcatttcttttctttcttg

SEQ ID NO: 190 - DNA, 2714 bp, human
agctcgccggctcaatactccgggggtctgggtggggggctcaaacgcagggctctgggacgcaggcactgctccaggtgatagtgcgggaacatggccttgcagctgggcaggctgagctcgggcccctgctggctcgtggcgcggggcggctgcggagggccccgcgcctggtcccagtgcggcggcggagggctccgagcctggtcccagcgcagcgcagccggacgcgtctgccggccccctggcccggctggcacggagcagagccgcgggctggggcacggctcgacgtcgagaggcggcccctgggtggggacagggctggccgcggcgctggcggggttggtggggctggccaccgccgccttcgggcatgtgcagcgggcggagatgttgcctaagacctcggggacgcgggccacttcgctggggaggccggaggaggaggaggatgagctggcccaccgctgcagcagcttcatggccccgcctgtgaccgacctgggcgagctgcgaaggaggccgggcgacatgaagaccaagatggagctgctgattctggagacccaggcccaggtgtgccaggctctggcacaggtagacgggggcgccaacttttctgtggaccggtgggagaggaaggaaggaggtggcggcatcagctgtgtacttcaagatgggtgtgttttcgaaaaggctggggtgagcatttctgttgttcatggaaatctttcagaggaagctgcaaaacaaatgagaagcagaggaaaagttctgaagactaaagatggtaaattgccattttgtgctatgggcgtgagctctgttatccaccccaagaatcctcatgctcctactatccatttcaactacagatactttgaagtagaagaagctgatggcaacaagcagtggtggtttggtggtggatgtgacctcactccaacatacttgaatcaagaagacgctgtccattttcacagaactctgaaggaggcttgtgaccagcatggtccagatctctaccccaaatttaaaaaatggtgtgatgattacttctttatagcccatcgtggagaacggcggggcattggtggtatcttttttgatgatcttgactctccgtccaaggaggaggtgtttcgctttgtacagagctgtgccagggctgtagttccttcttacattccccttgtgaaaaagcactgtgatgactcattcaccccccaggagaagctgtggcagcagctcagaagaggacggtatgtagaatttaatctgctgtatgatcggggcacaaagtttggcctcttcactccaggatccagaattgaaagtatcttgatgtctttacctctaactgcccgatgggagtacatgcattcaccctcagagaattccaaagaagctgaaattctggaagttctacgccatccaagggactgggtgcgttgatgcaggcagaatggctgtgcaggggtttggagggcacacgatgtgtgctccccatgccactggtcggcactttgccactgtgtggcagttacccgtgccttagtcttctccactctgcaccctacctcgtgggcagatgataacatgttttggatgctgtcagtgatgaatggtgagatggcagattgtcagagtcaattgattaaacctcatttatacttctagtgtcattttatatgactagtttacaaaataggacattgagtttccaagtattgagataagggaatataaatagtattatatgtatcaggaaatctctcatcttgtttttgtttcatgtattttttaaagttttcatttgtgccacaaaaatctgtcgtggaatatattttattttcattaattcagtgaagttgagacttcatagtaattttagaatgcaacttgaaggtaaaaattttactttgtcaatactgaagtctctgctgtaatccttatatatctttctccagagaacataatattgtcaaatagatacacatttttctaataggtatttagaagcacttgaaataatctctgcatgtgttacaattcagttatttctgtagtttgtaaactctaaagtgacattactattattttagagatgtctaagttgtaattttgatttttgtggaaccattgtttgttaatgttgggattctctgcacttttgaatgtgaaagcttatatccctgaattctgatacttaagagttttctatttcagacatctctgtgtggaagttgagactaagaataatcctagggatgtcatgaatttaggcaatgtttctcatttggaaaatgaaatgagaaataatttccttctttaaagcaagtatatatagtatgagaaacttggaggcatttcatacacacgtttcttaggaaaatggacacattgaaaatgtcctcttttttatattagagattctgcagctctttgctcttaagagcaaatcacaacaggattcttaatgtatgatttctttgttcatatattatgaatgtattattttatttgcttcgtaataaagtttataaggaagagcatctcatacatatcattatcgtggaacacgttgaatgtttgtgattctgtgtggcctttttggggctggaaaatgtatgaattcttcaactgtcttacaagagatctgctaataaattttattattaaataagactaaaaaaaaaaaaaaaaaaaaa

SEQ ID NO: 191 - DNA, 5235 bp, human
cggagggggaggtggctgccgcttctcccgcgtccgccattttgttgctgtggctattgggaacaagctgggcaaaagcaccccggaggcgcgacgctccttcgagttcggtgcctcgtgtgacggcgggggtcggtgaagacccgtcgagctgcggcgccggcgcgttccaggccgggagtcactggaggcacccctgggacgccgagcagcccgagaaccccggggtggcctccgctgcggctcgggtttgcctgccccgaccccccggctctgccgtgcattcccgggcggctctctccgtgtggcggccccggagcaggcgggcggcgtcggaggatgctgcgggcccggagccgagaggaaagtgctggcccagccctctgagcgctcctcgaggtgtgcgagaggcccttcctcggccccaaagccgtctgccgggctaaggcgtgcagagcaggcgaggacagccgccgcccctaccgccgcagagtccccggtccaacaccatgtcctccgccaggttcgactcctcggaccgctccgcctggtatatggggccggtgtctcgccaggaggcgcagacccggctccagggccagcgccacggtatgttcctcgtccgcgattcttccacctgccctggggactatgtgctgtcggtgtccgagaactcgcgggtctcccactacatcatcaactcgctgcccaaccgccgttttaagatcggggaccaggaatttgaccatttgccggccctgctggagttttacaagatccactacctggacaccaccaccctcatcgagcctgcgcccaggtatccaagcccaccaatgggatctgtctcagcacccaacctgcctacagcagaagataacctggaatatgtacggactctgtatgattttcctgggaatgatgccgaagacctgccctttaaaaagggtgagatcctagtgataatagagaagcctgaagaacagtggtggagtgcccggaacaaggatggccgggttgggatgattcctgtcccttatgtcgaaaagcttgtgagatcctcaccacacggaaagcatggaaataggaattccaacagttatgggatcccagaacctgctcatgcatacgctcaacctcagaccacaactcctctacctgcagtttccggttctcctggggcagcaatcacccctttgccatccacacagaatggacctgtctttgcgaaagcaatccagaaaagagtaccctgtgcttatgacaagactgccttggcattagaggttggtgacatcgtgaaagtcacaaggatgaatataaatggccagtgggaaggcgaagtgaacgggcgcaaagggcttttcccctttacgcacgtcaaaatctttgaccctcaaaacccagatgaaaacgagtgattgctgttgccctgtttcctgctgctttgttgttctgcctgtcctagtctcctttgaagtgggaaagcattttctctcataggcaagtcacactgcattgccgaagtccagctttctgcagactggcagtcgcacacacatttggaatgcacacagcggctgcctcctgatgtttgtatcatagtcgtattgtcaaagagtagccgattttagagttcttttggatcataaactggaaatactgatggaagcacacaagtggagagaagttgacgtggaaagggtcttccttctcattgctgcccgtttgtacatgggactgattctgtcgtgttcaccagagaaagcttgaggccatggcgagatactgcatgtttgctgttccacaaagcagtggcttagctgccatcttgcttttctttggacaacaggaagtgaaccttaaggaagagagaattctgttctaaaactccaaaatctggcttttttttttcttttgttttggtttggttttggaaaactaattaattagacttgtgtgggggtttttttttgttttgttttgtttgttttgttttgtttttttgagacggtgtctcgctgcatcacccaggctggagtgcagtggcgcaatctcgccttcctgcagtctccgcctcctgagttcaagcgattctcctgcctcagcctcccaagtagctgggactgcaggcgcgcacaccacgcccagctaatttttgtatttttagtagagacggggtttcatcatgttgaccaggctggtctcaaactcctgacttcaggtgatccacccgccttcagcctcccaacgtgctgggattacagccgtgagccgccgcgcctggcctagacttgtgtgttctaaacaggttaagtagcaggttgggtttttatgatagtgcaaggaatgactcatgcctctgagcttctaaactgaagctgctgtaactaaaggaatctgaaaagaacaaccctgaagcagaggcctttattgtcttggttgccagtagtaccttgttttgccatgtagcagacaacacacaaaataatgcagttgtggtgtgccatgctatgtgcacagccccttggattactttgttttaaaaagcatcagagttgggggtactttagggaaacctttgcttaccttgttttgccagtgataagagcagtgggttggagggcacttggccagttttctgttcagcttttcagtgaatgtacccctttaaggttcagacttaaacttccttaaaaagtggcgttgttcatagaatcgttggactcattaatgaatcgttcaactccactcactgaagcccagacctccgtgcccaggcccaatctcgtcaggctgccagagaaagttggtgctgctcatactggtctcacagtctaagtaagtgtctgtgatgctcccaagcaaaggaaatgcaagctctggaaattcgttaatgtatttgatgtcttagtgttttagtgactagggagaccattaactagtttatcattaaccacttatcagtgtattgatgttaaagcatttccctgttagctaaaagaggcctgttcatacaagccaactggtatatacgtgtggttcatccatcatctgctgcacatagcagactagaattctgggaaccctgtgcaattcagtctgctctcccttgtggaccctggtaaagaaaagcctcagctcatagtgaacacagcagacctagaaatgtagcagcagcctactgagtagctttcatttactgatcatctgctgtgactgtggccctgtctggaggttcctaggttttgagatttagagcaatgcattctggagacagaaccagcagaacagccatttttcaatttttctttaaatcagtattccatcaggcagataactgctgtattcatgaatcttgagagtgttcctgagacagaattaatggtcatttgggaaaactatcgccatggcttcccatctgtggttttcctctaaaagccttggagattagcccttccttgccagtgagaacggtgaccgcctcctgctctgcacggtctgcggcagttgccgcttctggttaggtgtgtcaggttggcttattttgggttcaggcctggcgtagcacccacaagtggcagacatatcacaagagtccccagactctgcctagaaacagtgtttgccctttggccagtgacgtggttcatcccggcccatgttgagccatgagtggagtttccaacagagggaggaatgtgtgccttgttcaaggagggcacgacccttaggcctttttcaaccagatttagctgaagggcttgacacctttgaattacagcagttgactcagagtgcaagaagtctggccattttggaaagcaaggtttcctttcagccctgtctactgaccaataccccgactcaccttgtgtggcgcacttcagaatcagatatacctagagtatacctgtggtttggttttataattaatcagctcgttacttcagcccatgaaaatggcatccagggctgccaggagattcagagctcaaaacaaggcgagcttgagttctgcactccagatatgtgccaaaactagtaaaacttaacggacttacaaccttgtcagtttttttaatgaggcagggatactctgtttttcacactaaacatatgaatgcagcactgctgcctcagctcagcttcgtgcctgggttccccactggtctgggaagactgttgtgctccatagagcagtgcacatctgacccagagggtgggtgttcataactgctacttgctctgctctaccatgtttaaagaaatatttggatgttaaattaactcactatggtttttcacctgggaaggaaacaaattacgtactagagggcattgactggttaaaaacttgtgtatcccgggaaggacctgcggtacaggagtcagccatgtctgtgctgtgtggaaccacctgatgacatggttaacgaggaagacgatgtgttgaccggctgccgtttgaggactttggtcacccagactagacaccttctgtgctcatgtttggaaagctgaaagggaaggacagctgtgccctcctgggagctcatgtgtccctggcgctgtgctagctttcctttacagctgtttacagacaaggcaggcctgaggcagatggccactgctcttgtgatgtttgctcagaggaatatgaacattttatttttgaaaagggatgatgtggttttttgccaggtgtttataattaatcctttaatattatggttattaacctcttaaacatgaatgaattcttgattgttttaacacagtacctaagactaatgctttctgtggacaccactgagctctgcctcaactccaccctctgcgaccggaggactatgcccctagtaactgctgtcggtgtggacgctgtgctggttctgttttctaaaggagcagaaggacaggtctctgagacaggatcgttgtccctacaggaggaacagtggccttgcttcttagacggtcttcactgtgtgttttaaaacaacaacaacaacaacaacaacaacataaaactcttttgacctgtaacttaaagatcataaacttcaggcaataatattttctgtgtaagcttttaaaattatttttggggatcatagcttgttttattttgtgctataaaattaacagtattaaatgacttatattcttagaataaaaaaaaaaaaaaaaaaaaaaaaaaaaaaaaaaaaaaaaaaaaaaaaaaaaaaaaaa

SEQ ID NO: 192 - DNA, 2421 bp, human
gaattcaaagtggagtaccgcaaacttgatatggaaaataaaaagaaagacaaggacaaatcagatgatagaatggcacgacctagtggtcgatcgggacacaacactcgaggaactgggtcttcatcgtctggagttttaatggttggacctaactttagagttggaaaaaaaattggatgtggcaattttggagaattacgattagggaaaaatttatacacaaatgaatatgtggcaattaagttggagcccatgaaatcaagagcaccacagctacatttggaatacagattctataagcagttaggatctggagatggtatacctcaagtttactatttcggcccttgtggtaaatacaatgctatggtgctggaactgctgggacctagtttggaagacttgtttgacttgtgtgacagaacattttctcttaaaacagttctcatgatagctatacaactgatttctcgcatggaatatgtccattcaaagaacttgatatacagagatgtaaaacctgagaacttcttaataggacgaccaagaaacaaaacccagcaagttattcacattatagattttggtttggcaaaggaatatattgatccggagacaaagaaacacataccatacagagaacacaagagccttacaggaacagctagatatatgagcataaacacacatttaggaaaagaacaaagtagaagagacgatttagaagctttaggtcatatgttcatgtattttctgagaggcagtcttccttggcaaggcttaaaggctgacacattaaaggagaggtatcagaaaattggagatacaaaacgggctacaccaatagaagtgttatgtgaaaattttccagaaatggcaacatatcttcgttatgtaagaaggctagatttttttgaaaaaccagactatgaatacttaagaaagctttttactgacttgtttgatcgaaaaggatatatgtttgattatgaatatgactggattggtaaacagttgcctactccagtgggtgcagttcagcaagatcctgctctgtcatcaaacagagaagcacatcaacacagagataagatgcaacaatccaaaaaccagtcggcagaccacagggcagcttgggactcccagcaggcaaatccccaccatttgagagctcaccttgcagcagacagacatggtggctcggtacaggttgtaagttctacaaatggagagttaaacacagatgaccccaccgcaggacgttcaaatgcacccatcacagcccctactgaagtagaagtgatggatgaaaccaagtgctgctgctttttcaaacgaaggaaaaggaaaaccatacagcgccacaaatgactctggacacagacagatcctggggagttacttacatgttcatctgctgtcttgtgattaaaatcatctctgtagtgaccacgtatattttcaaggactcactcttagaaacaaaaatgtcatactatcatacttcattttgtggttgtcttacattctttttctttttttttttctctaatttaacctttatggaagctttaaagttttgtcaaaacatgagtgctttgcccatcagtgaatggaatggaccaatgaggtggtatcaatgaatatagttccatagaacattttccagaagttcttctgttgtagaaagcagtacagtatcttaagtgtcaaccagttatatacctaatctggttttttataacttctgtaagagcataatcaaacaggaattttcttttctcagtggataatacaacagagaaaacagagttgcccaaatatttaaaagaagttattccttgagaagttcatattttgtgacatctgcattgatttcagtattactgatggtactgttattcataagtcatattaacattctctccgtgaaatcatggtacagtcactgcccagaggtactgaggaaaagcaatatgggttcggcagatggtggtggtaaaatgaatcttaaggagtgtggtaaatatgtgctccgcttttgttgcatcactatgtgaagtactgtgttgcagaagtggcaaaagcgcttatttttaaaaatgcaaaatatttgtacaatgtaactttatgcttccaaataataatgtatgttagacagcaagaaatgaatactttaaaaagtgatatatgttggagttataaagaaatacactaaggagaggtagtaaatgtgaaccttgttgcagtgtataaggtggaagcctaaagaaatctcaccgaaacttactgctgaatgattacattctcccttaagcagaaaactttggatgtgccatgcaatggtgtctgtgtaattattttgctctttgattaaaaaaaagacccccagcaataaaaagtgggtcactctatgcc

SEQ ID NO: 193 - DNA, 1960 bp, human
cggggcgcggggcgctgcggccggtacacgccggggtagggccggggtcgggttgtggtcgggccgggattgggctctcctgggccatggcagccgaggcgcgcgtgtcgcgctggtacttcggggggctggcctcctgcggggccgcctgctgcacgcacccgctggacctgctcaaggtgcatctgcagacgcagcaggaggtgaagctgcgcatgacgggcatggcgctgcgggtggtgcgtaccgacggcatcctggcactctacagcggcctgagcgcctcgctgtgcagacagatgacctactccctgactcggttcgccatctacgagactgtgcgggaccgtgtggccaagggcagccaggggcctctccccttccacgagaaggtgttgctgggctccgtcagcggtttagctggaggcttcgtggggacgcccgcagacttggtcaacgtcaggatgcagaacgacgtgaagctgccccagggtcagcggcgcaactacgcccatgcgctggatggcctgtaccgcgtagctcgtgaagagggtctcaggagactgttctcgggtgcaaccatggcatccagccgaggggccttagtcactgtgggccagctgtcctgctacgaccaggccaagcagctggtccttagcaccgggtacctctctgacaacatcttcactcactttgtcgccagctttattgcaggtggatgtgccacgttcctgtgccagcccctggatgtgctgaagactcgcctgatgaactccaagggggagtatcagggcgttttccactgcgccgtggagacagcgaagctcgggcctctggccttttacaagggcctcgtcccagctggcatccgcctcatcccccacaccgtgctcacttttgtgtttctggaacagctacgcaaaaactttggcatcaaagtgccatcctgaccagccgtgggaatggctgggctgccaggccagacacgctaggttcttccaaagagtcccaagcccagcacctgctcctggggccacgacctccctggccgtggccacccgtcctccgcagcaggcccctgctgtccccccacctgctggctgagctcctcctggcctcgtcccctctcagctgtagctgcaccacccccgctctggctaccaggctctcccggctgggcactgcgtggccttgcccctctcccgctggcagctcctcaggggaacaggggctaccagaggctgatttctcccctctcctgggccaggggaggggtattatccctgcctcctgcccccgatgcccaaagcagcatcttccagcactttccatcgaggacttgggtggcagagtgtgggtgcagcctggctgttgctcacccaagtgctagctctgcacttcgtgtctgctgagagcaaccagaccttccatgtcctcgggcagctgcaactccccgcgagaccccgcagctgggtgggatgaacaagcaacgcagaccacaagcgagtgcctgggagggagtggcccagggtggttctggagccattgtgggtgagggtcgagggccaccgaggtcccgcgcaccgctgcctgccctgcagtggctttaacagttagttttgccaaagcctctccactcaccagcaggcggtctctgtcttcagggattgtgcctgcgtccctcgggcacctgggcccccccgcttggctccctgggggaatggcccaggcgggctgcggttcctccttagggccttctccccgacaaggagtccgacggggcggatgctgcatcctctgcctccctggtcgctgggcttcaccccacctgggaagggcagtgtgctctgtgggggctgcaatcaataaatgccgggagctgccaaaaaaaaaaaaaaaaaaaaaaaaaaaaaaaaaaaaaaaaaaaaaaaaaaaaaaaaaaaaaaaaaaaaaaaaaaaa

SEQ ID NO: 194 - DNA, 1819 bp, human
ctttagtgcgctcgccgtcggctctacctgcgtgctttagctccttctcgcctgatccttctgtctctcccaaccccggacacccggcttcgactggttatatcttcggtgttcttttcctctcttcttctttcgcggttcagcatgcaggaaaaagacgcctcctcacaaggtttcctgccacacttccaacatttcgccacgcaggcgatccatgtgggccaggatccagagcaatggacctccagggctgtagtgccccccatctcactgtccaccacgttcaagcaaggggcgcctggccagcactcgggttttgaatatagccgttctggaaatcccactaggaattgccttgaaaaagcagtggcagcactggatggggctaagtactgtttggcctttgcttcaggtttagcagccactgtaactattacccatcttttaaaagcaggagaccaaattatttgtatggatgatgtgtatggaggtacaaacaggtacttcaggcaagtggcatctgaatttggattaaagatttcttttgttgattgttccaaaatcaaattactagaggcagcaattacaccagaaaccaagcttgtttggatcgaaacccccacaaaccccacccagaaggtgattgacattgaaggctgtgcacatattgtccataagcatggagacattattttggtcgtggataacacttttatgtcaccatatttccagcgccctttggctctgggagctgatatttctatgtattctgcaacaaaatacatgaatggccacagtgatgttgtaatgggcctggtgtctgttaattgtgaaagccttcataatagacttcgtttcttgcaaaactctcttggagcagttccatctcctattgattgttacctctgcaatcgaggtctgaagactctacatgtccgaatggaaaagcatttcaaaaacggaatggcagttgcccagttcctggaatctaatccttgggtagaaaaggttatttatcctgggctgccctctcatccacagcatgagttggtgaagcgtcagtgtacaggttgtacagggatggtcaccttttatattaagggcactcttcagcatgctgagattttcctcaagaacctaaagctatttactctggccgagagcttgggaggattcgaaagccttgctgagcttccggcaatcatgactcatgcatcagttcttaagaatgacagagatgtccttggaattagtgacacactgattcgactttctgtgggcttagaggatgaggaagacctactggaagatctagatcaagctttgaaggcagcacaccctccaagtggaagtcacagctagtattccagagctgctattagaagctgcttcctgtgaagatcaaatcttcctgagtaattaaatggaccaacaatgagcctttgcaaaattttcaagcggaaattttaaggcacctcattatctttcataactgtaattttcttagggatcatctctgttaaaaagttttctgtatgtcatgttataattacaggtcaattctgttaatatctttttgttaattttgctctatgtttgcctctgaaggaggtgagatttgtgctactttgggagattatgttcttttttcatgtctaagatttattttgatcatgtttataatataatggtaattcatttttgatgttttgtgaagaatttaaatttaaacgaatgttcttaaatcaagtgtgatttttttgcatatcattgaaaagaacattaaaagcaatggtttacacttaaaaaaaaaaaaaaa

SEQ ID NO: 195 - DNA, 3709 bp, human
gggctgcaggaattcccccacagagggagcatgacttcggcaacttcacctatcattctgaaatgggaccccaaaagtttggaaatccggacgctaacagtggaaaggctgttggagccacttgttacacaggtgactacacttgtcaacacaagcaacaaaggcccatctggtaaaaagaaagggaggtcaaagaaagcccatgtactagctgcctctgtagagcaagccactcagaatttcctggaaaagggtgaacagatcgctaaggagagtcaagatctcaaagaagagttggtggctgctgtagaggatgtgcgcaaacaaggtgagacgatgcggatcgcctcctccgagtttgcagatgacccttgctcgtcggtaaagcgcggcaccatggtacgggcggcaagggctttgctctccgcggtgacacgcttactcatcctggcggacatggcagatgtcatgagacttttatcccatctgaaaattgtggaagaggccctggaagctgtcaaaaatgctacaaatgagcaagaccttgcaaaccgttttaaagagtttgggaaaaagatggtgaaacttaactatgtagcagcaagaagacaacaggagctgaaggatcctcactgtcgggatgagatggcagccgcccgaggggctctgaagaagaatgccacaatgctgtacacggcctctcaagcatttctccgccacccagatgtcgccgctacgagagccaaccgagattatgtgttcaaacaagtccaggaggccatcgccggcatctccaatgctgctcaagctacctcgcccactgacgaagccaagggccacacgggcatcggcgagctggctgcggctcttaatgagtttgacaataagattatcctggaccccatgacgttcagcgaggccaggttccggccgtccctggaggagaggctggagagcatcatcagcggcgcagcgctgatggccgactcctcctgcacgcgagacgaccggcgcgagaggatcgtggcggagtgcaacgccgtgcggcaggcgctccaggacctgctcagcgagtacatgaataatactggaaggaaagaaaaaggagatcctctcaacattgcgattgataagatgactaagaaaacaagagatctaaggagacagcttcggaaagcagtgatggatcacatatctgactctttcctggaaaccaatgttcctttgctagttctcattgaggctgcaaagagcggaaatgaaaaggaagtgaaagaatatgcccaagttttccgtgagcatgccaacaaactggtagaggttgccaatttggcctgttccatctccaacaatgaagaaggggtgaaattagttcggatggcagccacccagattgacagcctgtgtccccaggtcatcaatgccgctctgacactggctgcccggccacagagcaaagttgctcaggataacatggacgtcttcaaagaccagtgggagaagcaggtccgagtgttgacagaggccgtggatgacatcacctcagtggatgacttcctctctgtctcagaaaatcacatcttggaggatgtgaacaagtgtgtgatagccctccaagagggcgatgtggacactctggaccggactgcaggggccatcaggggccgggcagctcgagtcatacacatcatcaatgctgagatggagaactatgaagctggggtttatactgagaaggtgttggaagctacaaaattgctttctgaaacagtgatgccacgcttcgctgaacaagtagaggttgccattgaagccctgagtgccaacgttcctcaaccgtttgaggagaatgagttcatcgatgcctctcgcctggtgtatgatggcgttcgggacatcagaaaggctgtgctgatgatcaggaccccagaagaactagaggatgattctgactttgagcaggaagattatgatgtgcgtagagggacaagtgttcagactgaggatgaccagctcattgcagggcagagcgcacgggccatcatggcgcaactaccgcaggaggagaaggcaaaaatagctgagcaggtggagatattccatcaagagaaaagcaagctggatgcagaagtggccaaatgggacgacagcggcaatgatatcattgtactggccaagcagatgtgtatgatcatgatggaaatgacagacttcacaagaggcaaaggcccattgaaaaatacatctgatgtcattaatgctgccaagaaaattgccgaagcaggttctcgaatggacaaattagctcgtgctgtggctgatcagtgtcctgattcagcatgtaagcaggatttattagcctaccttcaacgaattgccttgtattgccatcagcttaatatctgcagcaaggtgaaggcagaagtgcagaatctgggaggagagctcattgtgtcagggacaggagttcagagcactttcactaccttttatgaggtagattgtgatgtcatagatgggggcagggctagtcaactttctacccacctcccaacctgtgctgagggagctccgatcgggagtggaagcagtgattcctccatgctggacagtgccacatcgcttatccaggcagctaaaaacctgatgaatgctgttgtcctcacggtgaaagcatcctatgtggcctcaaccaaataccagaaggtctatgggacagcagctgtcaactcacctgttgtgtcttggaagatgaaggctccagagaagaagccccttgtgaagagagaaaagcctgaagaattccagacacgagttcgacgaggttctcagaagaaacacatttcgcctgtacaggctttaagtgaattcaaagcaatggattccttctaggacgataggttttaacaagaaagctttttctttcttttctttctttctttttctttttaattccatttttgtatgcatacctgccagctcgtatgcctctggcatggggaaattaagggaacagtgtctgtttgcatgtaagatgagatgagatcaatactactgatccatctgtagcctgggaaggagacaggacattcctgtactaaggtggcacagagctgtcctttgcaacattctcataaaattgggcacagagttcgcattggcgcaatatttatgggagtgggagggatggggaaaataaacttaactctacaaaagcaaactctaatgcatgcaagaatcattaggttggcaggtatatgcataagtgaaaaatctggaagtgtaatggtagaacataaaacttgtattgcttctgtttcagtgcaaaaatgtactagccaatacgcttaagtgtgtggcccatgaattgaacaatttaaccttgaagtctatatccgtgatattatgtcgatttttaactgaggggaaattaactagtccagcctaaaatgcttcttttaatctgcattctgtttcctcttctagttgtgccattactagtgatcatgtttttttcccccctttaatgaaaacaataaacatctatttgagacaattaaaatccttctgggggcactggaagcacaatacggtgaccaatcttgctttcatttttttttctttttaatttgaaccatgattttgctagaaatagaaggcccagtggtggaatattagagggaaggaaactgacaacgtgtgaaagtta

SEQ ID NO: 196 - DNA, 2228 bp, human
atcattcggccctcagactgggctgggcaggtctgagagttagggaaagtccgttcccactgccctcggggagagaagaaaggagggggcaagggagaagctgctggtcggactcacaatgaaaacgctccttcttttgctgctggtgctcctggagctgggagaggcccaaggatcccttcacagggtgcccctcaggaggcatccgtccctcaagaagaagctgcgggcacggagccagctctctgagttctggaaatcccataatttggacatgatccagttcaccgagtcctgctcaatggaccagagtgccaaggaacccctcatcaactacttggatatggaatacttcggcactatctccattggctccccaccacagaacttcactgtcatcttcgacactggctcctccaacctctgggtcccctctgtgtactgcactagcccagcctgcaagacgcacagcaggttccagccttcccagtccagcacatacagccagccaggtcaatctttctccattcagtatggaaccgggagcttgtccgggatcattggagccgaccaagtctctgtggaaggactaaccgtggttggccagcagtttggagaaagtgtcacagagccaggccagacctttgtggatgcagagtttgatggaattctgggcctgggatacccctccttggctgtgggaggagtgactccagtatttgacaacatgatggctcagaacctggtggacttgccgatgttttctgtctacatgagcagtaacccagaaggtggtgcggggagcgagctgatttttggaggctacgaccactcccatttctctgggagcctgaattgggtcccagtcaccaagcaagcttactggcagattgcactggataacatccaggtgggaggcactgttatgttctgctccgagggctgccaggccattgtggacacagggacttccctcatcactggcccttccgacaagattaagcagctgcaaaacgccattggggcagcccccgtggatggagaatatgctgtggagtgtgccaaccttaacgtcatgccggatgtcaccttcaccattaacggagtcccctataccctcagcccaactgcctacaccctactggacttcgtggatggaatgcagttctgcagcagtggctttcaaggacttgacatccaccctccagctgggcccctctggatcctgggggatgtcttcattcgacagttttactcagtctttgaccgtgggaataaccgtgtgggactggccccagcagtcccctaaggaggggccttgtgtctgtgcctgcctgtctgacagaccttgaatatgttaggctggggcattctttacacctacaaaaagttattttccagagaatgtagctgtttccagggttgcaacttgaattaagaccaaacagaacatgagaatacacacacacacacacatatacacacacacacacttcacacatacacaccactcccaccaccgtcatgatggaggaattacgttatacattcatattttgtattgatttttgattatgaaaatcaaaaattttcacatttgattatgaaaatctccaaacatatgcacaagcagagatcatggtataataaatccctttgcaactccactcagccctgacaacccatccacacacggccaggcctgtttatctacactgctgcccactcctctctccagctccacatgctgtacctggatcattctgaagcaaattccgagcattacatcattttgtccataaatatttctaacatccttaaatatacaatcggaattcaagcatctcccattgtcccacaaatgtttggctgtttttgtagttggattgtttgtattaggattcaagcaaggcccatatattgcatttatttgaaatgtctgtaagtctctttccatctacagagtttagcacatttgaacgttgctggttgaaatcccgaggtgtcatttgacatggttctctgaacttatctttcctataaaatggtagttagatctggaggtctgattttgtggcaaaaatacttcctaggtggtgctgggtacttcttgttgcatcctgtcaggaggcagataatgctggtgcctctctattggtaatgttaagactgctgggtgggtttggagttcttggctttaatcattcattacaaagttcagcatttta

SEQ ID NO: 197 - DNA, 784 bp, human
ggctgagtcgcgcgctctgctccacccgacggggctgtgtgtgctgggcctggctcgcggcgaaccgagatggcagagcagtcggacgaggccgtgaagtactacaccctagaggagattcagaagcacaaccacagcaagagcacctggctgatcctgcaccacaaggtgtacgatttgaccaaatttctggaagagcatcctggtggggaagaagttttaagggaacaagctggaggtgacgctactgagaactttgaggatgtcgggcactctacagatgccagggaaatgtccaaaacattcatcattggggagctccatccagatgacagaccaaagttaaacaagcctccggaaactcttatcactactattgattctagttccagttggtggaccaactgggtgatccctgccatctctgcagtggccgtcgccttgatgtatcgcctatacatggcagaggactgaacacctcctcagaagtcagcgcaggaagagcctgctttggacacgggagaaaagaagccattgctaactacttcaactgacagaaaccttcacttgaaaacaatgattttaatatatctctttctttttcttccgacattagaaacaaaacaaaaagaactgtcctttctgcgctcaaatttttcgagtgtgcctttttattcatctactttattttgatgtttccttaatgtgtaatttacttattataagcatgatcttttaaaaatatatttggcttttaaagtaaaaaaaaaaaaaaaaaaaaaaa

SEQ ID NO: 198 - DNA, 1273 bp, human
caagatggcggcagctgcggcttcgcttcgcggggtagtgttgggcccgcggggcgcggggctcccgggcgcgcgtgcccggggtctgctgtgcagcgcgcggcccgggcagctcccgctacggacacctcaggcagtggccttgtcgtcgaagtctggcctttcccgaggccggaaagtgatgctgtcagcgctgggcatgctggcggcagggggtgcggggctggccgtggctctgcattcggctgtgagtgccagtgacctggagctgcacccccccagctatccgtggtctcaccgtggcctcctctcttccttggaccacaccagcatccggaggggtttccaggtatataagcaggtgtgcgcctcctgccacagcatggacttcgtggcctaccgccacctggtgggcgtgtgctacacggaggatgaagctaaggagctggctgcggaggtggaggttcaagacggccccaatgaagatggggagatgttcatgcggccagggaagctgttcgactatttcccaaaaccataccccaacagtgaggctgctcgagctgccaacaacggagcattgccccctgacctcagctacatcgtgcgagctaggcatggtggtgaggactacgtcttctccctgctcacgggctactgcgagccacccaccggggtgtcactgcgggaaggtctctacttcaacccctactttcctggccaggccattgccatggcccctcccatctacacagatgtcttagagtttgacgatggcaccccagctaccatgtcccagatagccaaggatgtgtgcaccttcctgcgctgggcatctgagccagagcacgaccatcgaaaacgcatggggctcaagatgttgatgatgatggctctgctggtgcccctggtctacaccataaagcggcacaagtggtcagtcctgaagagtcggaagctggcatatcggccgcccaagtgaccctgtccagtgtctgcttgccatcctgccagaacaggccctcaagcccaagagccatcccaggcctgttcaggcctcagctaagcctctcttcatctggaagaagaggcaagggggcaggagaccaggctctagctctgggccctccttcagcccccatcatgggaataaattaattttctcaatgtaaaaaaaaaaaaaaaaaaaaaaaaaaaaaaaaaaaaaaaaaaaaaaaaaaaaaaaaaaaaaaaaaaaaaaaaaaaaaaaaaaaaaaaaaaaaaaaaaaaaaaa

SEQ ID NO: 199 - DNA, 5371 bp, human
gggggcgggcccaggtagcaggtttggctgcgcgggggccgcgcgtcggagtttccccctttctagggtgaggatggttctacacagccacccggagttccttagttgaaaggtgcgccctgctgtgacagaatgtggtaattgtaatctttaacattttcatgtaaaacatatttcctgatcatctttccattgtcttcatggaaaattgataaatatttgtgccttccaactctcgtcttggttgaatgacttcatcttaatacaacatggacaccacgttgctgaaaacatgctttgggactgccactgaatttatcttttgcggttttatgacaaagttattagtagtttcccttttttgaattagtattttgaagttaatatcacaatgagttcaggcttatggagccaagaaaaagtcacttcaccctactgggaagagcggattttttacttgcttcttcaagaatgcagcgttacagacaaacaaacacaaaagctccttaaagtaccgaagggaagtataggacagtatattcaagatcgttctgtggggcattcaaggattccttctgcaaaaggcaagaaaaatcagattggattaaaaattctagagcaacctcatgcagttctctttgttgatgaaaaggatgttgtagagataaatgaaaagttcacagagttacttttggcaattaccaattgtgaggagaggttcagcctgtttaaaaacagaaacagactaagtaaaggcctccaaatagacgtgggctgtcctgtgaaagtacagctgagatctggggaagaaaaatttcctggagttgtacgcttcagaggacccctgttagcagagaggacagtctccggaatattctttggagttgaattgctggaagaaggtcgtggtcaaggtttcactgacggggtgtaccaagggaaacagctttttcagtgtgatgaagattgtggcgtgtttgttgcattggacaagctagaactcatagaagatgatgacactgcattggaaagtgattacgcaggtcctggggacacaatgcaggtcgaacttcctcctttggaaataaactccagagtttctttgaaggttggagaaacaatagaatctggaacagttatattctgtgatgttttgccaggaaaagaaagcttaggatattttgttggtgtggacatggataaccctattggcaactgggatggaagatttgatggagtgcagctttgtagttttgcgtgtgttgaaagtacaattctattgcacatcaatgatatcatcccagctttatcagagagtgtgacgcaggaaaggaggcctcccaaacttgcctttatgtcaagaggtgttggggacaaaggttcatccagtcataataaaccaaaggctacaggatctacctcagaccctggaaatagaaacagatctgaattattttataccttaaatgggtcttctgttgactcacaaccacaatccaaatcaaaaaatacatggtacattgatgaagttgcagaagaccctgcaaaatctcttacagagatatctacagactttgaccgttcttcaccaccactccagcctcctcctgtgaactcactgaccaccgagaacagattccactctttaccattcagtctcaccaagatgcccaataccaatggaagtattggccacagtccactttctctgtcagcccagtctgtaatggaagagctaaacactgcacccgtccaagagagtccacccttggccatgcctcctgggaactcacatggtctagaagtgggctcattggctgaagttaaggagaaccctcctttctatggggtaatccgttggatcggtcagccaccaggactgaatgaagtgctcgctggactggaactggaagatgagtgtgcaggctgtacggatggaaccttcagaggcactcggtatttcacctgtgccctgaagaaggcgctgtttgtgaaactgaagagctgcaggcctgactctaggtttgcatcattgcagccggtttccaatcagattgagcgctgtaactctttagcatttggaggctacttaagtgaagtagtagaagaaaatactccaccaaaaatggaaaaagaaggcttggagataatgattgggaagaagaaaggcatccagggtcattacaattcttgttacttagactcaaccttattctgcttatttgcttttagttctgttctggacactgtgttacttagacccaaagaaaagaacgatgtagaatattatagtgaaacccaagagctactgaggacagaaattgttaatcctctgagaatatatggatatgtgtgtgccacaaaaattatgaaactgaggaaaatacttgaaaaggtggaggctgcatcaggatttacctctgaagaaaaagatcctgaggaattcttgaatattctgtttcatcatattttaagggtagaacctttgctaaaaataagatcagcaggtcaaaaggtacaagattgttacttctatcaaatttttatggaaaaaaatgagaaagttggcgttcccacaattcagcagttgttagaatggtcttttatcaacagtaacctgaaatttgcagaggcaccatcatgtctgattattcagatgcctcgatttggaaaagactttaaactatttaaaaaaatttttccttctctggaattaaatataacagatttacttgaagacactcccagacagtgccggatatgtggagggcttgcaatgtatgagtgtagagaatgctacgacgatccggacatctcagctggaaaaatcaagcagttttgtaaaacctgcaacactcaagtccaccttcatccgaagaggctgaatcataaatataacccagtgtcacttcccaaagacttacccgactgggactggagacacggctgcatcccttgccagaatatggagttatttgctgttctctgcatagaaacaagccactatgttgcttttgtgaagtatgggaaggacgattctgcctggctcttctttgacagcatggccgatcgggatggtggtcagaatggcttcaacattcctcaagtcaccccatgcccagaagtaggagagtacttgaagatgtctctggaagacctgcattccttggactccaggagaatccaaggctgtgcacgaagactgctttgtgatgcatatatgtgcatgtaccagagtccaacaatgagtttgtacaaataactggggtcatcgggaaaggcaaagaaactgaaggcagagtcctaacgttgcatcttattcgagctggcagttctgttcacgtccattgccggcaatggatgtctttgtggtgatgatccttcagaaaaggatgcctctgtttaaaaacaaattgcttttgtgtccctgaagtatttaataagaagcattttgcactctagaaagtatgtttgtgttggttttttaagaagtctaaatgaagttattaatacctgaagctttaagttaagtgcattgatcatatgatatttttggaagcatacaattttaattgtggaagtttaaagcctcttttagtccattgagaatgtaaataaatgtgtcttctttatggaccaaggatatgaaatcatttttcttttgtagctaacggttgccttgaggaagaaataatttggttttattaagagtctactctcaatccagttattagagatgtactgagtttgatttgttaatcctttctatatactgctgatcttgcatgtctacaatctgctcagtttttctgtgtttctgcaatagtggtcagaaaaatacttaaattcccttaatggtgttgttttctatttgttctggttttgagataaatgagtgattctgtccccaaatgtccatttttgaagtgattttcctggaggattagggtatttagcagttgaagctcttcattcatagtagttactgtcagctaacaggttttttaaggcttttaactattaatattttatggaatggggcaaagtaaattgatgaaagaattggagtgataatagtcctttacaaacatacagtccataagaaaatgaatttggcatatagaattattacaatttcctgggagagatggatatttaaacctctattattttagacaagactgtctagaacttaagtttgatctgtcagccagtactcccattaaattcagtgtagtttcacttgatagaatcagatatgttatcgaaatgttagcagcagcttcatcctccttctgattaaagtaagtagaaatgggatgttttgtttaataacagccatagtgtgtgtttagaccacagcggatgttgtagaccaggaccatagatgatacatgtcagtgctgtggaatgtgcattctctgagtgttgttttgtggtatcattgtctttcctgaatgactttctaactgtgcagaaaggcagaaaagtcatcatatgtatatgtcatatgactttataaaatatttaatgtgacaaaaagtggaaagaatctttacaaaccctgcaattacttttttaaaggcacttttactctttggttttatcattccattttgctaatatttactagctttataaattacagtaaggtacaaaaactcatcttgtaatattttcatttttgaagtgaaaaagtacatatattttgcacaaggttttatactgctaagtgcttggttggggtggtgagatgatgattagatcaggggtgaggctgagagactctgggtttagggctagccctgcctccatctcccttgggtaaaatgaagggtgtggggtaaaagatgcataaggccttttctagctctgacagcctagaagtccaatcaccctgtaataaatatgtgttgaatgaagaaatgggtgaatgagcttgtcaatgtgattttaaaaaattgactacctggaggaatgattaggaatctaaatgaagccagccctcggtatctgcaggtttctcatccatggattcaaccaactgcaaatggaaaatacgattttttttaaaaaaaggatggttacatccgtattgaacatgtacagacttttttcttgtcattattctctgaacaatacaagaactctttatgtagcatttacatttattaggtattataagtaatctagagattatttaattaaaatatacaggaggatgtgtgtttatatgccagaaattctgtaccattttgtatcagggaattgagcatcttcagatgttggtatctgcagggatcctggaaccaaacccctgcagatactaagggctgacgatctaggtaagactggatttaacagttggaaa

SEQ ID NO: 200 - DNA, 4653 bp, human
gtaccgggccgtggagcggcggctcctgtacccccggcgcggacctaaaggggctcgggccgctcgggccgggaatggcggcggcggccgagcccggggcccgcgcctggctgggcggcggctccccgcgccccggcagcccggcctgcagccccgtgctgggctcaggaggccgcgcgcgcccggggccggggccggggccgggacccgagcgggcgggcgtcagagccccgggccccgctgccgcgccgggacacagcttccggaaggtgacgctcaccaagcccaccttctgccacctctgctccgacttcatctgggggctggccggcttcctgtgcgacgtctgcaatttcatgtctcatgagaagtgcctgaagcacgtgaggatcccgtgcacgagtgtggcacccagcctggtccgggttcctgtagcccactgcttcggcccccgggggctccacaagcgcaagttctgtgctgtctgccgcaaggtcctggaggcaccggcgctccactgcgaagtgtgtgagctgcacctccacccagactgtgtgcccttcgcctgcagtgactgccgccagtgccaccaggatgggcaccaggatcacgacacccatcaccaccactggcgggaggggaacctgccctcgggagcgcgctgcgaggtctgcaggaagacgtgcggctcctctgacgtgctggccggcgtgcgctgcgagtggtgcggggtccaggcgcactccctctgctccgcggcgctggctcccgagtgtggcttcgggcgtctgcgctccctggtcctgcctcccgcgtgcgtgcgccttctgcccggcggcttcagcaagacgcagagcttccgcatcgtggaggccgcggagccgggcgaggggggcgacggcgccgacgggagcgctgccgtgggtccaggcagagagacacaggcaactccggagtccgggaagcaaacgctgaagatctttgatggcgacgacgcggtgagaagaagccagttccgcctcgtcacggtgtcccgcctggccggtgccgaggaggtgctggaggccgcactgcgggcccaccacatccccgaggaccctggccacctggagctgtgccggctgcccccttcctctcaggcctgtgacgcctgggctgggggcaaggctgggagtgctgtgatctcggaggagggcagaagccccgggtccggcgaggccacgccagaggcctgggtcatccgggctctgccgcgggcccaggaggtcctgaagatctaccctggctggctcaaggtgggcgtggcctacgtgtccgtgcgagtgaccccgaagagcacggcccgctctgtggtgctggaggtcctgccgctgctcggccgccaggccgagagtcccgagagcttccagctggtggaggtggcgatgggctgcaggcacgtccagcggacgatgctgatggacgaacagcccctgctggaccggctacaggacatccggcagatgtctgtgcggcaggtgagccagacgcggttctacgtggcagagagcagggatgtagccccgcacgtctccctgtttgttggcggcctgcctcccggcctgtctcccgaggagtacagcagcctgctgcatgaggccggggctaccaaagccaccgtggtgtccgtgagtcacatctactcctcccaaggcgcggtagtgttggacgttgcctgctttgcggaggccgagcggctgtacatgctgctgaaggacatggctgtgcggggccggctgctcactgccctggtgctccccgacctgctgcacgcgaagctgcccccagacagctgtcccctccttgtgttcgtgaaccccaagagtggaggcctcaagggccgagacctgctctgcagcttccggaagctactgaaccctcatcaggtcttcgacctgaccaacggaggtcctcttcccgggctccacctgttctcccaggtgccctgcttccgggtgctggtgtgtggtggcgatggcactgtgggctgggtgcttggcgccctggaggagacacggtaccgactggcctgcccggagccttctgtggccatcctgcccctgggcacagggaatgaccttggtcgagtcctccgctggggggcgggctacagcggcgaggacccgttctccgtactgctgtctgtggacgaggccgacgccgtgctcatggaccgctggaccatcctgctggatgcccacgaggctggcagtgcagagaacgacacggcagacgcagagccccccaagatcgtgcagatgagtaactactgtggcattggcatcgacgcggagctgagcctggacttccaccaggcacgggaagaggagcctggcaagttcacaagcaggctgcacaacaagggtgtgtacgtgcgggtggggctgcagaagatcagtcactctcggagcctgcacaagcagatccggctgcaggtggagcggcaggaggtggagctgcccagtattgaaggcctcatcttcatcaacatccccagctggggctcgggggccgacctgtggggctccgacagcgacaccaggtttgagaagccacgcatggacgacgggctgctggaggttgtgggcgtgacgggcgtcgtgcacatgggccaggtccagggtgggctgcgctccggaatccggattgcccagggttcctacttccgagtcacgctcctcaaggccaccccggtgcaggtggacggggagccctgggtccaggccccggggcacatgatcatctcagctgctggccctaaggtgcacatgctgaggaaggccaagcagaagccgaggagggccgggaccaccagggatgcccgggcggatgctgcgcctgcccctgagagcgatcctaggtaggggtggctggggcagcccaagggctcgagccatctctgctcccgccagccttgttttcaggtggtctggaggcagctccacgtccacacagtggccggccctgtggtcggacctggctacagccctgaccacagcatcttcccagtgacggagcgggacccgccctcatcccattggtgacacatgttggtgtcacagccctcatcccactggagactggtgtgcgggtggcagtgttaccccgtgtcccgggtgggcgcagggctctggatggtgagccctctgccctgtgggggcctggtcctctcctcaggggtgggcacccatccctctacccactgagccccttgagctggacagtgctggatgcaggccgtccaggtgggtctgatctcactttgtgcccctcgggccgtccccctggccagtccttcagagcagcaggctccctggtgtgtccctgccccagcagacacaggctgccagtccctccagcctcacctccccgccctgggcagcaggtgtgggcagcgtgtgaggctgccgggtggtggtgactggtgacttccttgtgttcagggaagggagaaggtgccttcccttgttttctggccttgttatatacagatggcagcttggatctcaggtacagctccaggggcaggcagtgcccagctggacctggtggccctttcctagtgcctctgcttggggaggagaacctctgtccacgtggaggctaggaggtctcaggtgctgccctggcagcaccagagtgtgggccgggcccgagtgtctgcccctcggccctcagggtggggcacttagcacccagaagggaccaaaagcagggcatggcggtgcagaggagtttgggaggtgtaaacagcccatgcacgtggaggaggagctggctttcagccccagaccccacgctagcactttccacgctgcttgcccgctgttgatgtgcagttcccagtgcctgtgtgagccgacatctgctcagtcctatccctcgtcagcgtgtggagacccagctcctgcagccctcctgctcccacgcccccagacagcttggtggagggtcctgcatctgggccaggctggggtgcacccagccaaagacaaagctgcctccacgtgcccaaggattcagatggtgcactggccccgggaggagtctgaccaaaaatggagcccgctctgtggggaagccccgactcccccacgagaaacggtcccacggtgcggatctcccccttcccttgtggggcacagctggcctgggcctccaatcctgcggagctttcctgggtgtggctttgacctcagaagtggctctggtttggcctcaggagtgtggcctggcccagcctgctgcagcctcctggggggcccttgatgccactaatcccccgaccccccgcatctgccaaactgcacagacacacgcattgtaaggccgcttgtggcctccagcgtgcactcttgtttacgtcattgtcatcttcaagaccagtcctttgtgattagttttgcttcgcgagccctggtgtggactgtggtctgtatgaatcgtgtgtaactgtggtgaggggcttgtcctgtatgtgagtctgtacccaggtggggtctgtgccctgcacaccgggcccctctgtatttatcgctgcctgaatgcaacagtaatttatatccaggacaaatacagtctgggcgtcactatcctaaaaaaaaaaaaaaaaaa

SEQ ID NO: 201 - DNA, 2322 bp, human
atctcgagatagccgcagctctcgcgatctttctggagccgcacctccacgcggagtccgagcgcgtgtgctgagaccccagggtcgggagggcggagactgggagggagggagaagcccctttggcctgccttacggaagcctgcgagggagggtggtgtccactgcccagttccgtgtcccgatgcccagcgccagcgccagccgcaagagtcaggagaagccgcgggagatcatggacgcggcggaagattatgctaaagagagatatggaatatcttcaatgatacaatcacaagaaaaaccagatcgagttttggttcgggttagagacttgacaatacaaaaagctgatgaagttgtttgggtacgtgcaagagttcatacaagcagagctaaagggaaacagtgcttcttagtcctacgtcagcagcagtttaatgtccaggctcttgtggcggtgggagaccatgcaagcaagcagatggttaaatttgctgccaacatcaacaaagagagcattgtggatgtagaaggtgttgtgagaaaagtgaatcagaaaattggaagctgtacacagcaagacgttgagttacatgttcagaagatttatgtgatcagtttggctgaaccccgtctgcccctgcagctggatgatgctgttcggcctgaggcagaaggagaagaggaaggaagagctactgttaaccaggatacaagattagacaacagagtcattgatcttaggacatcaactagtcaggcagtcttccgtctccagtctggcatctgccatctcttccgagaaactttaattaacaaaggttttgtggaaatccaaactcctaaaattatttcagctgccagtgaaggaggagccaatgtttttactgtgtcatattttaaaaataatgcatacctggctcagtccccacagctatataagcaaatgtgcatttgtgctgattttgagaaggttttctctattggaccagtattcagagcggaagactctaatacccatagacatctaactgagtttgttggtttggacattgaaatggcttttaattaccattaccacgaagttatggaagaaattgctgacaccatggtacaaatattcaaaggacttcaagaaaggtttcagactgaaattcaaacagtgaataaacagttcccatgtgagccattcaaatttttggagccaactctaagactagaatattgtgaagcattggctatgcttagggaagctggagtcgaaatgggagatgaagacgatctgagcacaccaaatgaaaagctgttgggtcatttggtaaaggaaaagtatgatacagatttttatattcttgataaatatccattggctgtaagacctttctataccatgcctgacccaagaaatcccaaacagtccaactcttacgatatgttcatgagaggagaagaaatattgtcaggagctcaaagaatacatgatcctcaactgctaacagagagagctttacatcatggaattgatttggagaaaattaaggcttacattgattccttccgctttggagcccctcctcatgctggtggaggcattggattggaacgagttactatgctgtttctgggattgcataatgttcgtcagacctccatgttccctcgtgatcccaaacgactcactccttaaattcacactttgccacttaactccagtgtggatgacagagcgagaccctgcctcaaaaaaaaaaaaaaaaaaagaaagccacacttattcttttcagtaacctgctagtgcacaggctgtactttaggtacttaaaatatgcactagaataaatttgcaaggccctaaaatatcactgttatttttggagtaattcagtataggttcgtttaaaagagatttttataacttcagacatgcatcagtaggaaataacttgagaaattcatatggttatgttacaaattcatattctgttactacagtaaacgttaagagttttaaacagttaagattgtacaatttttcttcttttctatattacaagggccccagtgttaatgtcttagattttcagtatttgaacttatttttttaaattctgtcattgagataagaataattcaggtagcatctgaaattttaatgaatgtataattggcatatcatggaaaattaaccagaaagtatcagttcttaaaagttatgcctagaaattatgtaaagctaaactactggttagaaagtattcagtgtaatattgtattaatttgttaaattctaaacttgaatttcaataaaattttaaagct

SEQ ID NO: 202 - DNA, 1478 bp, human
cagattttgcaagagccaggctcgcccaccttgtagaaggagcgccttgagtcccctctcaccctcggttgcaaagagccgaccgcttgatctggacaccccctcgcccagattgcatgatctcccgggaccctcttgagttgcacgtttctgcaccgaggacctcaaatccccgtcgctcctaggatttgcagcgttctggatactggagggttgcaggctacactcgcccgcccctgggcagacactcgtccaaaccactggagtgtgctggtgactggcaggccagcccttcgcctctccatgaacccgtgagcctgggggcaggtgccaggcgatggcgcggcctgtgagcgacaggaccccggcccctctgctgctgggcggcccggccgggacaccccctggcgggggagcgctgcttgggttgcggagccttctgcaggggaccagcaagcccaaagagccggccagctgtctcctgaaggaaaaggagcgcaaggcggccctgcctgcagccacaacccctgggccaggcctggagactgcgggcccggcggatgccccggctggggcagtggtgggcggagggtccccgcgggggcgcccggggccggtgcccgccccgggtctgttggcgccactgctgtgggagcgcacgctgccgttcggcgatgtggagtacgtagacctggacgccttcctgctggagcacgggctcccgcccagcccgccgccccccggtggcccgtcgccggagccgtcgcccgcgcggacgcccgcaccctccccagggccgggttcgtgcggctcggcttccccccgctcctctcctgggcacgcccccgcccgggctgccctcgggaccgccagcggccaccgcgcaggcctgacctctcgggacacacccagccctgtggacccagacaccgtggaggtgttgatgacctttgaacccgacccagctgatcttgccctatcaagcattcctggccacgagacctttgaccctcgaagacatcgcttctcagaagaggaacttaagccccagccaatcatgaagaaggcaagaaaaatccaggtgccggaggagcagaaggatgagaaatactggagccggcggtacaagaacaacgaggcagccaagcggtcccgtgacgcccggcggctcaaggagaaccagatatcggtgcgggcggccttcctggagaaggagaacgccctgctgcggcaggaagttgtggccgtgcgccaggagctgtcccactaccgcgccgtgctgtcccgataccaggcccagcacggggccctgtgaggctgccccacatccccacctggcggagctctcctccgccttgctgagacttacgccctgttcccttcctgccctgtggcccacgggccggccagctgggtgccccagggacgtgataatgcagataaatacatttatatttttaagaaaaaaaaaaaaaaaa

SEQ ID NO: 203 - DNA, 4221 bp, human
cagcggcagtggagttcgctgcgcgctgttgggggccacctgtcttttcgcttgtgtccctctttctagtgtcgcgctcgagtcccgacgggccgctccaagcctcgacatgtcgtacaactacgtggtaacggcccagaagcccaccgccgtgaacggctgcgtgaccggacactttacttcggccgaagacttaaacctgttgattgccaaaaacacgagattagagatctatgtggtcaccgccgaggggcttcggcccgtcaaagaggtgggcatgtatgggaagattgcggtcatggagcttttcaggcccaagggggagagcaaggacctgctgtttatcttgacagcgaagtacaatgcctgcatcctggagtataaacagagtggcgagagcattgacatcattacgcgagcccatggcaatgtccaggaccgcattggccgcccctcagagaccggcattattggcatcattgaccctgagtgccggatgattggcctgcgtctctatgatggccttttcaaggttattccactagatcgcgataataaagaactcaaggccttcaacatccgcctggaggagctgcatgtcattgatgtcaagttcctatatggttgccaagcacctactatttgctttgtctaccaggaccctcaggggcggcacgtaaaaacctatgaggtgtctctccgagaaaaggaattcaataagggcccttggaaacaggaaaatgtcgaagctgaagcttccatggtgatcgcagtcccagagccctttgggggggccatcatcattggacaggagtcaatcacctatcacaatggtgacaaatacctggctattgcccctcctatcatcaagcaaagcacgattgtgtgccacaatcgagtggaccctaatggctcaagatacctgctgggagacatggaaggccggctcttcatgctgcttttggagaaggaggaacagatggatggcaccgtcactctcaaggatctccgtgtagaactccttggagagacctctattgctgagtgcttgacataccttgataatggtgttgtgtttgtcgggtctcgcctgggtgactcccagcttgtgaagctcaacgttgacagtaatgaacaaggctcctatgtagtggccatggaaacctttaccaacttaggacccattgtcgatatgtgcgtggtggacctggagaggcaggggcaggggcagctggtcacttgctctggggctttcaaggaaggttctttgcggatcatccggaatggaattggaatccacgagcatgccagcattgacttaccaggcatcaaaggattatggccactgcggtctgaccctaatcgtgagacttatgacactttggtgctctcttttgtgggccagacaagagttctcatgttaaatggagaggaggtagaagaaaccgaactgatgggtttcgtggatgatcagcagactttcttctgtggcaacgtggctcatcagcagcttatccagatcacttcagcatcggtgaggttggtctctcaagaacccaaagctctggtcagtgaatggaaggagcctcaggccaagaacatcagtgtggcctcctgcaatagcagccaggtggtggtggctgtaggcagggccctctactatctgcagatccatcctcaggagctccggcagatcagccacacagagatggaacatgaagtggcttgcttggacatcaccccattaggagacagcaatggactgtcccctctttgtgccattggcctctggacggacatctcggctcgtatcttgaagttgccctcttttgaactactgcacaaggagatgctgggtggagagatcattcctcgctccatcctgatgaccacctttgagagtagccattacctcctttgtgccttgggagatggagcgcttttctactttgggctcaacattgagacaggtctgttgagcgaccgtaagaaggtgactttgggcacccagcccaccgtattgaggacttttcgttctctttctaccaccaacgtctttgcttgttctgaccgccccactgtcatctatagcagcaaccacaaattggtcttctcaaatgtcaacctcaaggaagtgaactacatgtgtcccctcaattcagatggctatcctgacagcctggcgctggccaacaatagcaccctcaccattggcaccatcgatgagatccagaagctgcacattcgcacagttcccctctatgagtctccaaggaagatctgctaccaggaagtgtcccagtgtttcggggtcctctccagccgcattgaagtccaagacacgagtgggggcacgacagccttgaggcccagcgctagcacccaggctctgtccagcagtgtaagctccagcaagctgttctccagcagcactgctcctcatgagacctcctttggagaagaggtggaggtgcataacctacttatcattgaccaacacacctttgaagtgcttcatgcccaccagtttctgcagaatgaatatgccctcagtctggtttcctgcaagctgggcaaagaccccaacacttacttcattgtgggcacagcaatggtgtatcctgaagaggcagagcccaagcagggtcgcattgtggtctttcagtattcggatggaaaactacagactgtggctgaaaaggaagtgaaaggggccgtgtactctatggtggaatttaacgggaagctgttagccagcatcaatagcacggtgcggctctatgagtggacaacagagaaggacgtgcgcactgagtgcaaccactacaacaacatcatggccctctacctgaagaccaagggcgacttcatcctggtgggcgaccttatgcgctcagtgctgctgcttgcctacaagcccatggaaggaaactttgaagagattgctcgagactttaatcccaactggatgagtgctgtggaaatcttggatgatgacaattttctgggggctgaaaatgcctttaacttgtttgtgtgtcaaaaggatagcgctgccaccactgacgaggagcggcagcacctccaggaggttggtcttttccacctgggcgagtttgtcaatgtcttttgccacggctctctggtaatgcagaatctgggtgagacttccacccccacacaaggctcggtgctcttcggcacggtcaacggcatgatagggctggtgacctcactgtcagagagctggtacaacctcctgctggacatgcagaatcgactcaataaagtcatcaaaagtgtggggaagatcgagcactccttctggagatcctttcacaccgagcggaagacagaaccagccacaggtttcatcgacggtgacttgattgagagtttcctggatattagccgccccaagatgcaggaggtggtggcaaacctacagtatgacgatggcagcggtatgaagcgagaggccactgcagacgacctcatcaaggttgtggaggagctaactcggatccattagccaagggcagggggcccctttgctgaccctccccaaaggctttgccctgctgccctccccctcctctccaccatcgtcttcttggccatgggaggcctttccctaagccagctgcccccagagccacagttcccctatgtggaagtggggcgggcttcatagagacttgggaatgagctgaaggtgaaacattttctccctggatttttaccagtctcacatgattccagccatcaccttagaccaccaagccttgattggtgttgccagttgtcctccttccggggaaggattttgcagttctttggctgaaaggaagctgtgcgtgtgtgtgtgtgtatgtgtgtgtgtgtatgtgtatctcacactcatgcattgtcctctttttatttagattggcagtgtagggagttgtgggtagtggggaagagggttaggagggtttcattgtctgtgaagtgagaccttccttttacttttcttctattgcctctgagagcatcaggcctagaggcctgactgccaagccatgggtagcctgggtgtaaaacctggagatggtggatgatccccacgccacagcccttttgtctctgcaaactgccttcttcggaaagaagaaggtgggaggatgtgaattgttagtttctgagttttaccaaataaagtagaatataagaagaaaaaaa

SEQ ID NO: 204 - DNA, 2706 bp, human
ctctgtagctgtgaccctgataccgcgtggtgtgctccgaacacatggtgcccagaacgaaggcggcgtccagaagccctaggtcccagaggtccgctcagcggcaggcgcataaggcggggccggcgcgggcctttccttccatcggaaccgttctcccggggctgagtccctgcccggactccgaacgccgaagaccaggggccggaagcgcgcgccgccactgccacgccgtgtcagtcgggagggagggagcgagcaggcgaagccgcggaggacggggtgaagatggcggccttctccgagatgggtgtaatgcctgagattgcacaagctgtggaagagatggattggctcctcccaactgatatccaggctgaatctatcccattgatcttaggaggaggtgatgtacttatggctgcagaaacaggaagtggcaaaactggtgcttttagtattccagttatccagatagtttatgaaactctgaaagaccaacaggaaggcaaaaaaggaaaaacaacaattaaaactggtgcttcagtgctgaacaaatggcagatgaacccatatgacagaggatctgcttttgcaattgggtcagatggtctttgttgtcaaagcagagaagtaaaggaatggcatgggtgtagagctactaaaggattaatgaaagggaaacactactatgaagtatcctgtcatgaccaagggttatgcagggtcgggtggtctaccatgcaggcctctttggacctaggtactgacaagtttggatttggctttggtggaacaggaaagaaatcccataacaaacaatttgataattatggagaggaattcactatgcatgataccattggatgttacctggatatagataagggacatgtcaagttctccaaaaatggaaaagatcttggtctggcatttgaaataccaccacatatgaaaaaccaagccctctttcctgcctgtgttttgaagaatgctgaactgaaatttaacttcggtgaagaggaatttaagtttccaccaaaagatggctttgttgctctttccaaggcaccggatggttacattgtcaaatcacagcactcaggtaatgcacaggtgacacaaacaaagtttctccccaatgctccgaaagctctcattgttgaaccttcccgggagttagctgaacaaactttgaacaacatcaagcagtttaagaaatacattgataatcctaaattaagggagcttctgataattggaggtgttgcagcccgggatcagctctctgttttggaaaatggagtagatatagttgtaggtactccgggaagactagatgacttggtgtcaactggaaagctgaacttatctcaagttagattcctggtcctggatgaagctgatgggcttctttctcaaggttattctgattttataaataggatgcacaatcagattcctcaggttacctctgatggaaaaagacttcaggtgattgtttgctctgccactttgcattctttcgatgtaaagaaactgtccgagaagataatgcattttcctacatgggttgacttaaaaggagaagactctgttccagatactgtacaccatgttgttgtcccagtaaatcccaaaactgacagactctgggaaaggcttggaaagagccacattagaactgatgatgtacatgcaaaagataacacaagacctggtgctaatagtccagagatgtggtctgaagctattaaaatcctgaaaggggagtatgctgtccgggcaatcaaggaacataagatggatcaagcaattatcttctgtagaaccaaaattgactgtgataacttggagcagtactttatacaacaaggaggaggacctgataaaaaaggacaccagttctcatgtgtttgtcttcatggtgacagaaagcctcatgagagaaagcaaaacttggaaagatttaagaaaggagatgtaagattcttgatttgcacagatgtagctgctagaggaattgatatccacggtgttccttatgttataaatgtcactctgcccgatgaaaagcaaaactacgtacatcgaattggcagagtaggaagagctgaaaggatgggtctggcaatttccctggtggcaacagaaaaagaaaaggtttggtaccatgtatgtagcagccgtggaaaagggtgttataacacaagactcaaggaagatggaggctgtaccatatggtacaacgagatgcagttactatctgagatagaagaacacctgaactgtaccatttctcaggttgagccggatataaaggtaccagtggatgaatttgatgggaaagttacctacggtcagaaaagggctgctggtggtggaagctataaaggccatgtggatattttggcacctactgttcaagagttggctgcccttgaaaaggaggcgcagacatctttcctgcatcttggctaccttcctaaccagctgttcagaaccttctgatttttacatttactgaataagatttgagtaatgaaagtctgtagtcttaaaactctaaaacagttgtactgcttccaagcagcagtatttatagtaacgtaagctattaatgctaactcttgcatgtcaagaaacattagtcttaggaattcttcaaaaaatggcatcccaatgaaaataaatttgatgactata

SEQ ID NO: 205 - DNA, 2325 bp, human
acctcattcatttctaccggtctctagtagtgcagcttcggctggtgtcatcggtgtccttcctccgctgccgcccccgcaaggcttcgccgtcatcgaggccatttccagcgacttgtcgcacgcttttctatatacttcgttccccgccaaccgcaaccattgacgccatgtcgggttattcgagtgaccgagaccgcggccgggaccgagggtttggtgcacctcgatttggaggaagtagggcagggcccttatctggaaagaagtttggaaaccctggggagaaattagttaaaaagaagtggaatcttgatgagctgcctaaatttgagaagaatttttatcaagagcaccctgatttggctaggcgcacagcacaagaggtggaaacatacagaagaagcaaggaaattacagttagaggtcacaactgcccgaagccagttctaaatttttatgaagccaatttccctgcaaatgtcatggatgttattgcaagacagaatttcactgaacccactgctattcaagctcagggatggccagttgctctaagtggattggatatggttggagtggcacagactggatctgggaaaacattgtcttatttgcttcctgccattgtccacatcaatcatcagccattcctagagagaggcgatgggcctatttgtttggtgctggcaccaactcgggaactggcccaacaggtgcagcaagtagctgctgaatattgtagagcatgtcgcttgaagtctacttgtatctacggtggtgctcctaagggaccacaaatacgtgatttggagagaggtgtggaaatctgtattgcaacacctggaagactgattgactttttagagtgtggaaaaaccaatctgagaagaacaacctaccttgtccttgatgaagcagatagaatgcttgatatgggctttgaaccccaaataaggaagattgtggatcaaataagacctgataggcaaactctaatgtggagtgcgacttggccaaaagaagtaagacagcttgctgaagatttcctgaaagactatattcatataaacattggtgcacttgaactgagtgcaaaccacaacattcttcagattgtggatgtgtgtcatgacgtagaaaaggatgaaaaacttattcgtctaatggaagagatcatgagtgagaaggagaataaaaccattgtttttgtggaaaccaaaagaagatgtgatgagcttaccagaaaaatgaggagagatgggtggcctgccatgggtatccatggtgacaagagtcaacaagagcgtgactgggttctaaatgaattcaaacatggaaaagctcctattctgattgctacagatgtggcctccagagggctagatgtggaagatgtgaaatttgtcatcaattatgactaccctaactcctcagaggattatattcatcgaattggaagaactgctcgcagtaccaaaacaggcacagcatacactttctttacacctaataacataaagcaagtgagcgaccttatctctgtgcttcgtgaagctaatcaagcaattaatcccaagttgcttcagttggtcgaagacagaggttcaggtcgttccaggggtagaggaggcatgaaggatgaccgtcgggacagatactctgcgggcaaaaggggtggatttaatacctttagagacagggaaaattatgacagaggttactctagcctgcttaaaagagattttggggcaaaaactcagaatggtgtttacagtgctgcaaattacaccaatgggagctttggaagtaattttgtgtctgctggtatacagaccagttttaggactggtaatccaacagggacttaccagaatggttatgatagcactcagcaatacggaagtaatgttccaaatatgcacaatggtatgaaccaacaggcatatgcatatcctgctactgcagctgcacctatgattggttatccaatgccaacaggatattcccaataagactttagaagtatatgtaaatgtctgtttttcataattgctctttatattgtgtgttatctgacaagatagttatttaagaaacatgggaattgcagaaatgactgcagtgcagcagtaattatggtgcactttttcgctatttaagttggatatttctctacattcctgaaacaatttttaggttttttttgtactagaaaatgcaggcagtgttttcacaaaagtaaatgtacagtgatttgaaatacaataatgaaggcaatgcatggccttccaataaaaaatatttgaagactgaaaaaaaaaa

SEQ ID NO: 206 - DNA, 1921 bp, human
cgcgacggtctcggcggcggcggcggcggcgacagagcgagcgcggcgcgggccaccatgggggcccagctcagcacgttgggccatatggtgctcttcccagtctggttcctgtacagtctgctcatgaagctgttccagcgctccacgccagccatcaccctcgagagcccggacatcaagtacccgctgcggctcatcgaccgggagatcatcagccatgacacccggcgcttccgctttgccctgccgtcaccccagcacatcctgggcctccctgtcggccagcacatctacctctcggctcgaattgatggaaacctggtcgtccggccctatacacccatctccagcgatgatgacaagggcttcgtggacctggtcatcaaggtttacttcaaggacacccatcccaagtttcccgctggagggaagatgtctcagtacctggagagcatgcagattggagacaccattgagttccggggccccagtgggctgctggtctaccagggcaaagggaagttcgccatccgacctgacaaaaagtccaaccctatcatcaggacagtgaagtctgtgggcatgatcgcgggagggacaggcatcaccccgatgctgcaggtgatccgcgccatcatgaaggaccctgatgaccacactgtgtgccacctgctctttgccaaccagaccgagaaggacatcctgctgcgacctgagctggaggaactcaggaacaaacattctgcacgcttcaagctctggtacacgctggacagagcccctgaagcctgggactacggccagggcttcgtgaatgaggagatgatccgggaccaccttccacccccagaggaggagccgctggtgctgatgtgtggccccccacccatgatccagtacgcctgccttcccaacctggaccacgtgggccaccccacggagcgctgcttcgtcttctgagggccgggcaccggtcacacggccaccgcccccgcgcaccccacgccctgttcacgctcacccagtcacctccccacatcgcacactggggccccgggttcagcctggcctgcccgtgccctggtgaatcacctggctgagcagttcccctggagccccttcgggagcagggctgtgtcccagatgggccacggctgagccttcagagtacgtcctgcctggcacttactggtccttaccagagacgcccagccccatccctgtcctcatgacccctcgtccaccccccacacacactataaggctgagggctgccagcagccccgtctgcccaccattcccggccgtggaccatagtcgggatgtcagcagacacacatggcaggcccaaagctgcaggtcccagggcccaccccagccacgcctgtcacccccactcccgcctcagggccaggcccaggcctcaccacctgacgctgcatgagacattgacaccagaaagccctcttgggggcactgctccctaccccagggccctggccagccgggagcttggctctcctctggctagagtgggaagagggggctggccatggggccctcccagaacctcagcatttccttccagcccatccaaacactgaggcagccttggggaaccccgagctggggggttggcagcccactgcaccgcctcagggttttggggtcctgggctggggccacatccctgatggcagaactcccacaaccacatgtatttattcctctgtcctaaaccgtcccctccttccctcacccccagcacagggggattctgagcagtgcctcttgtctgagggacatatcagtgacctcgacgttgcctttagactacagttgtgttagcctcttgcgtattggctttttcagagtcatttatgagcagaaaaaaaaaaagtaaaactttgctaatatt

SEQ ID NO: 207 - DNA, 9344 bp, human
gcggggcactttgaagaatcacgtgtgttgaggccctcttaaagagataggcacctacttttccctccaccctaaacaccgccctgagggcggcggcgaccgtggtaattgcaactgctcaggggcagggcttgccccagcgccgagtagtggcaacggcgtggttgcgtcgggggtgcctgggagcctggagtcccgggggcctgaaatcggcagcttcccgggcagacactctctccctcaggaagaggtgccgccgagtcagcgcggggcagtgtgagcgccccgaggtgctttctcagttgaggagaggtggggttacagggcacaggtgacagggccggagaaagatggagcagcccggggcggcggcgtcgggagcgggaggcggcagcgaggaacccggtgggggccggagcaacaagcggagcgcggggaaccgggccgccaatgaagaggaaacgaaaaacaaacccaaattgaacattcaaataaaaactttggcagatgatgtgcgtgaccgaattacaagttttagaaaatctactgtcaaaaaagaaaaacctcttattcaacatcctattgattctcaagtcgcgatgagtgagtttcctgcagctcagccattatatgatgaacgatctttgaatttgtcagaaaaggaagtattggatctctttgaaaaaatgatggaggacatgaaccttaacgaagagaaaaaagctcctttacgaaacaaagactttaccaccaaacgtgagatggttgtccagtatatttctgccactgccaaatctggtgggctgaaaaacagcaaacatgaatgcaccctgtcttcacaagaatatgttcatgaattacgatcgggtatatcagatgagaaacttcttaattgcctagaatccctcagggtttctttaaccagcaatccggtcagctgggttaacaactttggccatgaaggtcttggactcttattggatgagctggaaaagcttctggacaaaaaacagcaagaaaatattgacaagaagaatcagtataaacttattcaatgcctcaaagcatttatgaataataagtttggattacaaaggattctaggagatgaaagaagtcttttactattggcaagagcaattgaccccaaacaacccaacatgatgactgaaatagtaaaaatactttctgctatttgcattgttggagaagagaacattctagataaacttttaggggctataacaacagcagcagaaagaaataacagggaacgattttcaccaattgtggaaggtttagaaaatcaggaagccttgcaattacaggtggcctgcatgcagtttataaatgcccttgtcacttctccttatgagcttgattttcgaatacatttaaggaatgaattcctccgttcaggactaaaaacaatgttaccagatctaaaagaaaaagagaatgatgagcttgatattcagttgaaagtatttgatgaaaacaaagaagatgacctaactgaattatcacaccgtctcaatgacattcgagcagaaatggatgatatgaatgaagtctaccatcttctatataatatgctgaaggacactgctgctgaaaattacttcttatctattctacaacattttttgcttatcagaaatgattattatatcaggccacaatattataaaataattgaggaatgtgtttcacagatagtgctacactgcagtggtatggatccagacttcaaatacaggcaaagattagacatcgatttaactcatctgatagattcttgtgtgaacaaggcgaaagttgaagaaagtgaacaaaaagctgcagagttttcaaagaagttcgatgaagaattcacagctcgacaggaagctcaagcagagcttcaaaaaagagatgagaaaatcaaagaacttgaagcagaaatccagcaacttcgaacccaggcacaagtactctcaagttcatcaggaattccaggtcctcctgcagcacctccattgccaggtgtagggccgcctccaccaccacccgcgccacctctacccggaggagctcctcttcctcctccaccacctcctttacctggaatgatggggataccaccaccacccccaccaccacttttatttgggggacctcctccaccaccaccccttggaggagttcctcctcccccaggaatatcacttaatctaccttatggaatgaagcagaaaaaaatgtataaacctgaagtgtccatgaagagaatcaattggtcaaagattgaacccacagaattatctgagaactgtttctggttaagagtcaaagaagacaagtttgagaatccagatctctttgccaaattggcattgaattttgctactcagataaaagttcaaaagaacgcagaagcattagaagaaaagaagactgggcctacaaagaagaaagtgaaagaactgagaattttggatcccaaaacagctcagaatctgtccatctttctgggatcatatcgcatgccatatgaagacataagaaacgttattctggaggttaatgaagacatgctgagtgaggctttaattcagaaccttgtgaaacatcttcctgagcagaagatactcaacgaattagcagagcttaagaatgaatatgatgacctctgtgagcctgaacaatttggagttgtgatgagctctgtgaaaatgttacagcctcgtctcagtagtatcctgttcaagctcacatttgaagaacacataaacaacatcaaaccaagcatcatagcagtaactcttgcctgtgaagaactgaagaaaagtgaaagctttaacagacttttagagttagttcttcttgttggaaactacatgaactcaggctcaagaaatgcccagtctttgggatttaagatcaacttcctttgtaagatcagagatactaaatcagcggatcaaaaaacaacccttttgcattttattgccgacatttgtgaggaaaaatatcgagatatcctaaaatttcctgaagaactggaacacgtagaaagtgcaagcaaagtttcagctcaaattctcaagagcaaccttgcatcaatggaacaacaaattgttcatctggaacgtgacatcaagaaattcccccaagcagaaaatcaacacgataagtttgtggaaaagatgaccagctttacaaagactgcccgagaacagtatgaaaaactctccaccatgcacaacaacatgatgaagctctatgagaatcttggagaatacttcatttttgactcaaagacagtgagcatagaagagttctttggtgatctcaacaacttccgaactttgtttttggaagcagtgagagaaaacaataagagaagagaaatggaagagaagaccaggagggcaaaacttgcaaaagagaaagctgaacaagaaaagttagaacgccagaagaaaaagaaacaactcattgatataaacaaagagggtgatgagactggtgtgatggataatcttctagaagccctacaatcaggtgcagcattcagagaccgtcgaaagcggattccaaggaatccagataacagacgagtacctttggaaaggtcacgctctcgccacaatggagctatctcatctaagtgattcctgatgccaaagaatatgaaaatatttaagtaaaaacaaaatgatgcattttgagaagaacaaagtgtgcactcagcggctggaaaggaaataagtgcatttctgcaaagatcaagataagctggatgaagtagtgtgcatttgtaatactattgcaagactcctcccacaattattctaatctgaacacagttatcaggattacaaaatgtgttccattttagtgtaaagatgtgtatcatttgtaattgtgtgtgacctgactgtgatgatggaagtgtaagaaattgaagagttctaaggctttcaaaaacactcagtcaaaaatttaaaatcttaaatgtgtaagtcacccccaccaaaaacaaaagagaagaaaaagaatagaaagaattatccagtgtcagcttccaatccctagtacatatataatagaaaagggccaagaaaaatatgcatcttgatttggagagaggctaatattatgcacactgtaagagaagccattttggaaattcacgaaagtactgctccaccccagttgagttatttagaattttatctcaagtgaaagctgatggattcatctgctttggctgaaattaaacttatcattagtctagctagcatttcagcatgatattgcaagcacttctcattgctaaaaataaataaaccaaagtttaaccgaatcagttagggaaagtgatttaaactttatttaaagaggtattttctaattatgcacagatatctactttatacaaatactttatatggctatttttgagaaaaccctcacattttaatgtttatgctagggatgaacctggaaaattctattacgtttatttagatttcaaaggcaaatattgattcctatgctctgtggtttatttcttttttctattgcttctttctcccttgagtcccttgaaggcagggaaatagacttctagaaaacctgagaggaaaaagaattctttttacaggaggcagcagaaaactgtctgaaaggtcaattgttttatctccctttccactctctttccaatttcactttggtggtctgaagaagaaaaagaaattttatgtatgtatgtgtaaatatgtgtatatatttctatctcttgctacaataattccaactaagtgaacttcttctcaattatcatcatacttacttaccttatattaacaaattaagatgatgctgccaaaacaagtctagcagggaaaacaggttctacatttttcttaaataaattagggagtaaaagttatacttaacttgtctgtctattattttaaaatatgcattgaaataatgtggtataacttctctggagtgcaattttaagtctaattcatgcagatgattgattgtgattattgtaagaaatttcttacatgtatatttcttatgttagaaaatactgtttctactcattcaaagcacattgtagatattcagagagaagaacaaatggctggcttggcaaatccccatctgagataaagtaaacaagtgaccagcagcccacagataattcctttatatagatgtataatgattcaaactgctgcctttgcctccagtgcatccttacttaggtattatacttctttaaaaagctctgaagctgctacaatagaaaaatcaaaaagggtaacagtatctgaaatttcacagtcctatccgatctgaaaacacacatacacaaatgcacacacatgcacacacacatttcagggacatagcagtaacactgttttttaacaacaacaaaagtttaggttctaatttatgtaaatacctagtatgtgtatttttgactttacaaagtctttcttttctgaaatcttcgtggtatggcttttttaattcttttgacagcttatcagtctgtaggagaatgatcttgaaatgttaaccctgactaaaatttgggagcatatgccttgctatattatcaagctggtcaaggtagaaatactgatatgtatcatcaccttttccagatacaaacttgccttattttctagtttgtgaacaagaacgaatgaagtactattattgataacttacttatatatttttatttagagcaatcccacatgcttttcacaaacattaaaaaaaaaaacctttcagggtctttcatgaagttccaatagttgagtgagttaaaaggtttgtttcccagatttgtaatggtcctgctctagccatttgcagttttgttttagatgattggaaagtatatcaccaaaaaaagtatatagtgacatttttagtatgaaaccaaattacactaaggtcttttgttggccatattactgccacacatgagaagcaccatttatgcagattttcttcagaatatttttaaaaggtacagaatccttaaaatattaacaactaattgcatccattatctcctttggctgctgtaacaaattaccaccaataatatgatggcttaacacaacagaaacttatttgcttacatttttgaagggcagcaaagccatggctccctccagaggctctagaggagaatctttccttgccacgtccaccttttggtggctattggcattttttggcttatggccacatttctctttctgctgtgtcttcacatcaccctcctctgtatacctaatctgcctctgcctctgtttaataaggatccttatgatgacttttagggactacccagattactccaggataatctcctcacctcatgagtcttaacttaattacatctgcaaggcccccttctccaaataagataaattcatggttttggggattaggatgtggctatgtcttttaggaagccactcttagcccaccagagtctgccctttggcccaaaatttatgtctgtctcatgtgtaaaagacattcatcccatcctaacattaccaaaagtctcaacccattatatcaatcctaagtccaaaatttcattcaaatatcatcggttcaaaagttccaaagcttatcatttagatcatctaaatcaggtatgagtgaaactctgggtatggtctttcctgaggccaaatcctcttcctctgagaaccagtgaaacagaaaagttaatctgctttcaaattacaatggtgggaacaggcataggataacagttacagacatttctgtctcaaaaaggagagaatggaaattggaatggagtctcctgtcccaatcattttcaaaatctagccaggcaaatttctgttctatttcaaggcctggcagtaatcctctttctcagggctccaccctttgggcctgtagctcttctttcttggactatggattgggcctctgcctctgtgcctatgggttgcacttcttcctctgttcccacacttgggcctctgcctctgtacctgcagctctgctctcgggatggtgcttcctttatcttgaagggtggcacatgtttgcagctgagaagttttatcaacgggtttcctacctgtagaattctggcagtctcacaatcttctttcatttttttctgtctctgtcccttttaggcccagttggaagtgtttctgatggtagaacattctcaaaaatcttgtgggtcttctacgtatgtcacattgattcacacattcagaaaagagggtcctcacagatttttcctgaacaaccccatctctattcttggcttctgttgaaacagtcaaataaatccacaagttaatgcctaacctcttcagcactagccaaaggttgtcaagacacacccttgggcttatctacagagcacacttttctaacagtgaatctcctaattttagcatctttttttttttttttacaatcattccagattgtgaattcaggctcagaattacccagtcatcagatactgattccttttgtccacttatatagttattttctctttaaaaaaaaattttttttaatgtattagagatgaggtctcactctgtcacccaggctgcagtgtagtggtgcaaacatagctccctgtaacctcaaactcccaggctcaagggatcctcctgcatcagccttccaagtagctgggtctacaggtgcataccaccatgcctggctaattttttgcatttttttgtagagacttgatcttgctatgttgtccaggctgctctcgaactcctagcctcaagcaatccacccatcttggcctcctaaagtgccggattacaggtgtaagccaccatgcccagcctgttttgtcaatgtatctgttttctgtcttattttactataagcactaagaagaaactaagctatatctctaacactagacttgaaaatttcctcagctaaacatccaagttcatcatttattcaacttttcacactactgtagtagacaatttagatagataaactttttgccactatatgacaaggattccctttcttccattttccaataaaatcttcatttccttctaaaccatcactagaaatgcctttaacattcatactactaccatctggtaaaggcaatctagttttttctatcacatccaccaaaattcttctagtctctacccattatccaattccaaagcctttttcacattttaagacatttgttacagaagtacccaatccgtcccagttccacaatctgcattagattcccatggctgctgtaacaaattaccctctagcccagtggcttaaaacaatagaaatttattatcttgttgttttggaggccaaaagtccaaaattgaggggttggcagggctgaacgtcttctggagactctaagggaaacactcttcccgtgtcttccagtttcttgtggctgccatcattccttggtttgtgactgcatctccctctcctctgtcttcacatcacttcccctctgtatatataatctacctctgcctctctcttataaggacacttgtgacgggacttagggcccatccagattacccatgataattcccttattccaagattcttaattatatctgaaaggaccttttttccaaataaggtactatcacaggttccagggagtaggatattgaatatcttttttggggagggggcaccatgcagctcactacactattcattgcacacaaatgaatttttcactttttaagatgcattcttggtgctcaaaccagatcgaagtttgtctctaaaagctattgtctgcacaggctgctgcatgctctgttgttaaatggatggacaggctattctaaattttggttgatacttttgctactatgggcaattaacttgaaaaaaataatcgatcccaactctgtgctctgatgtacctcttctgccccttttatgacacctttgaccaaatgccttctatggttcacagtgcaggcacaaaactacctctgatacagaagggttctttacaagcttattttacataccgtgaatccctcacctaaagggagaggtgaaagcaaagactgctttgaatgggtattgagggagattgtgtccataccaagccaccctgaagaagtatttcacttgcagtagaactgtggatttgtgctgtcatttcaccttggaataaacacctatctctaagcaggaccaagaatgacttgcaatctatatgtaatggctacttacttattcaataaagttaagatatacgt

SEQ ID NO: 208 - DNA, 2320 bp, human
gcgcagggaggggagaccttggcggacggcggagccccagcggaggtgaaagtattggcggaaaggaaaatacagcggaaaaatgcagagctggagtcgtgtgtactgctccttggccaagagaggccatttcaatcgaatatctcatggcctacagggactttctgcagtgcctctgagaacttacgcagatcagccgattgatgctgatgtaacagttataggttctggtcctggaggatatgttgctgctattaaagctgcccagttaggcttcaagacagtctgcattgagaaaaatgaaacacttggtggaacatgcttgaatgttggttgtattccttctaaggctttattgaacaactctcattattaccatatggcccatggaacagattttgcatctagaggaattgaaatgtccgaagttcgcttgaatttagacaagatgatggagcagaagagtactgcagtaaaagctttaacaggtggaattgcccacttattcaaacagaataaggttgttcatgtcaatggatatggaaagataactggcaaaaatcaagtcactgctacgaaagctgatggcggcactcaggttattgatacaaagaacattcttatagccacgggttcagaagttactccttttcctggaatcacgatagatgaagatacaatagtgtcatctacaggtgctttatctttaaaaaaagttccagaaaagatggttgttattggtgcaggagtaataggtgtagaattgggttcagtttggcaaagacttggtgcagatgtgacagcagttgaatttttaggtcatgtaggtggagttggaattgatatggagatatctaaaaactttcaacgcatccttcaaaaacaggggtttaaatttaaattgaatacaaaggttactggtgctaccaagaagtcagatggaaaaattgatgtttctattgaagctgcttctggtggtaaagctgaagttatcacttgtgatgtactcttggtttgcattggccgacgaccctttactaagaatttgggactagaagagctgggaattgaactagatcctagaggtagaattccagtcaataccagatttcaaactaaaattccaaatatctatgccattggtgatgtagttgctggtccaatgctggctcacaaagcagaggatgaaggcattatctgtgttgaaggaatggctggtggtgctgtgcacattgactacaattgtgtgccatcagtgatttacacacaccctgaagttgcttgggttggcaaatcagaagagcagttgaaagaagagggtattgagtacaaagttgggaaattcccatttgctgctaacagcagagctaagacaaatgctgacacagatggcatggtgaagatccttgggcagaaatcgacagacagagtactgggagcacatattcttggaccaggtgctggagaaatggtaaatgaagctgctcttgctttggaatatggagcatcctgtgaagatatagctagagtctgtcatgcacatccgaccttatcagaagcttttagagaagcaaatcttgctgcgtcatttggcaaatcaatcaacttttgaattagaagattatatatttttttttctgaaatttcctgggagcttttgtagaagtcacattcctgaacaggatattctcacagctccaagaatttctaggactgaattatgaaacttttggaaggtatttaataggtttggacaaaatggaatactcttatatctatattttacataaatttagtattttgtttcagtgcactaatatgtaagacaaaaaggactacttattgtagtcatcctggaatatctccgtcaactcatattttcatgctgttcatgaaagattcaatgcccctgaatttaaatagctcttttctctgatacagaaaagttgaattttacatggctggagctagaatttgatatgtgaacagttgtgtttgaagcacagtgatcaagttatttttaatttggttttcacattggaaacaagtcagtcattcagatatgattcaaatgtctataaaccaaactgatgtaagtaaatggtctctcacttgttttatttaacctctaaattctttcattttaggggtagcatttgtgttgaagaggttttaaagcttccattgttgtctgcaactctgaagggtaattatatagttacccaaattaagagagtctatttacggaactcaaatacgtgggcattcaaatgtattacagtggggaatgaagatactgaaataaacgtcttaaatattc

SEQ ID NO: 209 - DNA, 2828 bp, human
atatccggtgtccgcccgccctcggctcctccgccgtgatgctgtcccgatcccgctgtgtgtctcgggcgttcagccgctcgctctccgccttccagaaggggaactgccctctagggagacgttccctgcctggggtctccttatgccagggaccaggttaccctaacagcaggaaggttgtcattaacaacagtgtcttcagtgttcgctttttcagaactacagctgtatgcaaggatgacttggttacagtcaaaaccccagcgtttgcagaatctgtcacagagggagatgtcaggtgggagaaagctgttggagacacagttgcagaagatgaagtggtttgtgagattgaaactgacaagacatctgtgcaggttccatcaccagcaaatggcgtgattgaagctcttttggtacctgatgggggaaaagtcgaaggaggcactccacttttcacactcaggaaaactggtgctgctcctgctaaggccaagccggctgaagctcctgctgctgcagccccaaaagcagaacctacagcagcggcagttcctccccctgcagcacccatacccactcagatgccaccggtgccctcgccctcacagcctccttctggcaaacctgtgtctgcagtaaaacccactgttgccccaccactagctgagccaggagctggcaaaggtctgcgttcagaacatcgggagaaaatgaacaggatgcggcagcgcattgctcagcgtctgaaggaggcccagaatacatgtgcaatgctgacaacttttaatgagattgacatgagtaacatccaggagatgagggctcggcacaaagaggcttttttgaagaaacataacctcaaactaggcttcatgtcggcatttgtgaaggcctcagcctttgccttgcaggaacagcctgttgtaaatgcagtgattgacgacacaaccaaagaggtggtgtatagggattatattgacatcagtgttgcagtggccaccccacggggtctggtggttccagtcatcaggaatgtggaagctatgaattttgcagatattgaacggaccatcactgaactgggagagaaggcccgaaagaatgaacttgccattgaagatatggatggcggtaccttcaccattagcaatggaggcgtttttggctcgctctttggaacacccattatcaacccccctcagtctgccatcctggggatgcatggcatctttgacaggccagtggctataggaggcaaggtagaggtgcggcccatgatgtacgtggcactgacctatgatcaccggctgattgatggcagagaggctgtgactttcctccgcaaaatcaaggcagcggtagaggatcccagagtcctcctcctggatctttaggaggaacccacacaccctacaagttgatcatgcaggaactgaaaaccagtcttctccctgtcccctcatgggtcccgggttagcctggtgacaggcagacacatgctgttggcctcaagcaaggaagcagagcactgtgtaaccagcagtcacaggtcttttcttggcgttcctgccaggctctccctctctgcacctgtctcatagcctcgaatatcttaattccttaggcttaagagagagagccttaatggatgctcattcatattcctgcctttcttccatcagctctctgcaaagatgattttgcttttccctagtgctggtatactatagagaaacccctggggaccatgtgattaagttcctatcttttgaaagtttgttctgcagagacttctaggaggatgctgtgcctcccaagctcagagcagcctctgtcctggctgtgcacattctcccttgattccacttgtgtggagggattgaacacaggcaaagaggtgctgctttgcttcttcaatggcaccttcattctccgttgtcattgacttcaagatgcctcttctacctcttccaggaagcacaggccaggggatctgggtgtgtgagtgggaggagagggcagaggtcccctgaggtcatgcattgtaatcatcatagaaggagagcccaggcctgccctcacgctctccatcataggctgacaccaagaagactcgtcttggcacaatctcacacagctggggctgtagcaaccctttccaacccctttgctggttgctgggcctcattctagcaccttgttcttagagcagattctagcacatcatggcagtgggaccaagcgtggtcccgaggaagggccagagcctggtagagactagggaagggaggtctcctctagactgactcacattgccttgagcttttcagttaagttgctgtaagcacctgggctgaggaggcagtttttgttccttcctgcgttatagcggggccttgtctcttcctctgcaggacacagatctggaggacgtggactggggtaggaaaccaccctgagggtgttagtacctagtggtgaaacggatgaggtcatttctaaggtgtgttgcccgtggatctgggcacaatcattggaattccttggagccactgggattcatggctttgtatccaactgcatccaggcctgaggctgctgacgtttgacaccagggccagtagagagtgcccttttgtatcttaagccaagaagtgaggcctgggggtgggggaggggggaaggggtgggagccaatactgagtgcctgcagcatctactactctgtcttcactattcagaacttgtaactaaagtatttaaagaaactgattttaaatgcaaattaaagggcagatattctcaaaaaaaaaaaaaaaaaa

SEQ ID NO: 210 - DNA, 2091 bp, human
atgactggagtctttgacagtctagtggctgatatgcactcgacccagatcgccgcctccagcacgtaccaccagcaccagcagcccccgagcggcggcggcgccggcccgggtggcaacagcagcagcagcagcagcctccacaagccccaggagtcgcccacccttccggtgtccaccgccaccgacagcagctactacaccaaccagcagcacccggcgggcggcggcggcggcgggggctcgccctacgcgcacatgggttcctaccagtaccaagccagcggcctcaacaacgtcccttactccgccaagagcagctatgacctgggctacaccgccgcctacacctcctacgctccctatggaaccagttcgtccccagccaacaacgagcctgagaaggaggaccttgagcctgaaattcggatagtgaacgggaagccaaagaaagtccggaaaccccgcaccatctactccagtttccagctggcggctcttcagcggcgtttccaaaagactcagtacttggccttgccggagcgagccgagctggcggcctctctgggcctcacccagactcaggtcaaaatctggttccagaaccgccggtccaagttcaagaagatgtggaaaagtggtgagatcccctcggagcagcaccctggggccagcgcttctccaccttgtgcttcgccgccagtctcagcgccggcctcctgggactttggtgtgccgcagcggatggcgggcggcggtggtccgggcagtggcggcagcggcgccggcagctcgggctccagcccgagcagcgcggcctcggcttttctgggcaactacccctggtaccaccagacctcgggatccgcctcacacctgcaggccacggcgccgctgctgcaccccactcagaccccgcagccgcatcaccaccaccaccatcacggcggcgggggcgccccggtgagcgcggggacgattttctaaccccagggagaactcgccagagactgagagcagagaccacttatcctcattgcttaccccgagccggggttccctcctcccggcccgctgccgccacccacctctcctgcaggctgcgacctgcagtggcccgtctcaggccctgctcactcccggggccaccaaacgggcccctctctcgggggaaccggacagcagcttggcaaaggcctccctaaaaggccgcatttctgacctgagccccgggtctcggctgtttcgagccccgcctcggacttgccttccctcccctccgggtgagcctgtctggcgccttcctcgccccgggctgagagctgggtcccgggagatggaagcctcccaggcgcgcgaggcttcccgggcgctctgaggcttctttctcctcgcccgctcccctgggctcagctcggacgctgcagttattgacctcccggtcccgcctgcccgccctcccccacgtggccccttgacccgggcggccccgccgcttctttccttcctgcagttcccagccctcggagcccccatcccttatcttacccccaccgcgctcccccaggagcgctccctcagctctctcctcatccatcaccagtggagtttttttattttttatttttttaaaagtttaggtgcctttgcggatgacctcattttgacgttgaaaaaatgattttttaatatgtgaacactgcaaaaatgtgtttaaattatcttttttaaaacctattcaggattattagcctggacttggacacagagtttgtaaataaaggtgtctgtgcagattttcccactgatttatttgtataaaaatactcatcttttcagacttttttgtaaacccccagttgtgaaaactgcagtttagcagtgacctcagcaacccctcctttttattttttcctttaaaaacatttcagttaaattaagctactgatttggatttgttttatcgtatcctaaagtctttgttgttgaaatgaaaggtattttggggttatttattatgaaaacaacatgctcttaatgttgattttacaatatgaagagattatttaaataaattattgttttcattgg

SEQ ID NO: 211 - DNA, 1975 bp, human
gtgaaaggcgccaggtgccagtcctggcctctgatgtaacccagcgccccgcagtcccgacacagattcctggatctcagccccatagcagctatgatcccgctgctgctggcagcgctgctgtgcgtccccgccggggccctgacctgctacggggactccgggcagcctgtagactggttcgtggtctacaagctgccagctcttagagggtccggggaggcggcgcagagagggctgcagtacaagtatctggacgagagctccggaggctggcgggacggcagggcactcatcaacagcccggagggggccgtgggccgaagcctgcagccgctgtaccggagcaacaccagccagctcgccttcctgctctacaatgaccaaccgcctcaacccagcaaggctcaggactcttccatgcgtgggcacacgaagggtgtcctgctccttgaccacgatgggggcttctggctggtccacagtgtacctaacttccctccaccggcctcctctgctgcatacagctggcctcatagcgcctgtacctacgggcagaccctgctctgtgtgtcttttcccttcgctcagttctcgaagatgggcaagcagctgacctacacctacccctgggtctataactaccagctggaagggatctttgcccaggaattccccgacttggagaatgtggtcaagggccaccacgttagccaagaaccctggaacagcagcatcacactcacatcccaggccggggctgttttccagagctttgccaagttcagcaaatttggagatgacctgtactccggctggttggcagcagcccttggtaccaacctgcaggtccagttctggcacaaaactgtaggcatcctgccctctaactgctcggatatctggcaggttctgaatgtgaaccagatagctttccctggaccagccggcccaagcttcaacagcacagaggaccactccaaatggtgcgtgtccccaaaagggccctggacctgcgtgggtgacatgaatcggaaccagggagaggagcaacggggtgggggcacactgtgtgcccagctgccagccctctggaaagccttccagccgctggtgaagaactaccagccctgtaatggcatggccaggaagcccagcagagcttataagatctaacccttatggccaggtgcagtggctcacgtatgtaatcccagcactttgggaagccaaggagggaggatcacttgaactcaggaattcgagaccagcctgggctacatagtgagaccacatctctactagaacttaaaaaaagttagccaggcacggtgataaatgcctgtagtcccagccactgaagccagaggatcgattgaaccagggagatcatggtcacagtgaactatgattacgccaacctgggtcacatagcaagactctgtttcaaaaaaaaagggggggcgggggacgggtgggtgcagtggctcacatctgtaaccccagcactttgggaggctgagatgggcagatcacttgaggtcaggagttcgagaccagcctggccaacatggtgaaaccccatatccattaaaaatatttaaaaattagccagacatggtggcacgcgtctgtggtcctagctcctcgggaggctgaggcaggagaatcgcttgaactcgggaggcagaggttgtcatgagctgagctaacaccacggcacttcagcctgggtgacagaatgagactctgtgtcaaaaaaataaaaaataaaaaatctaagggctcaggaaccagtttggacttgattttgaatcccagttcatccccttcctagctgtatgaccttgattgtgtgccttaaccgctctgtgacacagtctacctgtctgcaaaatgggaaacataatacctgccatcaggattgttgaggagtaaataaatggaaattggtgaaaaaaaaaaaaaaaaaaaa

SEQ ID NO: 212 - DNA, 14220 bp, human
gcggccgccttctcatcgctcctggaaggtcccgagcgcgacaccatgtcggagcccgggggcggcggcggcgaggacggctcggccggattggaagtgtcggccgtgcagaatgtggcggacgtgtcggtgctgcagaagcacctgcgcaagctggtgccgctgctgctggaggacggcggcgaggcgccggccgcgctggaggcggcgctggaggagaagagcgccctggagcagatgcgcaagttcctttcggacccgcaggtccacacggtgctggtggagcgctccacgctcaaagaggacgtcggtgatgaaggagaagaagaaaaagaattcatttcctataacatcaacatagacattcattatggggttaaatccaatagcttggcattcattaaacgtactcccgtgattgatgcagataaacccgtgtcttctcagctccgggtccttacactcagtgaagactcgccctacgaaactttgcattctttcattagcaatgcagtggctcctttttttaagtcctacattagagagtctggcaaggcagacagggatggtgataaaatggctccttcagttgaaaagaagattgcagaactcgaaatgggactccttcacttgcagcaaaatattgaaattccggagatcagcctgccgattcatccaatgatcacaaatgttgcaaaacagtgttatgagcgtggagaaaagccaaaagttacagactttggtgataaggttgaagacccaacatttcttaatcagttacaatctggagttaaccgctggatccgagaaattcaaaaagtgaccaaactggatcgagatcctgcatcaggaactgccttacaggaaattagtttttggctaaacttggaacgtgcgttataccgcatccaggagaaacgggagagcccggaagttctcctgactctggatatcttgaaacatggcaagcgcttccatgccaccgtcagttttgacactgacacaggtctaaaacaggctttggaaactgtgaatgactacaatcctctgatgaaagatttccctctgaatgatttgctgtctgccacggagctggacaaaataagacaggcgcttgttgccattttcacacatttgagaaagatccgaaacacaaaatatcctattcagagggcactgcgtttggtggaggcaatttcaagagacttgagttctcaattactcaaagtattgggcactaggaaattgatgcatgttgcttatgaagaatttgaaaaagttatggtagcatgctttgaagtttttcagacttgggatgatgagtatgagaaacttcaggtattgttgagagacatcgtcaaaagaaaaagggaagaaaatctgaagatggtgtggcgtatcaaccctgcccacaggaagctgcaggcccgccttgaccagatgagaaaatttagacgccagcatgaacagctaagagctgttatcgtcagggtcctgaggccacaggtcacggcagttgcacaacagaatcaaggagaggtccctgaaccccaagatatgaaagtggctgaggttctctttgatgctgcagatgcaaatgccattgaggaagtaaaccttgcttatgagaacgtcaaggaagtggatggactggatgtttccaaagagggcacggaagcctgggaggctgctatgaagaggtacgatgagaggatcgacagagtggagacccggatcaccgctcgccttcgggatcagcttggcacagccaagaatgccaacgagatgtttaggattttctccaggtttaatgcactgtttgtcaggcctcacatccgtggggccattcgcgaataccagacccagctgatccagcgcgtgaaagatgacattgagtctcttcacgacaagttcaaggtccagtacccacagagtcaggcttgtaagatgagtcacgttcgtgacttgccccctgtgtcagggtctatcatctgggctaaacagatcgacaggcagctgacggcctacatgaagcgggtggaagatgtccttggcaagggctgggagaatcacgtggaggggcagaagctgaagcaggatggagacagcttccgcatgaagctcaacacgcaggagatctttgatgactgggcaaggaaggtgcagcagcgcaacctcggtgtctcggggcgcattttcaccatcgaaagtactcgggttcggggccgaactggaaatgtgcttaagctgaaagttaactttcttcctgagattatcacactatccaaagaagtccggaacctcaaatggcttggtttccgcgtcccactggcgattgtgaacaaagcccatcaagcaaaccagctttacccgtttgccatctcactgatcgagagcgttcgtacctatgaacggacctgcgagaaggtggaggagcggaacaccatttcccttttggtggctggcttgaaaaaggaagtgcaggccctgatcgcagaaggcattgcgttggtgtgggagtcctacaaacttgacccatatgtacagcgcttagcagagactgtcttcaacttccaagaaaaggtggatgatctgctgatcattgaagaaaaaatagacctagaagtccgttccttggaaacttgtatgtatgaccataagacattctcggaaatcttgaacagagtccagaaagcagtggatgacttaaatctgcactcctattccaatttgcccatctgggtcaacaagcttgacatggagattgaaagaatattgggcgtccgtctgcaagctggcctgagagcttggacgcaggttcttcttggacaagctgaagataaagcagaagttgacatggacacagatgctccacaagttagtcacaagcctggtggagagccaaagatcaaaaatgtcgttcatgagctaagaataaccaatcaggtaatctacttgaatccaccaattgaagagtgcagatacaagctgtatcaggaaatgtttgcctggaagatggttgtactgtctctccccaggatccagagtcagaggtaccaggtgggtgtacattacgaattgactgaggaagagaaattctatcggaatgctttaacacggatgcctgatggccctgttgccctggaagagtcgtattctgctgtcatgggcattgtatctgaagttgaacagtatgtcaaggtttggcttcagtatcagtgtttatgggatatgcaagctgaaaacatctataacagacttggagaagatctcaacaaatggcaggctctcctggtccaaataaggaaggccagaggaacctttgacaatgcagaaaccaagaaagagtttggaccagtagttatagattatggcaaggtacaatctaaggtgaacttgaaatatgactcttggcataaggaggttcttagcaaatttgggcagatgctaggatcaaacatgacggaattccattcccagatctcaaagtcccgccaagagttggagcagcactcagtagacacggccagcacctccgatgcagtgaccttcatcacctatgtgcagtctttgaaacggaagatcaagcagtttgagaagcaagttgagctctaccgcaatggccagcgcttactggaaaagcaaaggttccagttcccaccttcctggctttatattgacaacatcgagggagagtggggagccttcaatgacatcatgcggcgaaaggactctgccattcagcagcaggtggcaaacctgcaaatgaagattgtccaggaggatcgggccgtggaaagccgcaccaccgacctgctgactgactgggagaagaccaagcctgtcacgggcaaccttcgcccagaagaggcacttcaggctctcaccatatatgaggggaagtttggtaggctgaaggacgacagagagaagtgtgcaaaggccaaggaggcgctggaattgacagatactgggcttctcagtggcagtgaagagcgcgtgcaggtggccttagaagaattacaggacctcaaaggcgtttggtcagaactttctaaggtttgggagcaaatcgatcagatgaaggagcaaccctgggtttcagtacagcctcgaaagcttcgacaaaatttggatgccctcctgaaccagctgaaaagcttccctgcccggttgcgacagtatgcgtcctatgagtttgttcagaggcttctgaaaggttacatgaagataaatatgctggtgattgaactgaaatccgaagcacttaaagaccgccattggaaacagctcatgaaaaggcttcacgttaattgggttgtttctgagctaacccttggccaaatctgggatgttgacttgcagaaaaatgaagcgattgtcaaggatgtactgcttgtggcacaaggggagatggctttggaagaatttttgaagcagataagagaagtgtggaatacttatgaactagacttggttaattatcagaacaagtgccgcttgatccgtggctgggatgacctcttcaacaaggtcaaagaacacatcaacagcgtctcggccatgaagctctctccgtattacaaggtttttgaagaggatgctctcagctgggaagataagctgaacaggatcatggctctctttgatgtgtggattgatgtgcagaggcggtgggtctacctggaaggtatcttcacaggcagtgcagatatcaagcacctgctgccagtggaaacccagcggtttcagagcatcagcactgagtttttggctctaatgaaaaaagtgtccaagtctccccttgttatggatgttctgaacatccagggagtacagaggtctctggaaagattggcagacctgctaggaaagatccagaaagcattgggagaatatctggaaagagagcggtcatctttccccaggttctattttgtgggtgatgaagatttgcttgaaatcattggaaacagcaagaatgtcgctaaattacagaaacacttcaagaagatgtttgctggagtttcgagcatcatcctgaacgaggataactctgttgttttgggtatttcatctcgggaaggagaggaggttatgtttaaaactcctgtgtcaattactgaacatcccaaaatcaatgagtggctcacattggtagaaaaggagatgagagtcaccctggccaaactgcttgctgagtctgttacggaagttgagatttttggtaaagcaacttcaattgacccaaatacctacatcacttggattgataaataccaggcccagcttgtggttttgtcagcccagatagcctggtctgagaacgtggagaccgcactgagcagcatgggcggaggtggagatgccgcgcccttgcactctgtgctgagcaatgtggaggtcaccctcaatgtgttagcagactctgtcctcatggagcagcccccactccgaaggcggaagctagaacacttgattacagagttggttcaccagagagatgttacaaggtccttgatcaaaagcaagattgacaacgccaaatcttttgaatggctcagccagatgcgattttactttgaccctaagcaaactgatgtgttacagcagttgtcaattcaaatggcaaatgccaaatttaactatggctttgagtacctgggtgttcaggacaaactggtccagacccccctcactgaccgctgctatttgacaatgacacaagccttggaggccaggctggggggttccccatttggacctgctggaactgggaaaacagagtctgtcaaagctcttggccatcagcttggacggtttgttttagttttcaactgtgatgaaacctttgatttccaggcaatgggccggatctttgtgggcctttgccaggtgggtgcctggggctgctttgacgagttcaaccgcctggaggagcggatgctctcggctgtgtcccagcaggtgcagtgcatacaggaagcactgcgtgaacattccaaccccaactacgacaagacctctgcccccattacttgtgagctgctgaacaaacaagtcaaggtgagcccggacatggccatcttcatcaccatgaaccctggctacgcgggccggtctaaccttcctgacaacttgaagaagctgttccggagcttggccatgaccaagcccgaccggcagttaatcgcccaggtcatgctgtactcacagggtttccgcactgctgaagtgcttgccaacaaaatcgtcccgttttttaaactatgcgatgagcagctctcttcccaaagccattatgacttcggtcttcgggctttgaagagtgtgctggtgagtgcaggcaatgtgaagagagagagaatccagaagataaagagggagaaagaggaacgaggggaagcagttgatgaaggagaaattgctgaaaatctccctgaacaagagattctgatacagagcgtctgtgagacgatggtgccaaagctggtggcagaggacatcccgctgctcttcagcctcctgtcggacgtgttccctggagtccagtatcacaggggtgagatgactgcccttcgagaggagctgaagaaagtgtgtcaggagatgtatttgacatatggagatggagaagaagttggtggaatgtgggttgaaaaggttctccagctctatcagatcacccagatcaatcatggcctgatgatggtggggccctcgggaagtgggaagagcatggcctggcgtgtcctgctgaaggcattggagagactcgagggtgtggaaggtgtggcccatatcatcgaccccaaggccatcagcaaagaccacctctacggaaccctggaccccaacaccagggaatggacagatgggctcttcacacacgtgctgagaaagatcatcgacagcgtgagaggcgagctgcagaagcgccagtggatcgtcttcgatggcgatgtggatccagagtgggttgagaacttgaactcagtgctggatgacaataagctcctaactttgcccaatggagagcgcctcagtcttccacccaatgtgagaataatgtttgaggtacaggacttgaaatacgcgaccttggccacagtgtcgcgctgcggcatggtctggttcagtgaggatgtgctgagcaccgacatgatcttcaacaacttcctggccaggctgcgcagcatcccgctggatgaaggggaggatgaggcacagcggcggcgtaagggcaaagaggatgagggggaggaggccgcttcccccatgctgcagatccaaagagatgcagctacgatcatgcaaccgtacttcacgtccaacggcctggtcaccaaggcgctagagcacgccttccagctggagcacatcatggacctaacacgcctgcgctgcctgggctcgctcttctccatgctgcaccaggcctgccgcaacgtggcgcagtataacgccaaccatcccgacttccccatgcagatcgagcagctggagcgctacattcagcgatatctggtttatgccatactctggtccctgtctggagacagccggctaaaaatgagagcagagctgggtgaatacatcagaagaatcacgaccgtgcctctgcccactgcgcccaacatacccattatcgattatgaggtgtccatcagcggagaatggtctccgtggcaggccaaggtgcctcagattgaagtggagacgcacaaggtggcagcccctgatgtcgtcgtgccaacgctggacacagtccgccacgaagccctcttgtacacttggctggccgaacacaagcccctggtcttgtgtggccctcctgggtctggcaagaccatgacactcttcagcgccctccgggccttgcctgacatggaggtggtgggtctcaacttctccagtgctactactccagagctgcttctgaagacttttgatcactactgcgagtacaggcgcacacctaatggggtggttttggctcctgttcaacttggaaagtggctggtgttgttctgtgatgaaatcaacttgccagatatggataaatatgggacccagagggtcatatccttcatcagacagatggtggagcacggaggcttttaccgtacctcagatcaaacatgggtgaagctggagagaatccagtttgttggggcttgtaatccccccacagaccctggaagaaagcccctctcacacaggttcctgcgccacgtgcctgtcgtgtatgtggattacccgggccccgcctccctcacacagatctacggcaccttcaaccgcgccatgctgaggctcattccatccctgcggacgtatgcagagccgctcactgctgccatggtggagttctacaccatgtctcaggagagattcacccaggatacacaacctcactatatctattcaccccgtgaaatgactaggtgggtgagaggcatctttgaagcgctgagacctctggagaccctgcctgttgaaggcctcattcggatttgggcacatgaagctctgcgtctcttccaagatagactcgtagaggatgaggagaggcgttggactgatgagaacatcgacacggttgctctgaagcacttccctaacatcgacagagagaaggcaatgagccgacccatcttgtacagcaactggctgtcaaaggattacatcccagtagaccaagaagagttaagagattatgtcaaagctaggctgaaggtcttttatgaagaagaacttgatgttccgctggtgctgtttaatgaagtcctagaccacgtgctgaggattgacagaatattccgtcaacctcaaggccacttgcttctgattggtgttagtggagcaggaaaaactaccctgtctcgtttcgtcgcctggatgaacggtttgagtgtgtaccagattaaggtccataggaagtacacaggggaagactttgatgaagatctacggacagtgttgagacgttctggctgtaaaaatgaaaagatagcatttataatggatgaatctaatgtgttagattctggattcctggagcgaatgaatacccttctggccaatggagaggtgcctggtctctttgaaggagacgagtatgccaccttgatgacgcagtgcaaagagggggcacagaaggaaggcctgatgctggactcgcacgaggagctctacaagtggttcactagccaggttatccgcaacctccacgtcgtgttcaccatgaacccgtcctcggagggactcaaggaccgggcagctacatcaccagcacttttcaacaggtgtgtgttgaattggtttggagactggtccaccgaagcactgtatcaggttggcaaagaattcacaagtaagatggatctggagaagccaaattacatcgtgcctgattacatgccagttgtgtatgataagctgccgcagccaccatcccatcgggaagccattgtgaacagctgtgtgtttgttcatcagactcttcaccaggcgaatgctcggctagcaaagcgaggcggcagaacgatggccatcacccctcgccactacctggacttcatcaatcactatgccaacctgttccacgagaagcggagcgagctggaggagcagcagatgcacttgaacgtggggctcaggaagatcaaagagacagtcgaccaggtagaagaactgcgtcgtgacttgaggataaagagccaagagctggaggtgaagaatgcagcagccaatgacaagctgaaaaagatggtgaaagaccagcaggaggctgaaaagaagaaggttatgagccaagaaatccaggaacagctgcataagcagcaggaggtaattgcagacaaacagatgagtgtcaaagaagatcttgataaggtggaacctgccgtcattgaggcccagaatgctgtgaagtcgatcaagaagcagcacctggtggaggtgaggtccatggccaaccctcctgctgctgtgaagctggcgctggagtccatctgcctgctgctgggggaaagcaccacagactggaagcagatccgctccatcatcatgcgggagaacttcatccccaccatcgtcaacttctctgcagaggagatcagtgacgccataagggagaagatgaagaaaaattacatgtccaatccaagttacaattatgaaattgtgaatcgggcttccctggcttgcggccctatggtgaaatgggcaattgcacagcttaactatgcagacatgttaaagagagtggagcccctacgcaatgagctgcagaagctggaagatgacgccaaggacaaccagcagaaggccaacgaggtggagcagatgatccgagacctggaagccagcatcgcccgctacaaggaggaatacgccgtcctgatctcagaggcccaggccatcaaggcagacctggcagctgtcgaggcaaaagtaaaccggagcactgctcttctgaagagcttgtctgctgaacgtgaacgatgggaaaaaacaagtgaaactttcaaaaaccagatgtccaccattgctggggactgtctcttgtcagctgcgttcattgcctacgcgggttactttgaccagcagatgcgtcagaacttgttcactacctggtcccatcacctacagcaagccaacatccagttccgtacagatattgccaggacggaatacctttccaatgctgatgagcgtcttcgctggcaggccagctccttgcctgctgatgacctttgcacagaaaatgccatcatgctgaaacgattcaataggtatccgctgatcattgacccctctggacaggccacagaattcattatgaatgaatataaggatcgtaagatcacacggaccagcttcctggatgacgccttcagaaagaacttagagagtgcactgagattcggtaacccccttctggtccaggatgtggaaagctacgatccagttttgaacccggtgctgaaccgtgaagtgcggcgaacaggggggagagtgctgatcactctcggggaccaggacatagacctgtcgccatcgtttgtcatcttcctgtccacccgggatccaactgtcgagttcccaccagatctctgttcccgggttacttttgtaaacttcacagttacccgtagcagtttacaaagccagtgtctaaatgaagtacttaaagcagaaagacctgatgtggacgagaaacgatctgatcttcttaaacttcaaggggaatttcagctccgtttgcgtcagctggaaaaatctctactacaagctctgaacgaggtgaaagggcgcattttggatgacgacacgatcataaccactctggagaacctgaagagagaggctgcagaggtcaccaggaaagttgaggagacggacattgtcatgcaggaggtggagaccgtgtcccagcagtacctcccgctctccaccgcctgcagcagcatctacttcaccatggagtccctcaagcagatacacttcttgtaccagtactccctccagtttttcctggacatttatcacaacgtcctatacgagaacccgaacctgaagggtgtcaccgaccacacacagcgcctgtccattataacaaaggacctcttccaggtggcgtttaaccgagtggctcgaggcatgctgcatcaggaccacattacctttgccatgctgctggcaagaatcaaactgaagggcaccgtgggggagcccacctacgatgcagaattccagcacttcttgagaggaaatgagattgtcctgagtgctggctccacccccaggatccagggcctgactgtggagcaggcggaggcggtggtgaggctgagctgccttcccgcgtttaaggacttgattgcaaaggttcaggcagacgagcaatttggcatctggctggacagcagctccccggagcagactgtgccctacctctggagtgaagaaacacctgcaacacccattggccaggccatccaccgcctgctcctgatccaggctttccggcccgatcgcctgttggccatggcccacatgtttgtttcaacaaaccttggggagtctttcatgtccatcatggagcagccgctcgacctgacccacattgtgggcacagaggtgaagcccaacactcctgtcttaatgtgctctgtgcctggttatgatgccagtggacatgtcgaggaccttgcagccgagcagaacacgcagatcacttcaattgcaatcggctctgcagaaggctttaaccaagcagataaggcaataaacaccgctgtaaagtcgggcaggtgggtgatgctgaagaatgtgcatctggccccagggtggctgatgcagctggagaagaagttgcattccctgcagccgcatgcctgcttccgactcttcctcaccatggagatcaaccccaaggtgcctgtgaatctgctccgtgcgggccgcatctttgtgttcgagccaccgccaggggtgaaggccaacatgctgaggacgttcagcagcattcccgtctcacggatatgcaagtctcccaacgagcgtgcccgcttgtacttcctgctggcctggtttcatgcgatcatccaagaacgcttacgatacgcaccactggggtggtcaaagaagtatgaatttggagagtctgacctgcggtcagcttgcgatacggtggacacgtggctggatgacacggccaagggcaggcagaacatctcaccggataagatcccgtggtctgcactaaagaccttaatggcccagtccatttatggcgggcgcgtggacaacgagtttgaccagcgtctgctcaacaccttcctggagcgcctgttcacaaccaggagtttcgacagtgagtttaagctggcatgcaaggtcgacggacataaagacattcaaatgccagatggcatcaggcgagaggagtttgtgcagtgggtggagttgctccccgacacccagacgccctcctggctgggcctgcccaacaacgccgagagagtcctccttaccacacagggtgtggacatgatcagtaaaatgctgaagatgcagatgttggaggatgaggacgacctggcctacgcagagactgagaagaagacgaggacagactccacgtccgacgggcgccctgcctggatgcggacactgcacaccaccgcgtccaactggctgcacctcatcccccagacgctgagccacctcaagcgcaccgtggagaatatcaaggatcctttgttcaggttctttgagagagaagtgaagatgggcgcaaagctgcttcaggacgttcgccaggaccttgcagatgtcgtccaggtgtgcgaaggaaagaagaagcagaccaactacttgcgcacgctgatcaacgagctagtgaaagggatcttgcctcggagctggtcccactacacggtgcctgccggcatgaccgtcatccagtgggtgtccgacttcagcgagaggatcaaacagctgcagaacatctcactggcagctgcatctggtggcgccaaggagctaaagaacatccacgtgtgcctgggtggcctgttcgtgcctgaggcgtacatcactgccaccaggcagtatgtggcccaggccaacagctggtccctggaggagctctgcctggaagtcaacgtcaccacctcacagggcgccacccttgacgcttgcagcttcggagtcacgggtttgaaacttcaaggggccacgtgcaacaacaacaagctgtcactgtccaatgccatctcaaccgcccttcccctgacgcagctgcgctgggtcaagcagacaaacaccgagaagaaggccagtgtggtaaccttacctgtctacctgaacttcacccgtgcagacctcatcttcaccgtggacttcgaaattgctacaaaggaggatcctcgcagcttctacgagcggggtgtcgcagtcttgtgcacagagtaaacttttctagctgcccctttctgtaatagtgaaagttggtatttaacatttattcatttttaaaatatttggaaggtctgagcttgtgaaaagaaagtggttggtctgaggttggaggaagctgaatggaatctgacggttgggagtggtggaaattggaaggataccaggaggtatttgggaaggccaatggcgtggctcctttgaggaaataaaacactaagcatgagccgg

SEQ ID NO: 213 - DNA, 2602 bp, human
ctcgatcgtgtcagtttgtaaggcgagggcggaagttggattcctggcctgagaatattaggcgtagttttccagtttttggcaaagcggaaatacttaaggcccctgggttgactgggttctttgttttatctaccggcttctgctttacgacaggtcacaaacatgtcagacaaaagtgaattaaaggctgagttggaacgtaagaagcagcgactggcccaaatcagagaggaaaagaagagaaaagaagaagaaaggaaaaaaaaagaaacagaccagaagaaggaagctgttgctcctgtgcaagaagaatcagatcttgaaaaaaaaaggagagaagctgaagcattgcttcaaagcatggggctaactccagaatcccccattgttttttctgaatactgggtccctcctcctatgtctccatcctccaaatctgtgagcactccaagtgaagctggaagccaagactctggagatggcgccgtgggatctaggacgctgcattgggatacagatccatcagttcttcagcttcactcagattccgatttgggacgaggacctattaaacttggaatggctaaaatcacgcaagtcgactttcctcctcgagaaattgtcacgtatacaaaggaaactcagactccagttatggctcaacccaaagaagatgaagaggaagatgatgatgtagtggctcctaaaccacctattgaacctgaagaagagaaaactttaaagaaagatgaggaaaatgatagtaaagctccccctcatgagctgactgaagaagaaaagcaacaaatcctgcactctgaggaatttttaagtttctttgaccattctacaagaattgtagaaagagctctttctgagcagattaacatcttctttgactatagtgggagagatttggaagacaaagaaggagagattcaagcaggtgctaaactgtcattaaatcgacaattttttgacgaacgttggtcaaagcatcgggtggttagttgtttggattggtcatctcagtatccggagttactcgtggcttcctataacaacaatgaagatgcccctcatgagcctgatggtgtggcccttgtatggaatatgaaatacaaaaaaactaccccagagtatgtgtttcactgccagtcagctgtgatgtctgccacatttgcaaaatttcatccaaatcttgttgttggtggtacatattcaggccaaattgtgctttgggataaccgtagcaataaaagaactccagtgcaaagaactccactgtcagcagctgcacacacacaccctgtatattgtgtaaatgttgttggaacacaaaatgctcacaatctgattagcatctctactgatggaaaaatttgttcatggagtctggacatgctttcccatccacaggatagcatggagttggttcataaacagtcaaaagcagtagctgtgacatctatgtccttccctgttggagatgtcaacaactttgttgttgggagtgaagaaggttctgtgtacacagcatgccgccatggcagcaaagctggaatcagtgagatgtttgaggggcatcaaggaccaatcactggcatccattgtcatgcagctgttggagcagtagacttctcacatctttttgtcacttcatcgtttgactggacagtaaagctttggacaactaagaataacaagcctttgtattcatttgaagataatgcagactatgtttatgatgttatgtggtcacctacccacccagccctgtttgcctgtgtggatggcatggggagattggatttatggaatctcaataatgacacagaggtaccaactgccagcatttctgtggagggtaatcctgctcttaatcgtgtgagatggacccattctggcagagagattgctgtgggtgattctgaaggacagattgttatatacgatgtgggagagcagattgctgttccccgcaatgatgaatgggcacggtttggccgaacacttgcagaaattaatgcaaaccgagctgatgcagaggaggaagcagctacccgaatacctgcttagttcctgaaaaggggagtgtaactagtggatttgggaaaggttcttaagtagatcctgagactatttgcatgcttctgtctaaatgataattaaaaggaaatttcatggattaaaccatgggtttaatgcagcaaggaaacttacaatgtccctttatatataacatgcatcttgttttggatttgtgtcattttttaatatagctgattgacttcacagaaagcagcttttttgaattctaatacataggtgtatatttggtattagttattttgagttcttttcaacttataacactgtatacagttatttctaaagcacagatgaaataagttctgcatatttttaaataatcacagttccctgttatacagataatgttctcactacccataatatgtaggaacattgtttctccttagccgtagtatgcatacacctatccatgttcattctgacatcctttgttgtctttataattcatgtggtagttacctataaataaaaacaaatatgcgtt

SEQ ID NO: 214 - DNA, 3539 bp, human
acggaccggcaggcctagctccggggctgcggcggctgaggcgcggggatggagcccctgcgggtgctggagctatacagcggcgtgggcggcatgcaccacgcgctgagagaaagctgtatacctgcacaagtggtggctgccattgatgtcaacactgtcgctaatgaagtatacaagtataattttcctcacacacagttacttgccaagacgattgaaggcattacactcgaagagtttgacagattatcttttgatatgattttaatgagccctccctgccagccattcacaaggattggccggcagggtgatatgactgattcaaggacgaatagcttcttacatattctagatattctcccaagattacaaaaattaccaaagtatattcttttggaaaatgttaaaggttttgaagtatcttctacaagagacctcttgatacaaacaatagaaaattgtggctttcagtaccaagagtttctattatctccaacctctcttggcattccaaattcaaggctacgatattttcttattgcaaagcttcagtcagagccattaccctttcaagcccctggtcaggtactgatggagttccccaaaattgaatctgtacatccacaaaaatatgcaatggatgtagaaaataaaattcaagaaaagaacgttgaaccaaatattagctttgatggcagcatacagtgttctggaaaagatgccattctttttaagcttgaaactgcagaagaaattcacaggaaaaatcaacaagatagtgatctctctgtgaaaatgctaaaagattttcttgaagatgacactgacgtgaaccagtatcttttaccaccaaagtcattgctgcgatatgctcttctgttagacattgttcagcccacttgtagaaggtccgtgtgctttaccaaaggatatggaagctacatagaagggacagggtctgtgttacagactgcagaggatgtgcaggttgagaatatctacaaatcccttaccaatttgtcacaagaagaacagataacaaagctgttaatacttaaactgcgatatttcactcctaaagaaatagcaaatctccttggatttcctccagagttcggatttcctgagaagataacagtgaaacagcgttatcgcctacttggaaatagtctcaacgtgcatgtagtagctaaactaatcaaaatcttatatgaataattttgaaataactctgaaagatggtcatatgatattccttcattttcagagagtaattctgaaattctgttttgaactaattctggtgaaatttaactaaattattttaatctgtccttattaagaaatttggattttattaaaaaaatccatgtgtttcatcaaatttatattactgtattttataaaatacgaactattgttatgctttatggagagtatattttcatatgaaactgataaatatatatgtggaatattctttttaaaaacaattttataaacaaatcaaggagcactagagctttagtgtctacatgagtatcttgtgaagtgtcataacaggcataacatatttttatgttaattaaagaagttttttatttctaattttaaaataatgattctaattctagcccattgaatgttttacttaatttccaatcctgtaaatatttctttatttcatctaaacaaatgcatatgatatgtaaaccaaattatcatcattcagtttatacagcagactgaagaatatgtcaggaaaaataatcctaaatgtttgattacctctccatgaagcggccacagaaactgttggtgcacattatctacattttcctcagcctctatctgaaggacaaaactcatttttccttcttcattttgtatgtactttcctttagttgactattatcaaagcttgtttttgtcttctcagcttctgagttgaatttgcctttgcacgctgaggaatgtagcatgacgttaagatttcagggaggaagctgccctctgatcccatgtcatatgacagtactcccctccccccagttgttctttattgtagcaacatacactctcaatgaacttttatgacttttaactttctctgtctctcttcctcagcagacctcttggaattagggtttctaatcaaactaagtcttgcatcataaattctatggtttgtgataaaagcaagtgacaaagagaagagagatgaaaagaaacaagtccagaaatcatattacaagattttaattcaaatttttcttcttaaaaatcagctatttagaggtggataaattggaagtttgtgcattgcttgtgggaacgtaaaatggttcagctgctgttggaaaacgctatggaggttcgtcacaaaattcaacatagaattaccctatgattcagcgattccacctctggctatagatccaaaagaattgaaagcagggacttgaacagatatttgtacaccagtgtttataacaccattatttacagtagccaaaaggtagaagcagcccaagtgtcatcccattcacccatgaatggatgcaggaattgtgttccgtgcatgcagtggaatagtaccagccttccgcaggaaggaaattctgacatatgcggtgacatggatgaaccttgagtacattatgcgaagtgaaataagccaccctgtggggatggagaatgggtagttagtgcataatggatacaaagtttctgattggggtgatgagaaagttctggaggtggatggggaggatggttgcacaacagtgtgagtgtacttaatgccactgcaactgtatatttaaaaatagttaaaatgataaattttacattatgtatattttactgcaattgaaaaaatcatactctattaccaatttttcagaactcatagataaatatgaatgtagggaagctgtaagccagcccatatacagaaactatcactatctacatttttcatatgtgttcagacagagcctattacaagtctcataaatttcagtaaacaatcacaaattattttggcacactttcatgtaggttctgttcactgctgaaatattctaaataaaatggtttagagttttactgtaactatgaataattatgctataattatagtatcccacattcggttgagcaacattatacaaaataagtgtcgagttactgtgcaccaactataaatacttgaaaggtctgtagagacatttgcttacaaactggtagacagaatgtagcttagtggaattcttaaattatgggaatgtattcacaggaagacggtgattcttgcccttaattcataattgaaaatatgcagtaacaagcataaaactcacatcttaatgaagatgtatctaccagtgtcattcaattagcagatgtatatgtatgcataattaatttggaaaatgttattttatggaatgtctgctatatgcttttggtaataatgctgtatataaaatttgcactggaaattctgtttcctgataaaaaaaaaaaaa

SEQ ID NO: 215 - DNA, 1738 bp, human
cgggggggtactgtgcgagccctcaaggaggtggctgttctgtagctggagagctccgtgggtggcaggactgaacttgaacaccagaaacaacccccaagccttgtgacctgggaggcaggaggcgggtctgtctccctgggacttgggtggctgagccgaggtactcgggaccctgtcccgcgcatggcagagtggctcctcacagcctgaagctcatccttctgcacgggccagccaggccagcacagaggcaccagggcagcagtgcacacaggtccccggggaccccaccatgtggagcggatggtggctgtggccccttgtggccgtctgcactgcagacttctttcgggacgaggcagagaggatcatgagggactcccctgtcattgatgggcacaatgacctcccctggcagctgctggatatgttcaacaaccggctgcaggacgagagggccaacctgaccaccttggccggcacacacaccaacatccccaagctgagggccggctttgtgggaggccagttctggtccgtgtacacgccctgcgacacccagaacaaagacgccgtgcggaggacgctggagcagatggacgtggtccaccgcatgtgccggatgtacccggagaccttcctgtatgtcaccagcagtgcaggcattcggcaggccttccgggaagggaaggtggccagcctgatcggcgtggagggcggccactccattgacagcagtttgggcgtcctgcgggcactctatcagctgggcatgcggtacctgaccctcacccacagctgcaacacgccctgggctgacaactggctggtggacacgggagacagcgagccccagagccaaggcttgtcaccctttgggcagcgtgtggtgaaggagctgaaccgtctgggggtcctcatcgacttggctcacgtgtctgtggccaccatgaaggccaccctgcagctgtccagagccccggtcatcttcagccactcctcggcctacagcgtgtgcgcaagccggcgcaacgtgcctgacgacgtcctgaggctggtgaaacagacagacagcctggtgatggtgaacttctacaacaattacatttcctgcaccaacaaggccaacctgtcccaagtggccgaccatctggatcacatcaaggaggtggcaggagccagagccgtgggttttggtggggactttgatggtgttccaagggtccctgaggggctggaggacgtctccaagtatccagacctgatcgctgagctgctcaggaggaactggacggaggcggaggtcaagggcgcactggctgacaacctgctgagggtcttcgaggctgtggaacaggccagcaacctcacacaggctcccgaggaggagcccatcccgctggaccagctgggtggctcctgcaggacccattacggctactcctctggggcttccagcctccatcgccactgggggctcctgctggcctccctcgctcccctggtcctctgtctgtctctcctgtgaaacctgggagaccagagtcccctttagggttcccggagctccgggaagacccgcccatcccaggactccagatgccaggagccctgctgcccacatgcaaggaccagcatctcctgagaggacgcctgggcttacctggggggcaggatgcctggggacagttcaggacacacacacagtaggcccgcaataaaagcaacacccctt

SEQ ID NO: 216 - DNA, 3913 bp, human
ctttcactggcaagagacggagtcctgggtttcagttccagttgcctgcggtgggctgtgtgagtttgccaaagtcccctgccctctctgggtctcggttccctcgcctgtccacgtgaggttggaggagctgaacgccgacgtcatttttagctaagagggagcagggtccccgagtcgccggcccagggtctgcgcatccgaggccgcgcgccctttcccctcccccacggctcctccgggccccgcactctgcgccccggctgccgcccagcgccctacaccgccctcagggggccctcgcgggctccccccggccgggatgccagtgccccgcgccacgcgcgcctgctcccgcgccgcctgccctgcagcctgcccgcggcgcctttatacccagcgggctcggcgctcactaatgtttaactcggggccgaaacttgccagcggcgagtgactccaccgcccggagcagcggtgcaggacgcgcgtctccgccgcccgcggtgacttctgcctgcgctccttctctgaacgctcacttccgaggagacgccgacgatgaagacaccgtggaaggttcttctgggactgctgggtgctgctgcgcttgtcaccatcatcaccgtgcccgtggttctgctgaacaaaggcacagatgatgctacagctgacagtcgcaaaacttacactctaactgattacttaaaaaatacttatagactgaagttatactccttaagatggatttcagatcatgaatatctctacaaacaagaaaataatatcttggtattcaatgctgaatatggaaacagctcagttttcttggagaacagtacatttgatgagtttggacattctatcaatgattattcaatatctcctgatgggcagtttattctcttagaatacaactacgtgaagcaatggaggcattcctacacagcttcatatgacatttatgatttaaataaaaggcagctgattacagaagagaggattccaaacaacacacagtgggtcacatggtcaccagtgggtcataaattggcatatgtttggaacaatgacatttatgttaaaattgaaccaaatttaccaagttacagaatcacatggacggggaaagaagatataatatataatggaataactgactgggtttatgaagaggaagtcttcagtgcctactctgctctgtggtggtctccaaacggcacttttttagcatatgcccaatttaacgacacagaagtcccacttattgaatactccttctactctgatgagtcactgcagtacccaaagactgtacgggttccatatccaaaggcaggagctgtgaatccaactgtaaagttctttgttgtaaatacagactctctcagctcagtcaccaatgcaacttccatacaaatcactgctcctgcttctatgttgataggggatcactacttgtgtgatgtgacatgggcaacacaagaaagaatttctttgcagtggctcaggaggattcagaactattcggtcatggatatttgtgactatgatgaatccagtggaagatggaactgcttagtggcacggcaacacattgaaatgagtactactggctgggttggaagatttaggccttcagaacctcattttacccttgatggtaatagcttctacaagatcatcagcaatgaagaaggttacagacacatttgctatttccaaatagataaaaaagactgcacatttattacaaaaggcacctgggaagtcatcgggatagaagctctaaccagtgattatctatactacattagtaatgaatataaaggaatgccaggaggaaggaatctttataaaatccaacttagtgactatacaaaagtgacatgcctcagttgtgagctgaatccggaaaggtgtcagtactattctgtgtcattcagtaaagaggcgaagtattatcagctgagatgttccggtcctggtctgcccctctatactctacacagcagcgtgaatgataaagggctgagagtcctggaagacaattcagctttggataaaatgctgcagaatgtccagatgccctccaaaaaactggacttcattattttgaatgaaacaaaattttggtatcagatgatcttgcctcctcattttgataaatccaagaaatatcctctactattagatgtgtatgcaggcccatgtagtcaaaaagcagacactgtcttcagactgaactgggccacttaccttgcaagcacagaaaacattatagtagctagctttgatggcagaggaagtggttaccaaggagataagatcatgcatgcaatcaacagaagactgggaacatttgaagttgaagatcaaattgaagcagccagacaattttcaaaaatgggatttgtggacaacaaacgaattgcaatttggggctggtcatatggagggtacgtaacctcaatggtcctgggatcgggaagtggcgtgttcaagtgtggaatagccgtggcgcctgtatcccggtgggagtactatgactcagtgtacacagaacgttacatgggtctcccaactccagaagacaaccttgaccattacagaaattcaacagtcatgagcagagctgaaaattttaaacaagttgagtacctccttattcatggaacagcagatgataacgttcactttcagcagtcagctcagatctccaaagccctggtcgatgttggagtggatttccaggcaatgtggtatactgatgaagaccatggaatagctagcagcacagcacaccaacatatatatacccacatgagccacttcataaaacaatgtttctctttaccttagcacctcaaaataccatgccatttaaagcttattaaaactcatttttgttttcattatctcaaaactgcactgtcaagatgatgatgatctttaaaatacacactcaaatcaagaaacttaaggttacctttgttcccaaatttcatacctatcatcttaagtagggacttctgtcttcacaacagattattaccttacagaagtttgaattatccggtcgggttttattgtttaaaatcatttctgcatcagctgctgaaacaacaaataggaattgtttttatggaggctttgcatagattccctgagcaggattttaatctttttctaactggactggttcaaatgttgttctcttctttaaagggatggcaagatgtgggcagtgatgtcactagggcagggacaggataagagggattagggagagaagatagcagggcatggctgggaacccaagtccaagcataccaacacgagcaggctactgtcagctcccctcggagaagagctgttcacagccagactggcacagttttctgagaaagactattcaaacagtctcaggaaatcaaatatgcaaagcactgacttctaagtaaaaccacagcagttgaaaagactccaaagaaatgtaagggaaactgccagcaacgcaggcccccaggtgccagttatggctataggtgctacaaaaacacagcaagggtgatgggaaagcattgtaaatgtgcttttaaaaaaaaatactgatgttcctagtgaaagaggcagcttgaaactgagatgtgaacacatcagcttgccctgttaaaagatgaaaatatttgtatcacaaatcttaacttgaaggagtccttgcatcaatttttcttatttcatttctttgagtgtcttaattaaaagaatattttaacttccttggactcattttaaaaaatggaacataaaatacaatgttatgtattattattcccattctacatactatggaatttctcccagtcatttaataaatgtgccttcattttttcagaaaaaaaaaaaaaaa

SEQ ID NO: 217 - DNA, 2725 bp, human
gcatgccccatcagccttcagcttgagcccggcggcccccgcccccgccccctgccaccctgcactgccccggctcccccgcggcccccacgctgcagtgcggccgggccccctccccgcaggggccgcccccgccgcccacccctagcgcccgtggtggtggtggtggtggtggtggtggtggcccgggccgcagggccatgaaactacaggccgtgatggagacgctgttgcagcggcagcagcgggcgcgccaggagctggaggcccggcagcagctgccccccgatccccctgctgcaccccccggccgggcccgggctgcccccgacgaggacagagagcccgagagtgcccggatgcagcgggctcagatggccgcactggcagccatgcgggctgcagctgcgggcctgggacacccagccagccccggcggctctgaggatgggcccccaggctcggaggaggaggacgcggcccgggaggggacaccgggctcacccgggcgaggcagagaagggccaggagaggagcactttgaggacatggcctccgacgaggacatgaagcccaaatgggaggaggaggagatggaggaagacctcggggaggatgaggaggaggaggaggaggattacgaggatgaggaggaggaggaggacgaggaggggctgggccccccaggccctgccagcttgggcaccacggcactgttcccccgaaaggcccagccaccccaggccttccgcggcgatggcgttcccagggtgctggggggccaggagcggccggggcctggccctgcccaccccggaggggccgcccacgtagccccgcagctgcagccgcctgaccacggcgactggacttacgaggagcagtttaagcagctctacgaactcgacggggaccccaagaggaaggaattcctggatgacttgttcagcttcatgcagaagcgagggacacctgtgaaccgcatccccatcatggccaaacaggtccttgacctgttcatgctgtacgtgctggtgacggagaagggcggcctcgtggaggtcatcaacaagaagctgtggcgtgagatcaccaagggcctcaacctgcccacgtccatcaccagtgcagccttcaccctgcggacccaatacatgaagtacctgtacccctacgagtgtgagaagcggggcctcagtaaccccaatgagctccaggcagccatagacagcaaccgacgggagggccggcgccagagctttggtggctccctctttgcctactcgccaggcggggcacacggcatgctctcctcacccaagctacccgtgtcctccctgggcctggccgcaagcaccaatggcagctccatcacccccgcccctaagatcaagaaagaggaggactcagccatccccatcacagtccctggccgcctgcctgtgtccctggcgggccaccctgtggtggcagcccaggcagcagctgtgcaagcagcagccgcccaagcagctgtggccgcacaggcagctgccctggaacagctgcgggagaagctggagtctgcagagcctccggagaagaagatggccctggtggccgatgagcagcaacggctgatgcaacgtgcactccagcagaacttcctggccatggcggcccagctgcccatgagcattcggatcaacagccaagcctccgaaagccgccaggactctgctgtgaacctgacgggcaccaacggcagcaacagcatcagcatgtcggtggagatcaacggcatcatgtacacaggagttctgtttgctcagccgccggcccccacgccaacctctgctcccaacaaaggaggcggcggcggcggcggcagcagcagcaacgcaggcggccggggaggaaacaccggaaccagcggcggccaggctgggccagcggggctgtccacaccctccacatctacctcaaataactcgttgccttaaccgcatcactccccacccgccacccaccctggagcccgccggcctgggcagggggtccaggtgggccacacaggggccaggatggcggaagatacgggtggggagggaagatatccagaaaggagccacagctgacgccaaaaagaaaagaaaaaagatatatatatatatatatatatatatacgtatatatataaagaagaatttaataaaacaggggaaaaccaaggaacacttgaatttctcaggttttggacattcagagagatgaattgtgagaacagcaaagaaatccatcagaaaaacagaaagaggcagacgtttcccagggcgttcaggcagccctgatggaccgaaggctctggtgtctggtttggccccacagcagtgtgggccgatcctgtttacctcatacatccctgcactgtgtgttttcatttttgtctgctttagttctcttttattttctattcaccacacactcaccactcccagcttctcgtgtccagtgaaacccctgaaccaagatcactgaatttttgtttttttcttgttgctttgggaaatttttttttctctgtagggtttttaagaggtttcgggggttttgttgtgtaaatattctattttattcttggggggatcaaaccttaggaaaaggatatctatatatctatatagctatatatttgtgttccttcagggaaactggtcttgaaaaagcaagaaaaaaaagcaaaaaa

SEQ ID NO: 218 - DNA, 821 bp, human
gcctcgaggcgggcgtcttcggtcatctccggcgcttctagggctggttcccgtcatcttcgggagccgtggagctctcggatacagccgacaccatgggtttcggagacctgaaaagccctgccggcctccaggtgctcaacgattacctggcggacaagagctacatcgaggggtatgtgccatcacaagcagatgtggcagtatttgaagccgtgtccagcccaccgcctgccgacttgtgtcatgccctacgttggtataatcacatcaagtcttacgaaaaggaaaaggccagcctgccaggagtgaagaaagctttgggcaaatatggtcctgccgatgtggaagacactacaggaagtggagctacagatagtaaagatgatgatgacattgacctctttggatctgatgatgaggaggaaagtgaagaagcaaagaggctaagggaagaacgtcttgcacaatatgaatcaaagaaagccaaaaaacctgcacttgttgccaagtcttccatcttactagatgtgaaaccttgggatgatgagacagatatggcgaaattagaggagtgcgtcagaagcattcaagcagacggcttagtctggggctcatctaaactagttccagtgggatacggaattaagaaacttcaaatacagtgtgtagttgaagatgataaagttggaacagatatgctggaggagcagatcactgcttttgaggactatgtgcagtccatggatgtggctgctttcaacaagatctaaaatccatcctggatcatggcatttaaataaaagattgaaagattaaaa

SEQ ID NO: 219 - DNA, 1429 bp, human
cgccgagaaccccaccccctttctttgcggaatcaccatggcggctgggaccctgtacacgtatcctgaaaactggagggccttcaaggctctcatcgctgctcagtacagcggggctcaggtccgcgtgctctccgcaccaccccacttccattttggccaaaccaaccgcacccctgaatttctccgcaaatttcctgccggcaaggtcccagcatttgagggtgatgatggattctgtgtgtttgagagcaacgccattgcctactatgtgagcaatgaggagctgcggggaagtactccagaggcagcagcccaggtggtgcagtgggtgagctttgctgattccgatatagtgcccccagccagtacctgggtgttccccaccttgggcatcatgcaccacaacaaacaggccactgagaatgcaaaggaggaagtgaggcgaattctggggctgctggatgcttacttgaagacgaggacttttctggtgggcgaacgagtgacattggctgacatcacagttgtctgcaccctgttgtggctctataagcaggttctagagccttctttccgccaggcctttcccaataccaaccgctggttcctcacctgcattaaccagccccagttccgggctgtcttgggcgaagtgaaactgtgtgagaagatggcccagtttgatgctaaaaagtttgcagagacccaacctaaaaaggacacaccacggaaagagaagggttcacgggaagagaagcagaagccccaggctgagcggaaggaggagaaaaaggcggctgcccctgctcctgaggaggagatggatgaatgtgagcaggcgctggctgctgagcccaaggccaaggaccccttcgctcacctgcccaagagtacctttgtgttggatgaatttaagcgcaagtactccaatgaggacacactctctgtggcactgccatatttctgggagcactttgataaggacggctggtccctgtggtactcagagtatcgcttccctgaagaactcactcagaccttcatgagctgcaatctcatcactggaatgttccagcgactggacaagctgaggaagaatgccttcgccagtgtcatcctttttggaaccaacaatagcagctccatttctggagtctgggtcttccgaggccaggagcttgcctttccgctgagtccagattggcaggtggactacgagtcatacacatggcggaaactggatcctggcagcgaggagacccagacgctggttcgagagtacttttcctgggagggggccttccagcatgtgggcaaagccttcaatcagggcaagatcttcaagtgaacatctcttgccatcacctagctgcctgcacctgcccttcagggagatgggggtcattaaaggaaactgaacattgaa

SEQ ID NO: 220 - DNA, 2984 bp, human
taactgagcgaggagcaattgattaatagctcggcgaggggactcactgactgttataataacactacaccagcaactcctggcttcccagcagccggaacacagacaggagagagtcagtggcaaatagacatttttcttatttcttaaaaaacagcaacttgtttgctacttttatttctgttgatttttttttcttggtgtgtgtggtggttgtttttaagtgtggagggcaaaaggagataccatcccaggctcagtccaacccctctccaaaacggcttttctgacactccaggtagcgagggagttgggtctccaggttgtgcgaggagcaaatgatgaccgccaaggccgtagacaaaatcccagtaactctcagtggttttgtgcaccagctgtctgacaacatctacccggtggaggacctcgccgccacgtcggtgaccatctttcccaatgccgaactgggaggcccctttgaccagatgaacggagtggccggagatggcatgatcaacattgacatgactggagagaagaggtcgttggatctcccatatcccagcagctttgctcccgtctctgcacctagaaaccagaccttcacttacatgggcaagttctccattgaccctcagtaccctggtgccagctgctacccagaaggcataatcaatattgtgagtgcaggcatcttgcaaggggtcacttccccagcttcaaccacagcctcatccagcgtcacctctgcctcccccaacccactggccacaggacccctgggtgtgtgcaccatgtcccagacccagcctgacctggaccacctgtactctccgccaccgcctcctcctccttattctggctgtgcaggagacctctaccaggacccttctgcgttcctgtcagcagccaccacctccacctcttcctctctggcctacccaccacctccttcctatccatcccccaagccagccacggacccaggtctcttcccaatgatcccagactatcctggattctttccatctcagtgccagagagacctacatggtacagctggcccagaccgtaagccctttccctgcccactggacaccctgcgggtgccccctccactcactccactctctacaatccgtaactttaccctggggggccccagtgctggggtgaccggaccaggggccagtggaggcagcgagggaccccggctgcctggtagcagctcagcagcagcagcagccgccgccgccgccgcctataacccacaccacctgccactgcggcccattctgaggcctcgcaagtaccccaacagacccagcaagacgccggtgcacgagaggccctacccgtgcccagcagaaggctgcgaccggcggttctcccgctctgacgagctgacacggcacatccgaatccacactgggcataagcccttccagtgtcggatctgcatgcgcaacttcagccgcagtgaccacctcaccacccatatccgcacccacaccggtgagaagcccttcgcctgtgactactgtggccgaaagtttgcccggagtgatgagaggaagcgccacaccaagatccacctgagacagaaagagcggaaaagcagtgccccctctgcatcggtgccagccccctctacagcctcctgctctgggggcgtgcagcctgggggtaccctgtgcagcagtaacagcagcagtcttggcggagggccgctcgccccttgctcctctcggacccggacaccttgagatgagactcaggctgatacaccagctcccaaaggtcccggaggccctttgtccactggagctgcacaacaaacactaccaccctttcctgtccctctctccctttgttgggcaaagggctttggtggagctagcactgccccctttccacctagaagcaggttcttcctaaaacttagcccattctagtctctcttaggtgagttgactatcaacccaaggcaaaggggaggctcagaaggaggtggtgtggggatcccctggccaagagggctgaggtctgaccctgctttaaagggttgtttgactaggttttgctaccccacttccccttattttgacccatcacaggtttttgaccctggatgtcagagttgatctaagacgttttctacaataggttgggagatgctgatcccttcaagtggggacagcaaaaagacaagcaaaactgatgtgcactttatggcttgggactgatttgggggacattgtacagtgagtgaagtatagcctttatgccacactctgtggccctaaaatggtgaatcagagcatatctagttgtctcaacccttgaagcaatatgtattatatactcagagaacagaagtgcaatgtgatgggaggaacgtagcaatatctgctccttttcgagttgtttgagaaatgtaggctattttttcagtgtatatccactcagattttgtgtatttttgatgtacccacactgttctctaaattctgaatctttgggaaaaaatgtaaagcatttatgatctcagaggttaacttatttaagggggatgtacatattctctgaaactaggatgcatgcaattgtgttggaagtgtccttggtcgccttgtgtgatgtagacaaatgttacaaggctgcatgtaaatgggttgccttattatggagaaaaaaatcactccctgagtttagtatggctgtatatttatgcctattaatatttggaattttttttagaaagtatatttttgtatgctttgttttgtgacttaaaagtgttacctttgtagtcaaatttcagataagaatgtacataatgttaccggagctgatttgtttggtcattagctcttaatagttgtgaaaaaataaatctattctaacgcaaaaccactaactgaagttcagatataatggatggtttgtgactatagtgtaaataaatacttttcaacaat

SEQ ID NO: 221 - DNA, 2646 bp, human
tttccttcctcttttggcaacatggcgggcggagaagctggagtgactctagggcagccgcatctttcgcgtcaggatctcaccaccttggatgttaccaagttgacgccactttcacacgaagttatcagcagacaagccacaattaacataggtacaattggtcatgtagctcatgggaaatccacagtcgtcaaagctatttctggagttcatactgtcaggttcaaaaatgaactagaaagaaatattacaatcaagcttggatatgctaatgctaagatttataagcttgatgacccaagttgccctcggccagaatgttatagatcttgtgggagcagtacacctgacgagtttcctacggacattccagggaccaaagggaacttcaaattagtcagacatgtttcctttgttgactgtcctggccacgatattttgatggctactatgctgaacggtgcagcagtgatggatgcagctcttctgttgatagctggtaatgaatcttgccctcagcctcagacatcggaacacctggctgctatagagatcatgaaactgaagcatattttgattctacaaaataaaattgatttggtaaaagaaagtcaggctaaagaacaatacgagcagatccttgcatttgtccaaggtacagtagcagagggagctcccattattccaatttcagctcagctgaaatacaatattgaagttgtttgtgagtacatagtaaagaaaattccagtacccccaagagactttacttcagagccccggcttattgttattagatcttttgatgtcaacaaacctggctgtgaagttgatgaccttaagggaggtgtagctggtggtagtatcctaaaaggagtattaaaggtgggccaggagatagaagtaagacctggtattgtttccaaagatagtgaaggaaaactcatgtgtaaaccaatcttttccaaaattgtatcactttttgcggagcataatgatctgcaatatgctgctccaggcggtcttattggagttggaacaaaaattgaccccactttgtgccgggctgacagaatggtggggcaagtacttggtgcagtcggagctttacctgagatattcacagaattggaaatttcctatttcctgcttagacggcttctaggtgtacgcactgaaggagacaagaaagcagcaaaggttcaaaagctgtctaagaatgaagtgctcatggtgaacataggatccctgtcaacaggagggagagttagtgctgtcaaggccgatttgggtaaaattgttttgaccaatccagtgtgcacagaggtaggagaaaaaattgcccttagccgaagagttgaaaaacactggcgtttaattggttggggtcagataagaagaggagtgacaatcaagccaacagtagatgatgactgaagaataccagttaaataatacattcggatggatttggaagttggaattcctcttaacaaccaaggggtttattttcaaagcaatattggggaattgatttcacagttcgttaccttagtaggtaacggtaaggttattctctttttttttttttttggttatgaaaacttagggactaaaattaatataaaaattggcataatgttggattgaatctacattttggcagaagttaaacattcccacataatgtcaaaattatacatcatgcagttctgtttttttgtttgtttaattttgttttgtttttgagtctggctctgtcacccaggctggagtgcagtggcgtgatctgcaacctctgccccccgggttcaagcgattctcctgcctcagcctcccgagtagctgagattacaggtgcgcgccaccacacttggctaatttttgtattattagtagagacggggtttcagcatgttggctaggccggtctctcctgacctcagggtgatcagcccacctcggcctcacaaagtgctgggattacaggcgtgagccaccttgcccagcccacatcatacagtttgaaatgaaactttgccacaaccagcctttgctgtagcacacacatatatcactgaacctgtttgaaataaagttttttttctttttcatgattcgtctttgagtacctccaggctgaaagactgttgtaccagtaaaaacttaaaggcacaaattctccttgaagaccttctcccttttatgtggccccatattttatgttgctttatctttgaaattttgcatgaaaaggaaatgaatggattcgaatgaaattgtcctttagagcatgattacttgttcccatggacaaatatttttctccccttgctcttcctggcctgaaacacgggaaaccagagtcaaaagttatctccctctccctgtgatgccttgagatttttttctgcgttgtttaatgcctgaaatccaagtcttcctccatgggaaaatactgttataccaaataattctagatgagtaacaaagatctttttaggccttcattttatgttttttcttaactgttatattatgattgtgacatagattatactactactaatttttggatgtttcaaaaggtcaagaagtaaaagatgttagaaagcaaaaaaaaaaaaaaaaaaaaaaaaaaaa

SEQ ID NO: 222 - DNA, 2782 bp, human
cgctgctgccgctgctgttgctcctgaggctgctggctgaggccggaggatcgagcggcggcggcggcggcggctgagagggcggcggcgggagcggagcgggacgagggaacgggaggaagcgagcgaggagcgcgcagagcgcgcttttccgtccgcctgaggagccgaagcagccccggccccgccgccgccgcctgcccgccggacaaagccgagagcccgcgcccacagccatgtcctcgtcagccggcagcggccaccagcccagccagagccgcgccatccccacccgcaccgtggccatcagcgacgccgcgcagctacctcatgactattgcaccacgcccggggggacgctcttctccaccacaccgggaggaactcgaatcatttatgacagaaagtttctgttggatcgtcgcaattctcccatggctcagaccccaccctgccacctgcccaatatcccaggagtcactagccctggcaccttaattgaagactccaaagtagaagtaaacaatttgaacaacttgaacaatcacgacaggaaacatgcagttggggatgatgctcagttcgagatggacatctgactctcctgcaaggattagaagaaaagcagcaacactgatacttgtgtgcacctgatttggccaataggatcaacagtgaaaagacagaagaggcaataccagcagtccccattacagtctccacctccccgtcttcctctgggtgccaaatgatgggaagatgagcttcatctgaccatttcttctccctgtctcctgttccccttcccagttaaacaggttagattgaaggcccttgctgtatttctgtagagctaagcagcccttagaggaaaacagttcaactctgactttcctagttgtttttttattgagagccaccctcataccctgtaattttgtcccaaatcaaatatcaacctaccaacaactgcctggctgggaagtctggggaagggatacagagcttggtgggcctaacaccattcatattccttaccctctgtctctcctccctgtatcccacctatggttcagtgttgcaagagtctgggcttggggtctttaaaaccagcagggggaaatgataaaaagagagctgctttcccttttaccttgaggtattcgtccctcgggacagagcacagcttgtgcaactctggtagcgttaccctgtgacactgttttgaggtccacttcctttctttcctctgggaggaatgtcttctgtctttggtattatagttcatcttcccattcttttacttagtgcatttgtgcagatatttttaactctgtacatcagaagagagcccttggtaaccagttttgctcttcttctgccactcctccctgcttgcatctcgttgctggcagagtcctcttgtacttcaagaaagcaaagtgattttgtctgctcctagagcaggtccataccaagtaatagaggcactttagcttccacttggtgggtaaggcctgatcatagtattctgtcagataatgcctaagaatgaccgctgaagaacgttgacccatttgagtacccggtctcagtcgtcatttttaagtccagtgagcattgtggtagttgttcttagattgcagtttcttatgttttgagtttgaagttgattttcagaatgttcttagaaaagaactgcatttttttcctttgtggatctgctttgtttggctgctgggatagataagcatgggcttaaaaaatgtgttcctcccagttttcttgcctttcctgttgtactctgaatttctctccctacctccctcactttcttcctctctccttcctttccttcctttttctctaccaggccatttttcaaatttacatcaaagatacctgaagtgttggtatctgagaatatctgtcactcctcttatctgagaagtgaccttttatttttaagatgactacagacctatttttagatatgttttcagtacaattttgaacagcaactttttaattaaacatcttccagtgttaggaagttgagaaacgttcataggcaagtctgctgttctatgtcaccatcttttgtctcccctagtcccccaggagctctttcctttcccctctagttttgggtgtgcatgtttggagtttgtagtgggtggtttgtaaaactggaccattctgccttgctatgggttgttcaagaaagcctcattcttttctgtgaccctttcgcttttgcattcaccctccttcccacctacctgtcctggggctgttgagcagcataataatcccgggagaatgattcccctcatagaaagacaaaagcatccatcccctcatagttaagtagccactggtgtcctgggaatttctggttggatttggtgccctgaacttttttattaagaaatcagatcccagggtgagagtaacaggccatttggccaagaaagaaacctgtttgtttttcttttgaactatgaaaagaccctgtttgtgaatatattttagaaagagaggaaggatgtctgcagaactttgttctgttttctgccacaaaaatgtgaatagttcagagtgaaaaccttttgtgatggttgatgtctcaggaataagctggatctccaatgttttggggatgctttgagtctcaaaaaaaattgataatcagaaaagtaatttttgtttgtttgtttaatgtatccctgttctgtttttaattaaactccaagtctcattttaaaaaaaaaaaaaaaaa

SEQ ID NO: 223 - DNA, 1290 bp, human
gcggcggcggcggtagaggcggcggcggcggcggcagcgggctcggaggcagcggttgggctcgcggcgagcggacggggtcgagtcagtgcgttcgcgcgagttggaatcgaagcctcttaaaatggcagatgacttggacttcgagacaggagatgcaggggcctcagccaccttcccaatgcagtgctcagcattacgtaagaatggctttgtggtgctcaaaggccggccatgtaagatcgtcgagatgtctacttcgaagactggcaagcacggccacgccaaggtccatctggttggtattgacatctttactgggaagaaatatgaagatatctgcccgtcaactcataatatggatgtccccaacatcaaaaggaatgacttccagctgattggcatccaggatgggtacctatcactgctccaggacagcggggaggtacgagaggaccttcgtctccctgagggagaccttggcaaggagattgagcagaagtacgactgtggagaagagatcctgatcacggtgctgtctgccatgacagaggaggcagctgttgcaatcaaggccatggcaaaataactggctcccaggatggcggtggtggcagcagtgatcctctgaacctgcagaggccccctccccgagcctggcctggctctggcccggtcctaagctggactcctcctacacaatttatttgacgttttattttggttttccccaccccctcaatctgtcggggagcccctgcccttcacctagctcccttggccaggagcgagcgaagctgtggccttggtgaagctgccctcctcttctcccctcacactacagccctggtgggggagaagggggtgggtgctgcttgtggtttagtcttttttttttttttttttttttttttaaattcaatctggaatcagaaagcggtggattctggcaaatggtccttgtgccctccccactcatccctggtctggtcccctgttgcccatagccctttaccctgagcaccaccccaacagactggggaccagccccctcgcctgcctgtgtctctccccaaacccctttagatggggagggaagaggaggagaggggaggggacctgccccctcctcaggcatctgggagggccctgcccccatgggctttacccttccctgcgggctctctccccgacacatttgttaaaatcaaacctgaataaaactacaagtttaatatgaaaaaaaaaaaaaaaaaaaaaaaaaaaaaaaaaaaaaaaaaaaaaaaaaaa

SEQ ID NO: 224 - DNA, 1310 bp, human
gctcggagcccggagcgtgcctcggcggcctgtcggttttcaccatggagcagctgagctcagcaaacacccgcttcgccttggacctgttcctggcgttgagtgagaacaatccggctggaaacatcttcatctctcccttcagcatttcatctgctatggccatggtttttctggggaccagaggtaacacggcagcacagctgtccaagactttccatttcaacacggttgaagaggttcattcaagattccagagtctgaatgctgatatcaacaaacgtggagcgtcttatattctgaaacttgctaatagattatatggagagaaaacttacaatttccttcctgagttcttggtttcgactcagaaaacatatggtgctgacctggccagtgtggattttcagcatgcctctgaagatgcaaggaagaccataaaccagtgggtcaaaggacagacagaaggaaaaattccggaactgttggcttcgggcatggttgataacatgaccaaacttgtgctagtaaatgccatctatttcaagggaaactggaaggataaattcatgaaagaagccacgacgaatgcaccattcagattgaataagaaagacagaaaaactgtgaaaatgatgtatcagaagaaaaaatttgcatatggctacatcgaggaccttaagtgccgtgtgctggaactgccttaccaaggcgaggagctcagcatggtcatcctgctgccggatgacattgaggacgagtccacgggcctgaagaagattgaggaacagttgactttggaaaagttgcatgagtggactaaacctgagaatctcgatttcattgaagttaatgtcagcttgcccaggttcaaactggaagagagttacactctcaactccgacctcgcccgcctaggtgtgcaggatctctttaacagtagcaaggctgatctgtctggcatgtcaggagccagagatatttttatatcaaaaattgtccacaagtcatttgtggaagtgaatgaagagggaacagaggcggcagctgccacagcaggcatcgcaactttctgcatgttgatgcccgaagaaaatttcactgccgaccatccattccttttctttattcggcataattcctcaggtagcatcctattcttggggagattttcttccccttagaagaaagagactgtagcaatacaaaaatcaagcttagtgctttattacctgagtttttaatagagccaatatgtcttatatctttaccaataaaaccactgtccagaaaaaaaaaaaaaaaaaaaa

SEQ ID NO: 225 - DNA, 1252 bp, human
tcgcaacgtcacgggcaagggccgccattttgactgagcaaccctagtgacaggagccgaagcagcagcgcaggttgtccccgtttcccctcccccttcccttctccggttgccttcccgggccccttacactccacagtcccggtcccgccatgtcccagaaacaagaagaagagaaccctgcggaggagaccggcgaggagaagcaggacacgcaggagaaagaaggtattctgcctgagagagctgaagaggcaaagctaaaggccaaatacccaagcctaggacaaaagcctggaggctccgacttcctcatgaagagactccagaaagggcaaaagtactttgactcaggagactacaacatggccaaagccaagatgaagaataagcagctgccaagtgcaggaccagacaagaacctggtgactggtgatcacatccccaccccacaggatctgccccagagaaagtcctcgctcgtcaccagcaagcttgcgggtggccaagttgaatgatgctgcccggggctctgccagatcctgagacgcttcccctccctgccccacccgggtcctgtgctggctcctgccccttcctgcttttgcagccaggggtcaggaggtggctcgggtgtgggctggagaggcagaagccctttcctgttggtgtcccagcacatggagccccttgggctgagcaccaagaccttgaaccttttttgttttaccttttttccaaataacagttgggagaaatatcaatgaaattctgggggtgggggtggggttgaaagggtggggtgggagatatggaggagtatgaattagggcttggagttggtaaaaacattcctgactatccttcttaaccacgtggctgatgtggggtaggtatgaggggaaggaagtggagtagcctaatgaaaaggggttctagttgagctctgtagataaatgccttgtttcagtgtggttggagacctggtgtcagataaaagaaactccatccgcacagacagatgcaaacagctcctctagttctgcagagctagttgagaactcaacattaatcattttaaaaagtactgtccttgaaatagatttgctgtgggaagaagggcagtgagtgtgggagaaaggagccgtgagcgtggggaaccccacagagcccaaaggactttttcagtattcgaaataaacaaaacaaaaacccatgaaaaaacccaacccagaaataaaaaaaaaaaaaa

SEQ ID NO: 226 - DNA, 9046 bp, human
ccttgtttgtgtgctaggctgggggggagagagggcgagagagagcgggcgagagtgggcaagcaggacgccgggctgagtgctaactgcgggacgcagagagtgcggaggggagtcgggtcggagagaggcggcaggggccagaacagtggcagggggcccggggcgcacgggctgaggcgacccccagccccctcccgtccgcacacacccccaccgcggtccagcagccgggccggcgtcgacgctaggggggaccattacataacccgcgccccggccgtcttctcccgccgccgcggcgcccgaactgagcccggggcgggcgctccagcactggccgccggcgtggggcgtagcagcggccgtattattatttcgcggaaaggaaggcgaaggaggggagcgccggcgcgaggaggggccgcctgcgcccgccgccggagcggggcctcctcggtgggctccgcgtcggcgcgggcgtgcgggcggcgctgctcggcccggccccctcggccctctggtccggccagctccgctcccggcgtccttgccgcgcctccgccggccgccgcgcgatgtgaggcggcggcgccagcctggctctcggctcgggcgagttctctgcggccattaggggccggtgcggcggcggcgcggagcgcggcggcaggaggagggttcggagggtgggggcgcaggcccgggagggggcaccgggaggaggtgagtgtctcttgtcgcctcctcctctccccccttttcgcccccgcctccttgtggcgatgagaaggaggaggacagcgccgaggaggaagaggttgatggcggcggcggagctccgagagacctcggctgggcaggggccggccgtggcgggccggggactgcgcctctagagccgcgagttctcgggaattcgccgcagcggaccggcctcggcgaatttgtgctcttgtgccctcctccgggcttgggccaggccggcccctcgcacttgcccttaccttttctatcgagtccgcatccctctccagccactgcgacccggcgaagagaaaaaggaacttcccccaccccctcgggtgccgtcggagccccccagcccacccctgggtgcggcgcggggaccccgggccgaagaagagatttcctgaggattctggttttcctcgcttgtatctccgaaagaattaaaaatggccgagaatgtggtggaaccggggccgccttcagccaagcggcctaaactctcatctccggccctctcggcgtccgccagcgatggcacagattttggctctctatttgacttggagcacgacttaccagatgaattaatcaactctacagaattgggactaaccaatggtggtgatattaatcagcttcagacaagtcttggcatggtacaagatgcagcttctaaacataaacagctgtcagaattgctgcgatctggtagttcccctaacctcaatatgggagttggtggcccaggtcaagtcatggccagccaggcccaacagagcagtcctggattaggtttgataaatagcatggtcaaaagcccaatgacacaggcaggcttgacttctcccaacatggggatgggcactagtggaccaaatcagggtcctacgcagtcaacaggtatgatgaacagtccagtaaatcagcctgccatgggaatgaacacagggacgaatgcgggcatgaatcctggaatgttggctgcaggcaatggacaagggataatgcctaatcaagtcatgaacggttcaattggagcaggccgagggcgacaggatatgcagtacccaaacccaggcatgggaagtgctggcaacttactgactgagcctcttcagcagggctctccccagatgggaggacaaacaggattgagaggcccccagcctcttaagatgggaatgatgaacaaccccaatccttatggttcaccatatactcagaatcctggacagcagattggagccagtggccttggtctccagattcagacaaaaactgtactatcaaataacttatctccatttgctatggacaaaaaggcagttcctggtggaggaatgcccaacatgggtcaacagccagccccgcaggtccagcagccaggtctggtgactccagttgcccaagggatgggttctggagcacatacagctgatccagagaagcgcaagctcatccagcagcagcttgttctccttttgcatgctcacaagtgccagcgccgggaacaggccaatggggaagtgaggcagtgcaaccttccccactgtcgcacaatgaagaatgtcctaaaccacatgacacactgccagtcaggcaagtcttgccaagtggcacactgtgcatcttctcgacaaatcatttcacactggaagaattgtacaagacatgattgtcctgtgtgtctccccctcaaaaatgctggtgataagagaaatcaacagccaattttgactggagcacccgttggacttggaaatcctagctctctaggggtgggtcaacagtctgcccccaacctaagcactgttagtcagattgatcccagctccatagaaagagcctatgcagctcttggactaccctatcaagtaaatcagatgccgacacaaccccaggtgcaagcaaagaaccagcagaatcagcagcctgggcagtctccccaaggcatgcggcccatgagcaacatgagtgctagtcctatgggagtaaatggaggtgtaggagttcaaacgccgagtcttctttctgactcaatgttgcattcagccataaattctcaaaacccaatgatgagtgaaaatgccagtgtgccctccctgggtcctatgccaacagcagctcaaccatccactactggaattcggaaacagtggcacgaagatattactcaggatcttcgaaatcatcttgttcacaaactcgtccaagccatatttcctacgccggatcctgctgctttaaaagacagacggatggaaaacctagttgcatatgctcggaaagttgaaggggacatgtatgaatctgcaaacaatcgagcggaatactaccaccttctagctgagaaaatctataagatccagaaagaactagaagaaaaacgaaggaccagactacagaagcagaacatgctaccaaatgctgcaggcatggttccagtttccatgaatccagggcctaacatgggacagccgcaaccaggaatgacttctaatggccctctacctgacccaagtatgatccgtggcagtgtgccaaaccagatgatgcctcgaataactccacaatctggtttgaatcaatttggccagatgagcatggcccagccccctattgtaccccggcaaacccctcctcttcagcaccatggacagttggctcaacctggagctctcaacccgcctatgggctatgggcctcgtatgcaacagccttccaaccagggccagttccttcctcagactcagttcccatcacagggaatgaatgtaacaaatatccctttggctccgtccagcggtcaagctccagtgtctcaagcacaaatgtctagttcttcctgcccggtgaactctcctataatgcctccagggtctcaggggagccacattcactgtccccagcttcctcaaccagctcttcatcagaattcaccctcgcctgtacctagtcgtacccccacccctcaccatactcccccaagcataggggctcagcagccaccagcaacaacaattccagcccctgttcctacaccaccagccatgccacctgggccacagtcccaggctctacatccccctccaaggcagacacctacaccaccaacaacacaacttccccaacaagtgcagccttcacttcctgctgcaccttctgctgaccagccccagcagcagcctcgctcacagcagagcacagcagcgtctgttcctaccccaaacgcaccgctgcttcctccgcagcctgcaactccactttcccagccagctgtaagcattgaaggacaggtatcaaatcctccatctactagtagcacagaagtgaattctcaggccattgctgagaagcagccttcccaggaagtgaagatggaggccaaaatggaagtggatcaaccagaaccagcagatacgcagccggaggatatttcagagtctaaagtggaagactgtaaaatggaatctaccgaaacagaagagagaagcactgagttaaaaactgaaataaaagaggaggaagaccagccaagtacttcagctacccagtcatctccggctccaggacagtcaaagaaaaagattttcaaaccagaagaactacgacaggcactgatgccaacattggaggcactttaccgtcaggatccagaatcccttccctttcgtcaacctgtggaccctcagcttttaggaatccctgattactttgatattgtgaagagccccatggatctttctaccattaagaggaagttagacactggacagtatcaggagccctggcagtatgtcgatgatatttggcttatgttcaataatgcctggttatataaccggaaaacatcacgggtatacaaatactgctccaagctctctgaggtctttgaacaagaaattgacccagtgatgcaaagccttggatactgttgtggcagaaagttggagttctctccacagacactgtgttgctacggcaaacagttgtgcacaatacctcgtgatgccacttattacagttaccagaacaggtatcatttctgtgagaagtgtttcaatgagatccaaggggagagcgtttctttgggggatgacccttcccagcctcaaactacaataaataaagaacaattttccaagagaaaaaatgacacactggatcctgaactgtttgttgaatgtacagagtgcggaagaaagatgcatcagatctgtgtccttcaccatgagatcatctggcctgctggattcgtctgtgatggctgtttaaagaaaagtgcacgaactaggaaagaaaataagttttctgctaaaaggttgccatctaccagacttggcacctttctagagaatcgtgtgaatgactttctgaggcgacagaatcaccctgagtcaggagaggtcactgttagagtagttcatgcttctgacaaaaccgtggaagtaaaaccaggcatgaaagcaaggtttgtggacagtggagagatggcagaatcctttccataccgaaccaaagccctctttgcctttgaagaaattgatggtgttgacctgtgcttctttggcatgcatgttcaagagtatggctctgactgccctccacccaaccagaggagagtatacatatcttacctcgatagtgttcatttcttccgtcctaaatgcttgaggactgcagtctatcatgaaatcctaattggatatttagaatatgtcaagaaattaggttacacaacagggcatatttgggcatgtccaccaagtgagggagatgattatatcttccattgccatcctcctgaccagaagatacccaagcccaagcgactgcaggaatggtacaaaaaaatgcttgacaaggctgtatcagagcgtattgtccatgactacaaggatatttttaaacaagctactgaagatagattaacaagtgcaaaggaattgccttatttcgagggtgatttctggcccaatgttctggaagaaagcattaaggaactggaacaggaggaagaagagagaaaacgagaggaaaacaccagcaatgaaagcacagatgtgaccaagggagacagcaaaaatgctaaaaagaagaataataagaaaaccagcaaaaataagagcagcctgagtaggggcaacaagaagaaacccgggatgcccaatgtatctaacgacctctcacagaaactatatgccaccatggagaagcataaagaggtcttctttgtgatccgcctcattgctggccctgctgccaactccctgcctcccattgttgatcctgatcctctcatcccctgcgatctgatggatggtcgggatgcgtttctcacgctggcaagggacaagcacctggagttctcttcactccgaagagcccagtggtccaccatgtgcatgctggtggagctgcacacgcagagccaggaccgctttgtctacacctgcaatgaatgcaagcaccatgtggagacacgctggcactgtactgtctgtgaggattatgacttgtgtatcacctgctataacactaaaaaccatgaccacaaaatggagaaactaggccttggcttagatgatgagagcaacaaccagcaggctgcagccacccagagcccaggcgattctcgccgcctgagtatccagcgctgcatccagtctctggtccatgcttgccagtgtcggaatgccaattgctcactgccatcctgccagaagatgaagcgggttgtgcagcataccaagggttgcaaacggaaaaccaatggcgggtgccccatctgcaagcagctcattgccctctgctgctaccatgccaagcactgccaggagaacaaatgcccggtgccgttctgcctaaacatcaagcagaagctccggcagcaacagctgcagcaccgactacagcaggcccaaatgcttcgcaggaggatggccagcatgcagcggactggtgtggttgggcagcaacagggcctcccttcccccactcctgccactccaacgacaccaactggccaacagccaaccaccccgcagacgccccagcccacttctcagcctcagcctacccctcccaatagcatgccaccctacttgcccaggactcaagctgctggccctgtgtcccagggtaaggcagcaggccaggtgacccctccaacccctcctcagactgctcagccaccccttccagggcccccacctacagcagtggaaatggcaatgcagattcagagagcagcggagacgcagcgccagatggcccacgtgcaaatttttcaaaggccaatccaacaccagatgcccccgatgactcccatggcccccatgggtatgaacccacctcccatgaccagaggtcccagtgggcatttggagccagggatgggaccgacagggatgcagcaacagccaccctggagccaaggaggattgcctcagccccagcaactacagtctgggatgccaaggccagccatgatgtcagtggcccagcatggtcaacctttgaacatggctccacaaccaggattgggccaggtaggtatcagcccactcaaaccaggcactgtgtctcaacaagccttacaaaaccttttgcggactctcaggtctcccagctctcccctgcagcagcaacaggtgcttagtatccttcacgccaacccccagctgttggctgcattcatcaagcagcgggctgccaagtatgccaactctaatccacaacccatccctgggcagcctggcatgccccaggggcagccagggctacagccacctaccatgccaggtcagcagggggtccactccaatccagccatgcagaacatgaatccaatgcaggcgggcgttcagagggctggcctgccccagcagcaaccacagcagcaactccagccacccatgggagggatgagcccccaggctcagcagatgaacatgaaccacaacaccatgccttcacaattccgagacatcttgagacgacagcaaatgatgcaacagcagcagcaacagggagcagggccaggaataggccctggaatggccaaccataaccagttccagcaaccccaaggagttggctacccaccacagccgcagcagcggatgcagcatcacatgcaacagatgcaacaaggaaatatgggacagataggccagcttccccaggccttgggagcagaggcaggtgccagtctacaggcctatcagcagcgactccttcagcaacagatggggtcccctgttcagcccaaccccatgagcccccagcagcatatgctcccaaatcaggcccagtccccacacctacaaggccagcagatccctaattctctctccaatcaagtgcgctctccccagcctgtcccttctccacggccacagtcccagcccccccactccagtccttccccaaggatgcagcctcagccttctccacaccacgtttccccacagacaagttccccacatcctggactggtagctgcccaggccaaccccatggaacaagggcattttgccagcccggaccagaattcaatgctttctcagcttgctagcaatccaggcatggcaaacctccatggtgcaagcgccacggacctgggactcagcaccgataactcagacttgaattcaaacctctcacagagtacactagacatacactagagacaccttgtattttgggagcaaaaaaattattttctcttaacaagactttttgtactgaaaacaatttttttgaatctttcgtagcctaaaagacaattttccttggaacacataagaactgtgcagtagccgtttgtggtttaaagcaaacatgcaagatgaacctgagggatgatagaatacaaagaatatatttttgttatgggctggttaccaccagcctttcttcccctttgtgtgtgtggttcaagtgtgcactgggaggaggctgaggcctgtgaagccaaacaatatgctcctgccttgcacctccaataggttttattattttttttaaattaatgaacatatgtaatattaatgaacatatgtaatattaatagttattatttactggtgcagatggttgacatttttccctattttcctcactttatggaagagttaaaacatttctaaaccagaggacaaaaggggttaatgttactttgaaattacattctatatatatataaatatatataaatatatattaaaataccagttttttttctctgggtgcaaagatgttcattcttttaaaaaatgtttaaaaaaaa

SEQ ID NO: 227 - DNA, 1856 bp, human
ctgacttggcaggactgtgcaattgtcagaaggccgtggggagtgggggccagtgcctgcagcctgccctgcctctctcacaggcccttagagcatcgccaggtgcagagctccacagctctctttcccaaggagtaatcagagggtgagaacgtggagcctggtggacaggtgaaagcactgggatctttctgcccagaaaggggaaagttgcacatttatatcctagagggaagcgacagcagtgcttctccctgtgctgaggtacaggagccatgtggctagaaatcctcctcacttcagtgctgggctttgccatctactggttcatctcccgggacaaagaggaaactttgccacttgaagatgggtggtgggggccaggcacgaggtccgcagccagggaggacgacagcatccgccctttcaaggtggaaacgtcagatgaggagatccacgacttacaccagaggatcgataagttccgtttcaccccacctttggaggacagctgcttccactatggcttcaactccaactacctgaagaaagtcatctcctactggcggaatgaatttgactggaagaagcaggtggagattctcaacagataccctcacttcaagactaagattgaagggctggacatccacttcatccacgtgaagcccccccagctgcccgcaggccataccccgaagcccttgctgatggtgcacggctggcccggctctttctacgagttttataagatcatcccactcctgactgaccccaagaaccatggcctgagcgatgagcacgtttttgaagtcatctgcccttccatccctggctatggcttctcagaggcatcctccaagaaggggttcaactcggtggccaccgccaggatcttttacaagctgatgctgcggctgggcttccaggaattctacattcaaggaggggactgggggtccctgatctgcactaatatggcccagctggtgcccagccacgtgaaaggcctgcacttgaacatggctttggttttaagcaacttctctaccctgaccctcctcctgggacagcgtttcgggaggtttcttggcctcactgagagggatgtggagctgctgtaccccgtcaaggagaaggtattctacagcctgatgagggagagcggctacatgcacatccagtgcaccaagcctgacaccgtaggctctgctctgaatgactctcctgtgggtctggctgcctatattctagagaagttttccacctggaccaatacggaattccgatacctggaggatggaggcctggaaaggaagttctccctggacgacctgctgaccaacgtcatgctctactggacaacaggcaccatcatctcctcccagcgcttctacaaggagaacctgggacagggctggatgacccagaagcatgagcggatgaaggtctatgtgcccactggcttctctgccttcccttttgagctattgcacacgcctgaaaagtgggtgaggttcaagtacccaaagctcatctcctattcctacatggttcgtgggggccactttgcggcctttgaggagccggagctgctcgcccaggacatccgcaagttcctgtcggtgctggagcggcaatgacccacccctctccccccgcctgccacctccccccacaagtgccctccaggcttttcttggggaagataccccttttctgaggaatgagtttgcctccgtcccctgcccatgctgggagcccacgctcaccccctcacccctccaagctcactccccaacccccaactccgtgtggtaagcaacatggctttgatgataaacgactttactcta

SEQ ID NO: 228 - DNA, 4975 bp, human
ctctcacacacacacacccctcccctgccatccctccccggactccggctccggctccgattgcaatttgcaacctccgctgccgtcgccgcagcagccaccaattcgccagcggttcaggtggctcttgcctcgatgtcctagcctaggggcccccgggccggacttggctgggctcccttcaccctctgcggagtcatgagggcgaacgacgctctgcaggtgctgggcttgcttttcagcctggcccggggctccgaggtgggcaactctcaggcagtgtgtcctgggactctgaatggcctgagtgtgaccggcgatgctgagaaccaataccagacactgtacaagctctacgagaggtgtgaggtggtgatggggaaccttgagattgtgctcacgggacacaatgccgacctctccttcctgcagtggattcgagaagtgacaggctatgtcctcgtggccatgaatgaattctctactctaccattgcccaacctccgcgtggtgcgagggacccaggtctacgatgggaagtttgccatcttcgtcatgttgaactataacaccaactccagccacgctctgcgccagctccgcttgactcagctcaccgagattctgtcagggggtgtttatattgagaagaacgataagctttgtcacatggacacaattgactggagggacatcgtgagggaccgagatgctgagatagtggtgaaggacaatggcagaagctgtcccccctgtcatgaggtttgcaaggggcgatgctggggtcctggatcagaagactgccagacattgaccaagaccatctgtgctcctcagtgtaatggtcactgctttgggcccaaccccaaccagtgctgccatgatgagtgtgccgggggctgctcaggccctcaggacacagactgctttgcctgccggcacttcaatgacagtggagcctgtgtacctcgctgtccacagcctcttgtctacaacaagctaactttccagctggaacccaatccccacaccaagtatcagtatggaggagtttgtgtagccagctgtccccataactttgtggtggatcaaacatcctgtgtcagggcctgtcctcctgacaagatggaagtagataaaaatgggctcaagatgtgtgagccttgtgggggactatgtcccaaagcctgtgagggaacaggctctgggagccgcttccagactgtggactcgagcaacattgatggatttgtgaactgcaccaagatcctgggcaacctggactttctgatcaccggcctcaatggagacccctggcacaagatccctgccctggacccagagaagctcaatgtcttccggacagtacgggagatcacaggttacctgaacatccagtcctggccgccccacatgcacaacttcagtgttttttccaatttgacaaccattggaggcagaagcctctacaaccggggcttctcattgttgatcatgaagaacttgaatgtcacatctctgggcttccgatccctgaaggaaattagtgctgggcgtatctatataagtgccaataggcagctctgctaccaccactctttgaactggaccaaggtgcttcgggggcctacggaagagcgactagacatcaagcataatcggccgcgcagagactgcgtggcagagggcaaagtgtgtgacccactgtgctcctctgggggatgctggggcccaggccctggtcagtgcttgtcctgtcgaaattatagccgaggaggtgtctgtgtgacccactgcaactttctgaatggggagcctcgagaatttgcccatgaggccgaatgcttctcctgccacccggaatgccaacccatggggggcactgccacatgcaatggctcgggctctgatacttgtgctcaatgtgcccattttcgagatgggccccactgtgtgagcagctgcccccatggagtcctaggtgccaagggcccaatctacaagtacccagatgttcagaatgaatgtcggccctgccatgagaactgcacccaggggtgtaaaggaccagagcttcaagactgtttaggacaaacactggtgctgatcggcaaaacccatctgacaatggctttgacagtgatagcaggattggtagtgattttcatgatgctgggcggcacttttctctactggcgtgggcgccggattcagaataaaagggctatgaggcgatacttggaacggggtgagagcatagagcctctggaccccagtgagaaggctaacaaagtcttggccagaatcttcaaagagacagagctaaggaagcttaaagtgcttggctcgggtgtctttggaactgtgcacaaaggagtgtggatccctgagggtgaatcaatcaagattccagtctgcattaaagtcattgaggacaagagtggacggcagagttttcaagctgtgacagatcatatgctggccattggcagcctggaccatgcccacattgtaaggctgctgggactatgcccagggtcatctctgcagcttgtcactcaatatttgcctctgggttctctgctggatcatgtgagacaacaccggggggcactggggccacagctgctgctcaactggggagtacaaattgccaagggaatgtactaccttgaggaacatggtatggtgcatagaaacctggctgcccgaaacgtgctactcaagtcacccagtcaggttcaggtggcagattttggtgtggctgacctgctgcctcctgatgataagcagctgctatacagtgaggccaagactccaattaagtggatggcccttgagagtatccactttgggaaatacacacaccagagtgatgtctggagctatggtgtgacagtttgggagttgatgaccttcggggcagagccctatgcagggctacgattggctgaagtaccagacctgctagagaagggggagcggttggcacagccccagatctgcacaattgatgtctacatggtgatggtcaagtgttggatgattgatgagaacattcgcccaacctttaaagaactagccaatgagttcaccaggatggcccgagacccaccacggtatctggtcataaagagagagagtgggcctggaatagcccctgggccagagccccatggtctgacaaacaagaagctagaggaagtagagctggagccagaactagacctagacctagacttggaagcagaggaggacaacctggcaaccaccacactgggctccgccctcagcctaccagttggaacacttaatcggccacgtgggagccagagccttttaagtccatcatctggatacatgcccatgaaccagggtaatcttggggggtcttgccaggagtctgcagtttctgggagcagtgaacggtgcccccgtccagtctctctacacccaatgccacggggatgcctggcatcagagtcatcagaggggcatgtaacaggctctgaggctgagctccaggagaaagtgtcaatgtgtagaagccggagcaggagccggagcccacggccacgcggagatagcgcctaccattcccagcgccacagtctgctgactcctgttaccccactctccccacccgggttagaggaagaggatgtcaacggttatgtcatgccagatacacacctcaaaggtactccctcctcccgggaaggcaccctttcttcagtgggtctcagttctgtcctgggtactgaagaagaagatgaagatgaggagtatgaatacatgaaccggaggagaaggcacagtccacctcatccccctaggccaagttcccttgaggagctgggttatgagtacatggatgtggggtcagacctcagtgcctctctgggcagcacacagagttgcccactccaccctgtacccatcatgcccactgcaggcacaactccagatgaagactatgaatatatgaatcggcaacgagatggaggtggtcctgggggtgattatgcagccatgggggcctgcccagcatctgagcaagggtatgaagagatgagagcttttcaggggcctggacatcaggccccccatgtccattatgcccgcctaaaaactctacgtagcttagaggctacagactctgcctttgataaccctgattactggcatagcaggcttttccccaaggctaatgcccagagaacgtaactcctgctccctgtggcactcagggagcatttaatggcagctagtgcctttagagggtaccgtcttctccctattccctctctctcccaggtcccagccccttttccccagtcccagacaattccattcaatctttggaggcttttaaacattttgacacaaaattcttatggtatgtagccagctgtgcactttcttctctttcccaaccccaggaaaggttttccttattttgtgtgctttcccagtcccattcctcagcttcttcacaggcactcctggagatatgaaggattactctccatatcccttcctctcaggctcttgactacttggaactaggctcttatgtgtgcctttgtttcccatcagactgtcaagaagaggaaagggaggaaacctagcagaggaaagtgtaattttggtttatgactcttaaccccctagaaagacagaagcttaaaatctgtgaagaaagaggttaggagtagatattgattactatcataattcagcacttaactatgagccaggcatcatactaaacttcacctacattatctcacttagtcctttatcatccttaaaacaattctgtgacatacatattatctcattttacacaaagggaagtcgggcatggtggctcatgcctgtaatctcagcactttgggaggctgaggcagaaggattacctgaggcaaggagtttgagaccagcttagccaacatagtaagacccccatctc

SEQ ID NO: 229 - DNA, 815 bp, human
gcggcgttgtagttaagctcgtgtaacggcggcggtgtcggcagctgctgtagcgaagagagtttggcgcgatgtctcacaccattttgctggtacagcctaccaagaggccagaaggcagaacttatgctgactacgaatctgtgaatgaatgcatggaaggtgtttgtaaaatgtatgaagaacatctgaaaagaatgaatcccaacagtccctctatcacatatgacatcagtcagttgtttgatttcatcgatgatctggcagacctcagctgcctggtttaccgagctgatacccagacataccagccttataacaaagactggattaaagagaagatctacgtgctccttcgtcggcaggcccaacaggctgggaaataattgtgttggaagcactgggggggttggggtgggcttggaacacaggtgtgtacagcgtgctgtagtggaagttttgtatcatagtaatcctgtttccactttgttatactctagccaagattgactgtattagatgaaatgtgaggatcttgttcaatcggaaacccccgttacctcctctttttctttctctttcttttttttttttttacttaaacatttttatgatgatttagatggaagttgttcttcgtcacttaatgttggttccagtccttcaactgttcatatctactttataacattcacatactaacccttcttcaagatggggtggggggtggaaatgcagtttagccatgtcctcaagataaagtcttggtaaaaataaataaatgtcctttagttataaaaaaaaaaaaaaaaaaa

SEQ ID NO: 230 - DNA, 3653 bp, human
attgcaacacatgcagctgcctggagagagggagccggtgtcctacgtcagagccgccgccgccgcgagccgccgccggggaggagcagccgctgccgcccaggactgggcccttagggaggaggaggcgagaagatggcggacgaccccagtgctgccgacaggaacgtggagatctggaagatcaagaagctcattaagagcttggaggcggcccgcggcaatggcaccagcatgatatcattgatcattcctcccaaagaccagatttcacgagtggcaaaaatgttagcggatgagtttggaactgcatctaacattaagtcacgagtaaaccgcctttcagtcctgggagccattacatctgtacaacaaagactcaaactttataacaaagtacctccaaatggtctggttgtatactgtggaacaattgtaacagaagaaggaaaggaaaagaaagtcaacattgactttgaacctttcaaaccaattaatacgtcattgtatttgtgtgacaacaaattccatacagaggctcttacagcactactttcagatgatagcaagtttggattcattgtaatagatggtagtggtgcactttttggcacactccaaggaaacacaagagaagtcctgcacaaattcactgtggatctcccaaagaaacacggtagaggaggtcagtcagccttgcgttttgcccgtttaagaatggaaaagcgacataactatgttcggaaagtagcagagactgctgtgcagctgtttatttctggggacaaagtgaatgtggctggtctagttttagctggatccgctgactttaaaactgaactaagtcaatctgatatgtttgatcagaggttacaatcaaaagttttaaaattagttgatatatcctatggtggtgaaaatggattcaaccaagctattgagttatctactgaagtcctctccaacgtgaaattcattcaagagaagaaattaataggacgatactttgatgaaatcagccaggacacgggcaagtactgttttggcgttgaagatacactaaaggctttggaaatgggagctgtagaaattctaatagtctatgaaaatctggatataatgagatatgttcttcattgccaaggcacagaagaggagaaaattctctatctaactccagagcaagaaaaggataaatctcatttcacagacaaagagaccggacaggaacatgagcttatcgagagcatgcccctgttggaatggtttgctaacaactataaaaaatttggagctacgttggaaattgtcacagataaatcacaagaagggtctcagtttgtgaaaggatttggtggaattggaggtatcttgcggtaccgagtagatttccagggaatggaataccaaggaggagacgatgaattttttgaccttgatgactactaggtagtcgacatgggtccggcaaaacgtgcctcaccctccagcatccaacccaaggagcatacccatggtggaatccaaacagatccctgccttacaattggaacatttccagaacttaatccatgagcattggatattgaaaagaaaaccgaaacaaaaccagacccagccctacactttggtttgtcatggtgtcagcgcagcagcctacaactaagttcctaaacgccactttggactaatttaaaaaagaatcccagtttttacttttactggatggtgaaattggttgctcttgtattttatgaaaaaaaatgatttttttaaccttcatacatagaagcaaaaatactttaactgctgtaaaccttcaaaagttaatagaagtgagatcatactggtttgtttcttattttgattggagaaaaattaaattgctgcatttcgcagtgacccatttacatggcattctcagcttagactgcgtaagaagaaatatatgtggtgaaatgttggaaccatttctctcttggtctctgtttaatgttgaaagggtgagctaataggaggcactttcaacttcactccctcacgctaccccgtccccctccagactggcagtttcaaggatgcaaattgcattgcaaaatcaaactgactcatgaagcatttgggccagtgcactgtttacttccatctgtttgcagacacatttgtgcccggcgtttgggagccctttgtatcaatgttctgacaagggtccctataaccttaacctactcgaaaccggtttgggatggatatgatggggcttctgtgctattgctgggattgggagaaataaaacatgcaatttaagtggaagcgaagaaatttaaagaggattttattttgcttgggtcaatccttgttaaaagggaggtggatgtgtttccttgtgttggatggcatgagattatgtgaatgttttgatttattaaaatgaactgcaaggtttttcacaggaacgacagacatgtatgactgcatgtaattataaactcctgacctcctggtggggttggagcatctgtttcaaatgtgggacttacaagcacttctcacatgagaaattaggggcgggtgggaagggatgggacacagcttctggcaccatggatttaagaccatgttggatccaaaagttggcctgaaaccctgaagctgatgcttcacagctgggctgtaagtcagacttgaacccagctgatatgcaaggtcatggcgtgccagggtggtgacagttgaacaaagtgtatagtacgtgcccagtggtagcgatggaaaaaagtataccaaatggactttgaaggaccaaaggttttaaaagtcaattggtatcacctccacactgactagggtagtggggtgcatttggttttcaaattgggtacttttaacactttagtgcctgactgctgttctttactgacttgattcagtcactcgtagctttattggtctgaaccagctccttgttcccaggttacagacctgcctatcgttccaataatcctgtttcacttgaatgaagggagtatgtcttaaatgtaaagtttctggttctcacactgtactctgaggtccaaatactgtctgtcaatgtgtaacctgatgtctcaaccccctgtgagaagagtccattatttggtgttcaccaacgtgggagacttcaccggaacaggcttttttgctttgggctctgctatttgtttgcagaacacccaagagcgagcaaacacgctctcttcacagcagtaccttagggttttgccattgtaaatgggtctgatgtgatatgacaagaccagagaaattggatgtaaatttacatttttgaatatgcttgttgtttcacatgatacatttagggtatgcagctccttttgtagtttttatttttactatttaagtttggaaatgatgccaaatttttgtatttctttaatcaatgtgttctcttcggtgatatatattgcattatatattgatgtgtgtatcaatatatattgatatgtattacacttacacatacaaacacatataagagggggtgaaaaccgtagcctttgcattctctatagcctctgcagagagatactaagcagcaaaatcttggtgttgtgatgtacagaaatggagaagagtattaaaccatatttaag

SEQ ID NO: 231 - DNA, 1266 bp, human
atgttccgagcggcggctccggggcagctccggcgggcggcctcattgctacgatttcagagtaccctggtaatagctgagcatgcaaatgattccctagcacccattactttaaataccattactgcagccacacgccttggaggtgaagtgtcctgcttagtagctggaaccaaatgtgacaaggtggcacaagatctctgtaaagtagcaggcatagcaaaagttctggtggctcagcatgatgtgtacaaaggcctacttccagaggaactgacaccattgattttggcaactcagaagcagttcaattacacacacatctgtgctggagcatctgccttcggaaagaaccttttgcccagagtagcagccaaacttgaggttgccccgatttctgacatcattgcaatcaagtcacctgacacatttgtgagaactatttatgcaggaaatgctctatgtacagtgaagtgtgatgagaaagtgaaagtgttttctgtccgtggaacatcctttgatgctgcagcaacaagtggcggtagtgccagttcagaaaaggcatcaagtacttcaccagtggaaatatcagagtggcttgaccagaaattaacaaaaagtgatcgaccagagctaacaggtgccaaagtggtggtatctggtggtcgaggcttgaagagtggagagaactttaagttgttatatgacttggcagatcaactacatgctgcagttggtgcttcccgtgctgctgttgatgctggctttgttcccaatgacatgcaagttggacagacgggaaaaatagtagcaccagaactttatattgctgttggaatatctggagccatccaacatttagctgggatgaaagacagcaagacaattgtggcaattaataaagacccagaagctccaattttccaagtggcagattatggaatagttgcagatttatttaaggtagttcctgaaatgactgagatattgaagaaaaaatgaatcaggatcatgccttaaaaagaaaacttttgttaaagtattccactgaaatcacagatatttgtgggtattataacaatcattggaaagcatggagagctacatttcataatttgagggaaaatttctaacagatgccagaatgcttgtttatgggattgctgtgtttccttttaattatttgtggttccaaacaattattgtttgaacttttttaattctgtactaaaatctataataaagcttttccacagctttaaaact

SEQ ID NO: 232 - DNA, 852 bp, human
caccctgtaagtggctgcggcgggaagatggcggagctgcgcgtgctcgtagctgtcaagagggtcatcgactacgccgtgaagatccgagtgaagcctgacaggaccggtgtggtcacggatggtgtgaagcactccatgaaccccttctgtgagatcgcggtggaggaggctgtgcggctcaaggagaagaagctggtgaaggaggtcatcgccgtcagctgtgggcctgcacagtgccaggagacgattcgtaccgccctggccatgggtgcagaccgaggtatccacgtggaggtgcccccagcagaagcagaacgcttgggtcccctgcaggtggctcgggtcctggccaagctggcagagaaggagaaggtggacctggtgctgctgggcaaacaggccatcgatgatgactgtaaccagacagggcagatgacagctggatttcttgactggccacagggcacattcgcctcccaggtgacgctggagggggacaagttgaaagtggagcgggagatcgatgggggcctggagaccctgcgcctgaagctgccagctgtggtgacagctgacctgaggctcaacgagccccgctacgccacgctgcccaacatcatgaaagccaagaagaagaagatcgaggtgatcaagcctggggacctgggtgtggacctgacctccaagctctctgtgatcagtgtggaggacccgccccagcgcacggccggcgtcaaggtggagaccactgaggacctggtggccaagctgaaggagattgggcggatttgagcccctcccagagatggcaataaaactgactctcaacatcaaaaaaaaaaaaaaaaa

SEQ ID NO: 233 - DNA, 1601 bp, human
agaggcggtgcggcacagaggagcgctcgcttcacaaggtgaccctagctcccaccgccaccgccgcggtcgcggtccagaccgcgctccagcagctccgcgccctcccaggcacccggcctttctttctccctcttgcaaccaagatccgtccggccgctggagacccagggagccggggttaggaactcacttggggctttcccctcccccaccggagagccccgggatggagagccgaaaggacatggttgtgtttctggatgggggtcagcttggcactctggttggcaagagagtctcaaatttgtccgaagccgtgggcagcccgctgccggagccgcccgagaaaatggtgccccgtggttgcctgagccctcgggccgtccctccggccacccgggagcgcggcgggggaggcccggaggaggagccggtagatggactcgcaggcagcgcggcggggccgggcgccgagccccaggtagctggggcggccatgctcggcccaggacccccggccccctcagtcgacagcctctccggacaggggcaacccagtagctcggacaccgagtcggatttctatgaagaaatcgaggtgagctgcaccccggactgcgccaccgggaacgccgagtaccagcacagcaaagggtccggctccgaggcgctggtcggcagtccgaacggagggagcgagacccccaagagcaacggcggcagtggtgggggcggctcgcaaggcaccctggcgtgcagcgccagtgaccagatgcgtcgttaccgcaccgccttcacccgagagcagattgcgcggctggagaaggaattctaccgggagaactacgtatccaggccgcggagatgtgagctggcggccgccctaaacctgccggaaaccaccatcaaggtgtggttccagaaccggcgcatgaaggacaagcggcagcgcctggccatgacgtggccgcacccggcggaccccgccttctacacttacatgatgagccatgcggcggccgcgggcggcctgccctaccccttcccatcgcacctgcccctgccctactactcgccggtgggcctgggcgccgcatccgccgcctccgccgccgcctcgcccttcagcggctcgctgcgcccgctcgacacgttccgcgtgctgtcgcagccctacccgcggcccgaactgctgtgcgccttccgccacccgccgctctaccccgggcccgcgcacggactgggcgcctctgccggcggcccctgctcctgcctcgcctgtcacagcggcccggccaacgggctggcgccccgggctgccgccgcctcggacttcacctgtgcctccacctcccgctcggactccttcctcaccttcgcgccctcggtgctcagcaaggcctcctccgtcgcgctggaccagagggaggaggtgcccctcactagataaggggccgccggctggctgccggctccatgacgcccgtggggtcaccccccggccccgggactcagccagcctcgctcctcgctcctcgctcctcgcccctaggacgccaagggggaaaggagagggcggaaaaggaccagcgggatcc

SEQ ID NO: 234 - DNA, 1447 bp, human
agtcctgctctccgcacgccaccttaggcccgcagccgtgccgggtgctcttcagcatgtccttcatcccggtggccgaggattccgacttccccatccacaacctgccctacggcgtcttctcgaccagaggcgacccaagaccgaggataggtgtggccattggcgaccagatcctggacctcagcatcatcaagcacctctttactggtcctgtcctctccaaacaccaggatgtcttcaatcagcctacactcaacagcttcatgggcctgggtcaggctgcctggaaggaggcgagagtgttcttgcagaacttgctgtctgtgagccaagccaggctcagagatgacaccgaacttcggaagtgtgcattcatctcccaggcttctgccacgatgcaccttccagccaccataggagactacacagacttctattcctctcggcagcatgctaccaacgtcggaatcatgttcagggacaaggagaatgcgttgatgccaaattggctgcacttaccagtgggctaccatggccgtgcctcctctgtcgtggtgtctggcaccccaatccgaaggcccatgggacagatgaaacctgatgactctaagcctcccgtatatggtgcctgcaagctcttggacatggagctggaaatggctttttttgtaggccctggaaacagattgggagagccgatccccatttccaaggcccatgagcacatttttggaatggtccttatgaacgactggagtgcacgagacattcagaagtgggagtatgtccctctcgggccattccttgggaagagttttgggaccactgtctctccgtgggtggtgcccatggatgctctcatgccctttgctgtgcccaacccgaagcaggaccccaggcccctgccgtatctgtgccatgacgagccctacacatttgacatcaacctctctgttaacctgaaaggagaaggaatgagccaggcggctaccatatgcaagtccaattttaagtacatgtactggacgatgctgcagcagctcactcaccactctgtcaacggctgcaacctgcggccgggggacctcctggcttctgggaccatcagcgggccggagccagaaaacttcggctccatgttggaactgtcgtggaagggaacgaagcccatagacctggggaatggtcagaccaggaagtttctgctggacggggatgaagtcatcataacagggtactgccagggggatggttaccgcatcggctttggccagtgtgctggaaaagtgctgcctgctctcctgccatcatgagattttctctgctcttctggaaacaaagggctcaagcacccctttcaaccctgtgactggggtcctccctcgggctgtaggcctggtccgccattcagtgacaaataaagccattgtgctctgaggcctgc

SEQ ID NO: 235 - DNA, 2788 bp, human
aagaacgcccccaaaatctgtttctaattttacagaaatcttttgaaacttggcacggtattcaaaagtccgtggaaagaaaaaaaccttgtcctggcttcagcttccaactacaaagacagacttggtccttttcaacggttttcacagatccagtgacccacgctctgaagacagaattagctaactttcaaaaacatctggaaaaatgaagacttgggtaaaaatcgtatttggagttgccacctctgctgtgcttgccttattggtgatgtgcattgtcttacgcccttcaagagttcataactctgaagaaaatacaatgagagcactcacactgaaggatattttaaatggaacattttcttataaaacattttttccaaactggatttcaggacaagaatatcttcatcaatctgcagataacaatatagtactttataatattgaaacaggacaatcatataccattttgagtaatagaaccatgaaaagtgtgaatgcttcaaattacggcttatcacctgatcggcaatttgtatatctagaaagtgattattcaaagctttggagatactcttacacagcaacatattacatctatgaccttagcaatggagaatttgtaagaggaaatgagcttcctcgtccaattcagtatttatgctggtcgcctgttgggagtaaattagcatatgtctatcaaaacaatatctatttgaaacaaagaccaggagatccaccttttcaaataacatttaatggaagagaaaataaaatatttaatggaatcccagactgggtttatgaagaggaaatgcttgctacaaaatatgctctctggtggtctcctaatggaaaatttttggcatatgcggaatttaatgatacggatataccagttattgcctattcctattatggcgatgaacaatatcctagaacaataaatattccatacccaaaggctggagctaagaatcccgttgttcggatatttattatcgataccacttaccctgcgtatgtaggtccccaggaagtgcctgttccagcaatgatagcctcaagtgattattatttcagttggctcacgtgggttactgatgaacgagtatgtttgcagtggctaaaaagagtccagaatgtttcggtcctgtctatatgtgacttcagggaagactggcagacatgggattgtccaaagacccaggagcatatagaagaaagcagaactggatgggctggtggattctttgtttcaacaccagttttcagctatgatgccatttcgtactacaaaatatttagtgacaaggatggctacaaacatattcactatatcaaagacactgtggaaaatgctattcaaattacaagtggcaagtgggaggccataaatatattcagagtaacacaggattcactgttttattctagcaatgaatttgaagaataccctggaagaagaaacatctacagaattagcattggaagctatcctccaagcaagaagtgtgttacttgccatctaaggaaagaaaggtgccaatattacacagcaagtttcagcgactacgccaagtactatgcacttgtctgctacggcccaggcatccccatttccacccttcatgatggacgcactgatcaagaaattaaaatcctggaagaaaacaaggaattggaaaatgctttgaaaaatatccagctgcctaaagaggaaattaagaaacttgaagtagatgaaattactttatggtacaagatgattcttcctcctcaatttgacagatcaaagaagtatcccttgctaattcaagtgtatggtggtccctgcagtcagagtgtaaggtctgtatttgctgttaattggatatcttatcttgcaagtaaggaagggatggtcattgccttggtggatggtcgaggaacagctttccaaggtgacaaactcctctatgcagtgtatcgaaagctgggtgtttatgaagttgaagaccagattacagctgtcagaaaattcatagaaatgggtttcattgatgaaaaaagaatagccatatggggctggtcctatggaggatacgtttcatcactggcccttgcatctggaactggtcttttcaaatgtggtatagcagtggctccagtctccagctgggaatattacgcgtctgtctacacagagagattcatgggtctcccaacaaaggatgataatcttgagcactataagaattcaactgtgatggcaagagcagaatatttcagaaatgtagactatcttctcatccacggaacagcagatgataatgtgcactttcaaaactcagcacagattgctaaagctctggttaatgcacaagtggatttccaggcaatgtggtactctgaccagaaccacggcttatccggcctgtccacgaaccacttatacacccacatgacccacttcctaaagcagtgtttctctttgtcagactaaaaacgatgcagatgcaagcctgtatcagaatctgaaaaccttatataaacccctcagacagtttgcttattttattttttatgttgtaaaatgctagtataaacaaacaaattaatgttgttctaaaggctgttaaaaaaaagatgaggactcagaagttcaagctaaatattgtttacattttctggtactctgtgaaagaagagaaaagggagtcatgcattttgctttggacacagtgttttatcacctgttcatttgaagaaaaataataaagtcagaagttcaaaaaaaaaa

SEQ ID NO: 236 - DNA, 8481 bp, human
gagagacggcagcggccccggcctccctctccgccgcgcttcagcctcccgctccgccgcgctccagcctcgctctccgccgcccgcaccgccgcccgcgccctcaccagagcagccatggaggaggtggtgattgccggcatgtccgggaagctgccagagtcggagaacttgcaggagttctgggacaacctcatcggcggtgtggacatggtcacggacgatgaccgtcgctggaaggcggggctctacggcctgccccggcggtccggcaagctgaaggacctgtctaggtttgatgcctccttcttcggagtccaccccaagcaggcacacacgatggaccctcagctgcggctgctgctggaagtcacctatgaagccatcgtggacggaggcatcaacccagattcactccgaggaacacacactggcgtctgggtgggcgtgagcggctctgagacctcggaggccctgagccgagaccccgagacactcgtgggctacagcatggtgggctgccagcgagcgatgatggccaaccggctctccttcttcttcgacttcagagggcccagcatcgcactggacacagcctgctcctccagcctgatggccctgcagaacgcctaccaggccatccacagcgggcagtgccctgccgccatcgtggggggcatcaatgtcctgctgaagcccaacacctccgtgcagttcttgaggctggggatgctcagccccgagggcacctgcaaggccttcgacacagcggggaatgggtactgccgctcggagggtgtggtggccgtcctgctgaccaagaagtccctggcccggcgggtgtacgccaccatcctgaacgccggcaccaatacagatggcttcaaggagcaaggcgtgaccttcccctcaggggatatccaggagcagctcatccgctcgttgtaccagtcggccggagtggcccctgagtcatttgaatacatcgaagcccacggcacaggcaccaaggtgggcgacccccaggagctgaatggcatcacccgagccctgtgcgccacccgccaggagccgctgctcatcggctccaccaagtccaacatggggcacccggagccagcctcggggctggcagccctggccaaggtgctgctgtccctggagcacgggctctgggcccccaacctgcacttccatagccccaaccctgagatcccagcgctgttggatgggcggctgcaggtggtggaccagcccctgcccgtccgtggcggcaacgtgggcatcaactcctttggcttcgggggctccaacgtgcacatcatcctgaggcccaacacgcagccgccccccgcacccgccccacatgccaccctgccccgtctgctgcgggccagcggacgcacccctgaggccgtgcagaagctgctggagcagggcctccggcacagccaggacctggctttcctgagcatgctgaacgacatcgcggctgtccccgccaccgccatgcccttccgtggctacgctgtgctgggtggtgagcgcggtggcccagaggtgcagcaggtgcccgctggcgagcgcccgctctggttcatctgctctgggatgggcacacagtggcgcgggatggggctgagcctcatgcgcctggaccgcttccgagattccatcctacgctccgatgaggctgtgaagccattcggcctgaaggtgtcacagctgctgctgagcacagacgagagcacctttgatgacatcgtccattcgtttgtgagcctgactgccatccagataggcctcatagacctgctgagctgcatggggctgaggccagatggcatcgtcggccactccctgggggaggtggcctgtggctacgccgacggctgcctgtcccaggaggaggccgtcctcgctgcctactggaggggacagtgcatcaaagaagcccatctcccgccgggcgccatggcagccgtgggcttgtcctgggaggagtgtaaacagcgctgccccccgggcgtggtgcccgcctgccacaactccaaggacacagtcaccatctcgggacctcaggccccggtgtttgagttcgtggagcagctgaggaaggagggtgtgtttgccaaggaggtgcggaccggcggtatggccttccactcctacttcatggaggccatcgcacccccactgctgcaggagctcaagaaggtgatccgggagccgaagccacgttcagcccgctggctcagcacctctatccccgaggcccagtggcacagcagcctggcacgcacgtcctccgccgagtacaatgtcaacaacctggtgagccctgtgctgttccaggaggccctgtggcacgtgcctgagcacgcggtggtgctggagatcgcgccccacgccctgctgcaggctgtcctgaagcgtggcctgaagccgagctgcaccatcatccccctgatgaagaaggatcacagggacaacctggagttcttcctggccggcatcggcaggctgcacctctcaggcatcgacgccaaccccaatgccttgttcccacctgtggagttcccagctccccgaggaactcccctcatctccccactcatcaagtgggaccacagcctggcctgggacgtgccggccgccgaggacttccccaacggttcaggttccccctcagccgccatctacaacatcgacaccagctccgagtctcctgaccactacctggtggaccacaccctcgacggtcgcgtcctcttccccgccactggctacctgagcatagtgtggaagacgctggcccgcgccctgggcctgggcgtcgagcagctgcctgtggtgtttgaggatgtggtgctgcaccaggccaccatcctgcccaagactgggacagtgtccctggaggtacggctcctggaggcctcccgtgccttcgaggtgtcagagaacggcaacctggtagtgagtgggaaggtgtaccagtgggatgaccctgaccccaggctcttcgaccacccggaaagccccacccccaaccccacggagcccctcttcctggcccaggctgaagtttacaaggagctgcgtctgcgtggctacgactacggccctcatttccagggcatcctggaggccagcctggaaggtgactcggggaggctgctgtggaaggataactgggtgagcttcatggacaccatgctgcagatgtccatcctgggctcggccaagcacggcctgtacctgcccacccgtgtcaccgccatccacatcgaccctgccacccacaggcagaagctgtacacactgcaggacaaggcccaagtggctgacgtggtggtgagcaggtggctgagggtcacagtggccggaggcgtccacatctccgggctccacactgagtcggccccgcggcggcagcaggagcagcaggtgcccatcctggagaagttttgcttcactccccacacggaggaggggtgcctgtctgagcgcgctgccctgcaggaggagctgcaactgtgcaaggggctggtgcaggcactgcagaccaaggtgacccagcaggggctgaagatggtggtgcccggactggatggggcccagatcccccgggacccctcacagcaggaactgccccggctgttgtcggctgcctgcaggcttcagctcaacgggaacctgcagctggagctggcgcaggtgctggcccaggagaggcccaagctgccagaggaccctctgctcagcggcctcctggactccccggcactcaaggcctgcctggacactgccgtggagaacatgcccagcctgaagatgaaggtggtggaggtgctggctggccacggtcacctgtattcccgcatcccaggcctgctcagcccccatcccctgctgcagctgagctacacggccaccgaccgccacccccaggccctggaggctgcccaggccgagctgcagcagcacgacgttgcccagggccagtgggatcccgcagaccctgcccccagcgccctgggcagcgccgacctcctggtgtgcaactgtgctgtggctgccctcggggacccggcctcagctctcagcaacatggtggctgccctgagagaagggggctttctgctcctgcacacactgctccgggggcaccccctcggggacatcgtggccttcctcacctccactgagccgcagtatggccagggcatcctgagccaggacgcgtgggagagcctcttctccagggtgtcgctgcgcctggtgggcctgaagaagtccttctacggctccacgctcttcctgtgccgccggcccaccccgcaggacagccccatcttcctgccggtggacgataccagcttccgctgggtggagtctctgaagggcatcctggctgacgaagactcttcccggcctgtgtggctgaaggccatcaactgtgccacctcgggcgtggtgggcttggtgaactgtctccgccgagagcccggcgggaaccgcctccggtgtgtgctgctctccaacctcagcagcacctcccacgtcccggaggtggacccgggctccgcagaactgcagaaggtgttgcagggagacctggtgatgaacgtctaccgcgacggggcctggggggctttccgccacttcctgctggaggaggacaagcctgaggagccgacggcacatgcctttgtgagcaccctcacccggggggacctgtcctccatccgctgggtctgctcctcgctgcgccatgcccagcccacctgccctggcgcccagctctgcacggtctactacgcctccctcaacttccgcgacatcatgctggccactggcaagctgtcccctgatgccatcccagggaagtggacctcccaggacagcctgctaggtatggagttctcgggccgagacgccagcggcaagcgtgtgatgggactggtgcctgccaagggcctggccacctctgtcctgctgtcaccggacttcctctgggatgtgccttccaactggacgctggaggaggcggcctcggtgcctgtcgtctacagcacggcctactacgcgctggtggtgcgtgggcgggtgcgccccggggagacgctgctcatccactcgggctcgggcggcgtgggccaggccgccatcgccatcgccctcagtctgggctgccgcgtcttcaccaccgtggggtcggctgagaagcgggcgtacctccaggccaggttcccccagctcgacagcaccagcttcgccaactcccgggacacatccttcgagcagcatgtgctgtggcacacgggcgggaagggcgttgacctggtcttgaactccttggcggaagagaagctgcaggccagcgtgaggtgcttggctacgcacggtcgcttcctggaaattggcaaattcgacctttctcagaaccacccgctcggcatggctatcttcctgaagaacgtgacattccacggggtcctactggatgcgttcttcaacgagagcagtgctgactggcgggaggtgtgggcgcttgtgcaggccggcatccgggatggggtggtacggcccctcaagtgcacggtgttccatggggcccaggtggaggacgccttccgctacatggcccaagggaagcacattggcaaagtcgtcgtgcaggtgcttgcggaggagccggaggcagtgctgaagggggccaaacccaagctgatgtcggccatctccaagaccttctgcccggcccacaagagctacatcatcgctggtggtctgggtggcttcggcctggagttggcgcagtggctgatacagcgtggggtgcagaagctcgtgttgacttctcgctccgggatccggacaggctaccaggccaagcaggtccgccggtggaggcgccagggcgtacaggtgcaggtgtccaccagcaacatcagctcactggagggggcccggggcctcattgccgaggcggcgcagcttgggcccgtgggcggcgtcttcaacctggccgtggtcttgagagatggcttgctggagaaccagaccccagagttcttccaggacgtctgcaagcccaagtacagcggcaccctgaacctggacagggtgacccgagaggcgtgccctgagctggactactttgtggtcttctcctctgtgagctgcgggcgtggcaatgcgggacagagcaactacggctttgccaattccgccatggagcgtatctgtgagaaacgccggcacgaaggcctcccaggcctggccgtgcagtggggcgccatcggcgacgtgggcattttggtggagacgatgagcaccaacgacacgatcgtcagtggcacgctgccccagcgcatggcgtcctgcctggaggtgctggacctcttcctgaaccagccccacatggtcctgagcagctttgtgctggctgagaaggctgcggcctatagggacagggacagccagcgggacctggtggaggccgtggcacacatcctgggcatccgcgacttggctgctgtcaacctggacagctcactggcggacctgggcctggactcgctcatgagcgtggaggtgcgccagacgctggagcgtgagctcaacctggtgctgtccgtgcgcgaggtgcggcaactcacgctccggaaactgcaggagctgtcctcaaaggcggatgaggccagcgagctggcatgccccacgcccaaggaggatggtctggcccagcagcagactcagctgaacctgcgctccctgctggtgaacccggagggccccaccctgatgcggctcaactccgtgcagagctcggagcggcccctgttcctggtgcacccaatcgagggctccaccaccgtgttccacagcctggcctcccggctcagcatccccacctatggcctgcagtgcacccgagctgcgccccttgacagcatccacagcctggctgcctactacatcgactgcatcaggcaggtgcagcccgagggcccctaccgcgtggccggctactcctacggggcctgcgtggcctttgaaatgtgctcccagctgcaggcccagcagagcccagcccccacccacaacagcctcttcctgttcgacggctcgcccacctacgtactggcctacacccagagctaccgggcaaagctgaccccaggctgtgaggctgaggctgagacggaggccatatgcttcttcgtgcagcagttcacggacatggagcacaacagggtgctggaggcgctgctgccgctgaagggcctagaggagcgtgtggcagccgccgtggacctgatcatcaagagccaccagggcctggaccgccaggagctgagctttgcggcccggtccttctactacaagctgcgtgccgctgagcagtacacacccaaggccaagtaccatggcaacgtgatgctactgcgcgccaagacgggtggcgcctacggcgaggacctgggcgcggactacaacctctcccaggtatgcgacgggaaagtatccgtccacgtcatcgagggtgaccaccgcacgctgctggagggcagcggcctggagtccatcatcagcatcatccacagctccctggctgagccacgcgtgagcgtgcgggagggctaggcccgtgcccccgcctgccaccggaggtcactccaccatccccaccccaccccaccccacccccgccatgcaacgggattgaagggtcctgccggtgggaccctgtccggcccagtgccactgccccccgaggctgctagatgtaggtgttaggcatgtcccacccacccgccgcctcccacggcacctcggggacaccagagctgccgacttggagactcctggtctgtgaagagccggtggtgcccgtgcccgcaggaactgggctgggcctcgtgcgcccgtggggtctgcgcttggtctttctgtgcttggatttgcatatttattgcattgctggtagagacccccaggcctgtccaccctgccaagactcctcaggcagcgtgtgggtcccgcactctgcccccatttccccgatgtcccctgcgggcgcgggcagccacccaagcctgctggctgcggccccctctcggccaggcattggctcagcccgctgagtggggggtcgtgggccagtccccgaggagctgggcccctgcacaggcacacagggcccggccacacccagcggccccccgcacagccacccgtggggtgctgcccttatgcccggcgccgggcaccaactccatgtttggtgtttgtctgtgtttgtttttcaagaaatgattcaaattgctgcttggattttgaaatttactgtaactgtcagtgtacacgtctggaccccgtttcatttttacaccaatttggtaaaaatgctgctctcagcctcccacaattaaaccgcatgtgatctccaaaaaaaaaaaaaaaaaaaaaaaa

SEQ ID NO: 237 - DNA, 574 bp, human
cagtgacgtgacacgcagcccacggtctgtactgacgcgccctcgcttcttcctctttctcgactccatcttcgcggtagctgggaccgccgttcagtcgccaatatgcagctctttgtccgcgcccaggagctacacaccttcgaggtgaccggccaggaaacggtcgcccagatcaaggctcatgtagcctcactggagggcattgccccggaagatcaagtcgtgctcctggcaggcgcgcccctggaggatgaggccactctgggccagtgcggggtggaggccctgactaccctggaagtagcaggccgcatgcttggaggtaaagtccatggttccctggcccgtgctggaaaagtgagaggtcagactcctaaggtggccaaacaggagaagaagaagaagaagacaggtcgggctaagcggcggatgcagtacaaccggcgctttgtcaacgttgtgcccacctttggcaagaagaagggccccaatgccaactcttaagtcttttgtaattctggctttctctaataaaaaagccacttagttcagtcaaaaaaaaaaaaaaaaa

SEQ ID NO: 238 - DNA, 1527 bp, human
ggcctggcccagttgcaccacgagcgctgcggacactcggggcggcagtcggtctgtcagtcctcccgccaggtcccgcggcccgcacctgccgcccgcacctgcagctccgcacctgcggccagtgcctactgccctctcttgccgcccgcacctgcagccccgcacctgccgcttgcacctgcagccccgcgctctacccggttcaagcatggctgaccaggcgcccttcgacacggacgtcaacaccctgacccgcttcgtcatggaggagggcaggaaggcccgcggcacgggcgagttgacccagctgctcaactcgctctgcacagcagtcaaagccatctcttcggcggtgcgcaaggcgggcatcgcgcacctctatggcattgctggttctaccaacgtgacaggtgatcaagttaagaagctggacgtcctctccaacgacctggttatgaacatgttaaagtcatcctttgccacgtgtgttctcgtgtcagaagaagataaacacgccatcatagtggaaccggagaaaaggggtaaatatgtggtctgttttgatccccttgatggatcttccaacatcgattgccttgtgtccgttggaaccatttttggcatctatagaaagaaatcaactgatgagccttctgagaaggatgctctgcaaccaggccggaacctggtggcagccggctacgcactgtatggcagtgccaccatgctggtccttgccatggactgtggggtcaactgcttcatgctggacccggccatcggggagttcattttggtggacaaggatgtgaagataaaaaagaaaggtaaaatctacagccttaacgagggctacgccagggactttgaccctgccgtcactgagtacatccagaggaagaagttccccccagataattcagctccttatggggcccggtatgtgggctccatggtggctgatgttcatcgcactctggtctacggagggatatttctgtaccccgctaacaagaagagccccaatggaaagctgagactgctgtacgaatgcaaccccatggcctacgtcatggagaaggctgggggaatggccaccactgggaaggaggccgtgttagacgtcattcccacagacattcaccagagggcgccggtgatcttgggatcccccgacgacgtgctcgagttcctgaaggtgtatgagaagcactctgcccagtgagcacctgccctgcctgcatccggagaattgcctctacctggaccttttgtctcacacagcagtaccctgacctgctgtgcaccttacattcctagagagcagaaataaaaagcatgactatttccaccatcaaatgctgtagaatgcttggcactccctaaccaaatgctgtctccataatgccactggtgttaagatatattttgagtggatggaggagaaataaacttattcctccttaaaaaaaaaaaaaaaaaaaaaaaaaaaaaaaaaaaaaaaaaaaaaaaaaaaaaaaaaaa

SEQ ID NO: 239 - DNA, 3236 bp, human
gaccgggcggcgtgggcgtgagaggcggggcggggccgcgctctgcttgccaatgtctttataggtcacccggaaggcacgcggaacctcggcgcggtgcttccagcagggtctctccgccactccagccccgcgcccctcgccgcggccctcgggcgtctgcgccgcagctgccgcccccgcctctttggagtctctcgcggcctcaaagcgcggcctgcgtcgcttccggcagttcccgaccgcgggcgatggctgccgctgggggcgcccggctgctgcgcgccgcttctgctgtcctcggcggcccggccggccggtggctgcaccacgctgggtcccgcgctggatccagcggcctgctgaggaaccgggggccgggcgggagcgcggaggcgagccggtcgctgagcgtgtcggcgcgggcccggagcagctcagaagataaaataacagtccactttataaaccgtgatggtgaaacattaacaaccaaaggaaaagttggtgattctctgctagatgttgtggttgaaaataatctagatattgatggctttggtgcatgtgagggaaccctggcttgttcaacctgtcacctcatctttgaagatcacatatatgagaagttagatgcaatcactgatgaggagaatgacatgctcgatctggcatatggactaacagacagatcacggttgggctgccaaatctgtttgacaaaatctatggacaatatgactgttcgagtgcctgaaacagtggctgatgccagacaatccattgatgtgggcaagacctcctgaactagaacaaataggaatattttcatggaattttacctatttttataattattatttcttaaagtgattaaatgagaacatggatgagtggacttcatattatgactagctttactattttaattcaccttgcataactactgaattttgtcattcttgaaagtatgcaatttttattttggttatattacaaaaatgtcaatcaaatattaaaaaatagttaatgtgatagaaaaaccttacatatttttttcttatgtttgtttagcgactttagcaaaatgttttcatataatctcatctgtttacctagaagataggttaaggaaatatattattattcctgtttgatgtgggtgaaggcagagatctaacctggcttgtttagggccataccactaattagaaaatctgtgctagaacctgtgtcttattcctataagctatgtgttcagactgaaactggagaaattatgactattttatttatagtagtagttaaatctgaatgtgtatggacaaaaatatttaattgctcagtaaactgcttaacttcaaagatagttattgaccttataaataaatatttcaaaattttgattcggaagactaagtctggacgtagacattataatgctatcaaagaagtttgatctctgttttgactaaactagaggaaaaatgattggatgtgtttattcttttctaagcagaatggtttaactttgtactctttgaaaaataatgctgatttataaatctctgcctataacagaatggaaaccttatgaatgaattgtgtttctctgtcctgagctggagaagggaatgagcaggctgacacgttgcacagccccaggtggcgccattctctcacgcaaggatggggctgcagggtgagcagcgtgggctgcagtgtgtcagtcccaggagtgagggagtggcaagcaccacagattaccacgtatgtgtggaagacattcgtactcttatctttactataaataaattcataaaagttaacaaaggggtacacagtatggtctttggaaatataataaaacatcaactaacttggactaattgtgaggaagagcagaacaaattagtagaaagaggttataagacaattgagttagcttcatgtgtattattgcagcttgatcatttatataaatatttgtctagtacaatgcttgacatacagcattgtgttatgcccattggggacacagaggtgaacaagacaaggaatgccatcagggaattcaccttttattaggaaaatataaaatatgtatgtatgtgcagataatttgcttgaactaaactgactagttctgctaaataagattttaaactaattcatatgtaaaaagtgattaggaagaacttgaagtatcatttgatgcttaataactattgagtagttttttttttttttttttggtggggggagcgggggacagggtcttactctgtcactcaggccagagtacaatagtatgatctcggctcactgcaacttctgcctcccagtttcaagggattctcgtgcctcagcctcccaggtagctggtactacaggcacggaccaccacgcctggctaatttttgtattttttctagggacagggttttaccacgttgcccaggctggtcttgaacttttgagctcgagtgatccacccacctcagcctcccaaaatgctgggattacagatgtgagccaccgtgcttggccataactattgaatgctttctatgtggagagtgcttgtcttaattttctgttgctataatagaataacacagactgggtaatttataaagaaaagagatttatttggatcatggttctggaggctgggaggtccaagagcatggtaccagcatctgcttggcatctggtgacagctttcttgctgcatcattacatggtggaagggcaagagaatgcgagtgagagcaagagggcaaaatgattatccttttatcaggagcccacttctgacataactaacccacacctgagataacggcattaatccattcatgaggtctctgctcttaaaggagatcacctcttaaaggacccacctttcaatgccattacactggcaatttaatttcaagatgagttttggaggggacattcaaaccatagcagtgctataattttaaagtacttcaaagccaatttattctcttaattagcttcattattcttgtctttgtgtgtggattacctaaactctccttccagagctactttaatgattatattcaaccaaagcactctaaaatttagagtataaattgtcttatatttcaaattagaaaagttcaaatgaagtttaattgtgttattttataaaaccttctaaaattattaaatggaggatataatctaaaaaaaaaaaaaaaaaa

SEQ ID NO: 240 - DNA, 2950 bp, human
gtcacaccctcgaataatgacgcatacctatcctactgttactgatcacctagtaataatcttgtagttcacattactcatttttcaccaaattcttttggtgaaggacgcttcagaaacggccatcactgaagagcagacccgtttgggttctccacgcattctagactcccgaagagctcatgttttttggctagacctatgaccattttcgctagacttcactgcacgttttctcaagtatcttctttgtccctaatgtgtgacacctcatcatggacacgctactttagctaaggcatgaccagcaatgaacagtagtaagatatgtgctgattagaaggctcacttgtgcagtgtggaggataaccagtgccttacaaaatggggtttgggagtgacctgaagaattcacatgaagcagtgttaaaattgcaagactgggaattacggttactggaaacagtaaagaaatttatggccctgagaataaaaagtgataaagaatatgcatctactttacagaacctttgtaatcaagttgataaggaaagtactgtccaaatgaattatgtcagcaacgtatccaagtcttggctacttatgattcagcagacagaacaacttagtaggataatgaagacacatgcagaggacttgaactctggacctttacacaggctcaccatgatgattaaggacaagcagcaggtgaagaaaagttacataggtgttcatcagcagatagaggcagagatgatcaaggttaccaaaacagaattggagaagttaaaatgcagctatagacaattaataaaagaaatgaattctgccaaagagaaatataaagaagctttagctaaagggaaggaaactgaaaaggccaaggaacgatacgacaaagccacaatgaaacttcatatgttgcacaatcagtatgtattggcgttgaaaggggcacagctccatcagaatcagtattatgatatcacacttcccctgcttctggactccttacaaaagatgcaagaagaaatgataaaagcactcaaaggtatatttgatgaatacagccagataaccagtcttgtcacagaggaaatagtgaatgtccataaagagattcaaatgtcggttgaacagatagatcctagtacagaatacaataatttcatagatgttcacagaacaacggctgctaaagaacaagaaatagagtttgatacttccttactggaagaaaatgaaaatcttcaggcaaatgagatcatgtggaataacttaacagcagaaagtttgcaagtaatgttgaaaacgttagcggaagaacttatgcaaacacagcagatgcttttaaacaaggaggaggctgttttggagttagagaagagaattgaagaatcttctgaaacttgtgagaagaagtctgatattgtgcttctgctaagccaaaaacaggcacttgaagaactgaaacagtcagtccagcagctgagatgcactgaagcaaagttttcagcacagaaggaattactagagcaaaaagtgcaagaaaatgatgggaaagagccacctccagtagtaaattatgaagaagatgcacgatcagttacatctatggaaagaaaggagaggctatccaaatttgaatctattcgtcattcaattgctggaataattaggtctccaaaatctgcagtgggctcttcagcactttctgatatgatctccatcagtgagaagcctttggcagaacaggactggtaccatggtgcaattcccagaatagaagctcaagaactgttaaaaaaacaaggagactttttggtgcgagagagtcatgggaaacctggtgaatatgtcctttctgtatattctgatggacagaggagacattttatcatacaatatgttgataacatgtatcgattcgagggcactgggttttcaaacattcctcaacttatagatcatcactatacaacaaaacaggtcatcactaagaaatcaggtgtagttctgctgaatcctattcctaaggacaagaaatggattctcagtcatgaagatgtcatattgggagaattactgggcaagggaaattttggtgaagtatataagggcacattaaaggataaaacttctgttgctgttaaaacatgtaaagaagatcttcctcaggaattgaaaataaaatttttacaagaagccaaaattctcaagcaatatgatcatcccaatattgtcaaacttataggagtttgcacacaaagacagcctgtctacatcattatggaactggtttcaggaggtgatttcctcacctttctgagaaggaagaaggatgaactaaaactcaaacagttagtgaaattttcattagacgctgctgctggtatgttgtatctcgagagtaaaaactgtatacacagggaccttgctgcaagaaactgcctggtaggtgaaaataatgttctgaaaatcagtgactttggaatgtctcgtcaagaggatggtggagtgtattcatcttctggcttaaagcagattcccattaaatggacagcaccggaagctcttaattatgggagatacagttcagagagtgacgtgtggagctttggcatccttctctgggagaccttcagcttaggggtttgtccgtaccctggaatgacaaatcagcaagcaagagagcaagtagaaagaggataccggatgtcagctccccagcactgtccagaggatatttccaaaatcatgatgaagtgttgggattataaacctgaaaatcgccctaagttcagtgaacttcagaaagagctcactatcatcaagagaaaactcacatagtgacaggatggcgccaaactcagccttcaggactctgtcctccagcagagtaacattattgttctcattaacaatgaatttataccacattaccttc

SEQ ID NO: 241 - DNA, 1285 bp, human
aattacaaattcccaatgcagttacaggatcctgggaagcagagtgtctggatggaacctgagctgggtctctgactcacttctgactttagttttttcaagggggaacatggcaaaggtgttcagtttcatccttgttaccaccgctctgacaatgggcagggaaatttcggcgctcgaggactgtgcccaggagcagatgcggctcagagcccaggtgcgcctgcttgagacccgggtcaaacagcaacaggtcaagatcaagcagcttttgcaggagaatgaagtccagttccttgataaaggagatgagaatactgtcattgatcttggaagcaagaggcagtatgcagattgttcagagattttcaatgatgggtataagctcagtggattttacaaaatcaaacctctccagagcccagcagaattttctgtttattgtgacatgtccgatggaggaggatggactgtaattcagagacgatctgatggcagtgaaaactttaacagaggatggaaagactatgaaaatggctttggaaattttgtccaaaaacatggtgaatattggctgggcaataaaaatcttcacttcttgaccactcaagaagactacactttaaaaatcgaccttgcagattttgaaaaaaatagccgttatgcacaatataagaatttcaaagttggagatgaaaagaatttctacgagttgaatattggggaatattctggaacagctggagattcccttgcggggaattttcatcctgaggtgcagtggtgggctagtcaccaaagaatgaaattcagcacgtgggacagagatcatgacaactatgaagggaactgcgcagaagaagatcagtctggctggtggtttaacaggtgtcactctgcaaacctgaatggtgtatactacagcggcccctacacggctaaaacagacaatgggattgtctggtacacctggcatgggtggtggtattctctgaaatctgtggttatgaaaattaggccaaatgattttattccaaatgtaatttaattgctgctgttgggctttcgtttctgcaattcagctttgtttaaagtgatttgaaaaatactcattctgaacatatccatgcgcaatcatgataactgttgtgagtagtgcttttcattcttctcacttgcctttgttacttaatgtgctttcagtacagcagatatgcaatattcaccaaataaatgtagactgtgttaaaaaaaaaaaaaaaaaaaaaaaaaaaaaaaaaaaaaa

SEQ ID NO: 242 - DNA, 1791 bp, human
cccagaaattctacccaagctccctcagcaccatgtaccgagcacttcggctcctcgcgcgctcgcgtcccctcgtgcgggctccagccgcagccttagcttcggctcccggcttgggtggcgcggccgtgccctcgttttggcctccgaacgcggctcgaatggcaagccaaaattccttccggatagaatatgatacctttggtgaactaaaggtgccaaatgataagtattatggcgcccagaccgtgagatctacgatgaactttaagattggaggtgtgacagaacgcatgccaaccccagttattaaagcttttggcatcttgaagcgagcggccgctgaagtaaaccaggattatggtcttgatccaaagattgctaatgcaataatgaaggcagcagatgaggtagctgaaggtaaattaaatgatcattttcctctcgtggtatggcagactggatcaggaactcagacaaatatgaatgtaaatgaagtcattagcaatagagcaattgaaatgttaggaggtgaacttggcagcaagatacctgtgcatcccaacgatcatgttaataaaagccagagctcaaatgatacttttcccacagcaatgcacattgctgctgcaatagaagttcatgaagtactgttaccaggactacagaagttacatgatgctcttgatgcaaaatccaaagagtttgcacagatcatcaagattggacgtactcatactcaggatgctgttccacttactcttgggcaggaatttagtggttatgttcaacaagtaaaatatgcaatgacaagaataaaagctgccatgccaagaatctatgagctcgcagctggaggcactgctgttggtacaggtttaaatactagaattggctttgcagaaaaggttgctgcaaaagtggctgcacttacaggcttgccttttgtcactgctccgaataaatttgaagctctggctgctcatgacgctctggttgagctcagtggagccatgaacactactgcctgcagtctgatgaagatagcaaatgatattcgatttttgggttctggtcctcggtcaggtctgggagaattgatcttgcctgaaaatgaaccaggaagcagtatcatgccaggcaaggtgaaccctactcagtgtgaagcaatgaccatggttgcagcccaagtcatggggaaccatgttgctgtcactgtcggaggcagcaatggacattttgagttgaatgttttcaagccaatgatgattaaaaatgtgttacactcagccaggctgctgggggatgcttcagtttcctttacagaaaactgcgtggtgggaatccaggccaatacagaaaggatcaacaagctgatgaatgagtctctaatgttggtgacagctctcaatcctcatatagggtatgacaaggcagcaaagattgctaagacagcacacaaaaatggatcaaccttaaaggaaactgctatcgaacttggctatctcacagcagagcagtttgacgaatgggtaaaacctaaggacatgctgggtccaaagtgatttacataaatttataatgaaaataaacatgtataaaatttaaaaaaacagactcccatttcttaaaaacggataagtttgaaaggaaactgctattgaacttaagcatctctagcagagcaatttgatcagtatataaaaccctaggatgtgctaggtctaagatggattaaacaagtataaaataaaatacatttataaaataaaaaggaaaacagacttaaaa

SEQ ID NO: 243 - DNA, 808 bp, human
gccggaagtgacgcagggcagcggcgtcgcgggggcggggctcgggaaagacccgtgccagcgggcgtgtggccgcgggtttcgcacggtccaataagggagggcggcgtggcccggcctggtagcgacgaggacgcgcctgcgcagaggcggcagcaccaccggggttgactccgggggcgcggcgaggagagacatgaggctgagctggttccgggtcctgacagtactgtccatctgcctgagcgccgtggccacggccacgggggccgagggcaaaaggaagctgcagatcggggtcaagaagcgggtggaccactgtcccatcaaatcgcgcaaaggggatgtcctgcacatgcactacacggggaagctggaagatgggacagagtttgacagcagcctgccccagaaccagccctttgtcttctcccttggcacaggccaggtcatcaagggctgggaccaggggctgctggggatgtgtgagggggaaaagcgcaagctggtgatcccatccgagctagggtatggagagcggggagctcccccaaagattccaggcggtgcaaccctggtgttcgaggtggagctgctcaaaatagagcgacgaactgagctgtaaccagactggggaggggcagggggagaggcccccatcagggaccagactgttccaaaaaaaaaacaaaaaacaaaaacaaacaaaaaaacacttaaaagcccaaggagtaagcctgtgtgtttgtgggccctgagagactcagagacctcagctccagcataccccaccaccttctcctttccc

SEQ ID NO: 244 - DNA, 2134 bp, human
acccaagccagcactggctcatactgattcattttgatctctgctaataccagagtcctgcgtggcagagccattggcaccagaaattacaagagaacatggccaagcgagttgccattgtgggagctggggtcagcggcctggcctccatcaagtgctgtctggaagaaggactggagcccacctgctttgagaggagcgatgaccttggggggctgtggagattcaccgaacatgttgaagaaggcagagccagtctctacaagtctgtggtttccaacagctgcaaggagatgtcttgttactcagactttccattcccagaagattatccaaactatgtgccaaattctcaattcctggaatatctcaaaatgtatgcaaaccactttgaccttctgaaacacattcaattcaagaccaaagtctgcagtgtaacaaaatgctcagattctgctgtctctggccaatgggaggtggtcactatgcatgaagagaagcaagagtcagccatctttgatgctgtcatggtctgcactggctttcttactaatccttatttgccactggattcctttccaggtattaatgcctttaaaggccagtactttcatagccggcaatataagcatccagatatatttaaggacaagagagtccttgtgattggaatgggaaattctggcacagacattgctgtggaggccagccacctggcggaaaaggtgttcctcagcaccaccggagggggatgggtgatcagccgaatctttgactcgggctacccatgggacatggtgttcatgacacgctttcagaacatgttgagaaattccctcccaaccccaattgtgacttggttgatggagcgaaagataaacaactggctcaatcatgcaaattacggcttaataccagaagacaggactcagctgaaagagtttgtgctaaatgatgagctcccaggacgcatcatcactgggaaagtgttcatcaggccaagcataaaagaggtaaaggaaaactctgtcatatttaacaatacttcaaaggaagagcctattgacatcattgtctttgccactggatacacatttgctttccccttccttgatgagtctgtagtgaaagttgaagatggccaggcctcactgtacaagtatatcttccctgcacatctgcaaaagccaaccctggccattattggcctcatcaaacccttgggctccatgatacctacaggagaaacacaagctcggtgggctgttcgagtcctgaaaggtgtaaataagttaccaccaccaagtgtcatgatagaggaaattaatgcaaggaaagaaaacaagcccagttggtttggcttgtgctactgcaaggctttacaatcagattatatcacatacatagatgaactcctgacctatatcaatgcaaaacccaacctgttctctatgctcctaacggatccacatctggctctgaccgtcttctttggcccatgctcaccataccagttccgcttgactggcccaggaaaatgggaaggagccagaaatgccatcatgacccagtgggaccgaacattcaaggtcatcaaagctcgagttgtacaagagtctccatctccctttgaaagttttcttaaagtctttagctttctggctttgcttgtggctatttttctgattttcctataagtaaaagatctcctaaatggaagatgcacagagtagatttacaatgctccaattcctctcttacagcaatattgccttcacagttataaactgtattcaaatagtaaaggccaccctctcgcttccctggctggccccagggctaccactggtattcctgagcctctcccagctccacttctaatgctagagaatgataactaagacttctgtgcatttgaaggttgttggaaagttacaggttcattttagaaagaaagctgttcttgacagcactctgagccatcatacctctttcccatataaactattttcacagatctcaactaaaaccccttacttcacaaatgattgtgttgtgctgaaatggtgctcttatagtactggcttattaaaagtaaaaaataaacctaaaaattgattgttttaaaaaaaaa

SEQ ID NO: 245 - DNA, 3775 bp, human
cattcataagactcagagctacggccacggcagggacacgcggaaccaagacttggaaacttgattgttgtggttcttcttgggggttatgaaatttcattaatcttttttttttccggggagaaagtttttggaaagattcttccagatatttcttcattttcttttggaggaccgacttactttttttggtcttctttattactcccctccccccgtgggacccgccggacgcgtggaggagaccgtagctgaagctgattctgtacagcgggacagcgctttctgcccctgggggagcaacccctccctcgcccctgggtcctacggagcctgcactttcaagaggtacagcggcatcctgtgggggcctgggcaccgcaggaagactgcacagaaactttgccattgttggaacgggacgttgctccttccccgagcttccccggacagcgtactttgaggactcgctcagctcaccggggactcccacggctcaccccggacttgcaccttacttccccaacccggccatagccttggcttcccggcgacctcagcgtggtcacaggggcccccctgtgcccagggaaatgtttcaggctttccccggagactacgactccggctcccggtgcagctcctcaccctctgccgagtctcaatatctgtcttcggtggactccttcggcagtccacccaccgccgcggcctcccaggagtgcgccggtctcggggaaatgcccggttccttcgtgcccacggtcaccgcgatcacaaccagccaggacctccagtggcttgtgcaacccaccctcatctcttccatggcccagtcccaggggcagccactggcctcccagcccccggtcgtcgacccctacgacatgccgggaaccagctactccacaccaggcatgagtggctacagcagtggcggagcgagtggcagtggtgggccttccaccagcggaactaccagtgggcctgggcctgcccgcccagcccgagcccggcctaggagaccccgagaggagacgctcaccccagaggaagaggagaagcgaagggtgcgccgggaacgaaataaactagcagcagctaaatgcaggaaccggcggagggagctgaccgaccgactccaggcggagacagatcagttggaggaagaaaaagcagagctggagtcggagatcgccgagctccaaaaggagaaggaacgtctggagtttgtgctggtggcccacaaaccgggctgcaagatcccctacgaagaggggcccgggccgggcccgctggcggaggtgagagatttgccgggctcagcaccggctaaggaagatggcttcagctggctgctgccgcccccgccaccaccgcccctgcccttccagaccagccaagacgcaccccccaacctgacggcttctctctttacacacagtgaagttcaagtcctcggcgaccccttccccgttgttaacccttcgtacacttcttcgtttgtcctcacctgcccggaggtctccgcgttcgccggcgcccaacgcaccagcggcagtgaccagccttccgatcccctgaactcgccctccctcctcgctcggtgaactctttagacacacaaaacaaacaaacacatgggggagagagacttggaagaggaggaggaggaggagaaggaggagagagaggggaagagacaaagtgggtgtgtggcctccctggctcctccgtctgaccctctgcggccactgcgccactgccatcggacaggaggattccttgtgttttgtcctgcctcttgtttctgtgccccggcgaggccggagagctggtgactttggggacagggggtgggaaggggatggacacccccagctgactgttggctctctgacgtcaacccaagctctggggatgggtggggaggggggcgggtgacgcccaccttcgggcagtcctgtgtgaggatgaagggacgggggtgggaggtaggctgtggggtgggctggagtcctctccagagaggctcaacaaggaaaaatgccactccctacccaatgtctcccacacccaccctttttttggggtgcccaggttggtttcccctgcactcccgaccttagcttattgatcccacatttccatggtgtgagatcctctttactctgggcagaagtgagcccccccttaaagggaattcgatgcccccctagaataatctcatccccccacccgacttcttttgaaatgtgaacgtccttccttgactgtctagccactccctcccagaaaaactggctctgattggaatttctggcctcctaaggctccccaccccgaaatcagcccccagccttgtttctgatgacagtgttatcccaagaccctgccccctgccagccgaccctcctggccttcctcgttgggccgctctgatttcaggcagcaggggctgctgtgatgccgtcctgctggagtgatttatactgtgaaatgagttggccagattgtggggtgcagctgggtggggcagcacacctctggggggataatgtccccactcccgaaagcctttcctcggtctcccttccgtccatcccccttcttcctcccctcaacagtgagttagactcaagggggtgacagaaccgagaagggggtgacagtcctccatccacgtggcctctctctctctcctcaggaccctcagccctggcctttttctttaaggtcccccgaccaatccccagcctaggacgccaacttctcccaccccttggcccctcacatcctctccaggaaggcagtgaggggctgtgacatttttccggagaagatttcagagctgaggctttggtacccccaaacccccaatatttttggactggcagactcaaggggctggaatctcatgattccatgcccgagtccgcccatccctgaccatggttttggctctcccaccccgccgttccctgcgcttcatctcatgaggatttctttatgaggcaaatttatattttttaatatcggggggtggaccacgccgccctccatccgtgctgcatgaaaaacattccacgtgccccttgtcgcgcgtctcccatcctgatcccagacccattccttagctatttatccctttcctggtttccgaaaggcaattatatctattatgtataagtaaatatattatatatggatgtgtgtgtgtgcgtgcgcgtgagtgtgtgagcgcttctgcagcctcggcctaggtcacgttggccctcaaagcgagccgttgaattggaaactgcttctagaaactctggctcagcctgtctcgggctgacccttttctgatcgtctcggcccctctgattgttcccgatggtctctctccctctgtcttttctcctccgcctgtgtccatctgaccgttttcacttgtctcctttctgactgtccctgccaatgctccagctgtcgtctgactctgggttcgttggggacatgagattttattttttgtgagtgagactgagggatcgtagatttttacaatctgtatctttgacaattctgggtgcgagtgtgagagtgtgagcagggcttgctcctgccaaccacaattcaatgaatccccgacccccctaccccatgctgtacttgtggttctctttttgtattttgcatctgaccccggggggctgggacagattggcaatgggccgtcccctctccccttggttctgcactgttgccaataaaaagctcttaaaaacgc

SEQ ID NO: 246 - DNA, 2650 bp, human
agggacagcccagaggaggcgtggccacgctgccggcggaagtggagccctccgcgagcgcgcgaggccgccggggcaggcggggaaaccggacagtaggggcggggccgggccggcgatggggatgcgggagcactacgcggagctgcacccgtgcccgccggaattggggatgcagagcagcggcagcgggtatggcaggcagccggcgggccggcctccagcgcaggtgcccgagaggcaggggctggcctgggatgcgcgcgcacctgccctcgccccgccccgcccgcacgaggggtggtggccgaggccccgccccgcacgcctcgcctgaggcgggtccgctcagcccaggcgcccgcccccgcccccgccgattaaatgggccggcggggctcagcccccggaaacggtcgtaacttcggggctgcgagcgcggagggcgacgacgacgaagcgcagacagcgtcatggcagagcaggtggccctgagccggacccaggtgtgcgggatcctgcgggaagagcttttccagggcgatgccttccatcagtcggatacacacatattcatcatcatgggtgcatcgggtgacctggccaagaagaagatctaccccaccatctggtggctgttccgggatggccttctgcccgaaaacaccttcatcgtgggctatgcccgttcccgcctcacagtggctgacatccgcaaacagagtgagcccttcttcaaggccaccccagaggagaagctcaagctggaggacttctttgcccgcaactcctatgtggctggccagtacgatgatgcagcctcctaccagcgcctcaacagccacatggatgccctccacctggggtcacaggccaaccgcctcttctacctggccttgcccccgaccgtctacgaggccgtcaccaagaacattcacgagtcctgcatgagccagataggctggaaccgcatcatcgtggagaagcccttcgggagggacctgcagagctctgaccggctgtccaaccacatctcctccctgttccgtgaggaccagatctaccgcatcgaccactacctgggcaaggagatggtgcagaacctcatggtgctgagatttgccaacaggatcttcggccccatctggaaccgggacaacatcgcctgcgttatcctcaccttcaaggagccctttggcactgagggtcgcgggggctatttcgatgaatttgggatcatccgggacgtgatgcagaaccacctactgcagatgctgtgtctggtggccatggagaagcccgcctccaccaactcagatgacgtccgtgatgagaaggtcaaggtgttgaaatgcatctcagaggtgcaggccaacaatgtggtcctgggccagtacgtggggaaccccgatggagagggcgaggccaccaaagggtacctggacgaccccacggtgccccgcgggtccaccaccgccacttttgcagccgtcgtcctctatgtggagaatgagaggtgggatggggtgcccttcatcctgcgctgcggcaaggccctgaacgagcgcaaggccgaggtgaggctgcagttccatgatgtggccggcgacatcttccaccagcagtgcaagcgcaacgagctggtgatccgcgtgcagcccaacgaggccgtgtacaccaagatgatgaccaagaagccgggcatgttcttcaaccccgaggagtcggagctggacctgacctacggcaacagatacaagaacgtgaagctccctgacgcctacgagcgcctcatcctggacgtcttctgcgggagccagatgcacttcgtgcgcagcgacgagctccgtgaggcctggcgtattttcaccccactgctgcaccagattgagctggagaagcccaagcccatcccctatatttatggcagccgaggccccacggaggcagacgagctgatgaagagagtgggtttccagtatgagggcacctacaagtgggtgaacccccacaagctctgagccctgggcacccacctccacccccgccacggccaccctccttcccgccgcccgaccccgagtcgggaggactccgggaccattgacctcagctgcacattcctggccccgggctctggccaccctggcccgcccctcgctgctgctactacccgagcccagctacattcctcagctgccaagcactcgagaccatcctggcccctccagaccctgcctgagcccaggagctgagtcacctcctccactcactccagcccaacagaaggaaggaggagggcgcccattcgtctgtcccagagcttattggccactgggtctcactcctgagtggggccagggtgggagggagggacaagggggaggaaaggggcgagcacccacgtgagagaatctgcctgtggccttgcccgccagcctcagtgccacttgacattccttgtcaccagcaacatctcgagccccctggatgtcccctgtcccaccaactctgcactccatggccaccccgtgccacccgtaggcagcctctctgctataagaaaagcagacgcagcagctgggacccctcccaacctcaatgccctgccattaaatccgcaaacagccaaaaaaaaaaaaaaaaaaaa

SEQ ID NO: 247 - DNA, 4331 bp, human
atgtcgctgctgcagtctgcgctcgacttcttggcgggtccaggctccctgggcggtgcttccggccgcgaccagagtgacttcgtggggcagacggtggaactgggcgagctgcggctgcgggtgcggcgggtcctggccgaaggagggtttgcatttgtgtatgaagctcaagatgtggggagtggcagagagtatgcattaaagaggctattatccaatgaagaggaaaagaacagagccatcattcaagaagtttgcttcatgaaaaagctttccggccacccgaacattgtccagttttgttctgcagcgtctataggaaaagaggagtcagacacggggcaggctgagttcctcttgctcacagagctctgtaaagggcagctggtggaatttttgaagaaaatggaatctcgaggccccctttcgtgcgacacggttctgaagatcttctaccagacgtgccgcgccgtgcagcacatgcaccggcagaagccgcccatcatccacagggacctcaaggttgagaacttgttgcttagtaaccaagggaccattaagctgtgtgactttggcagtgccacgaccatctcgcactaccctgactacagctggagcgcccagaggcgagccctggtggaggaagagatcacgaggaatacaacaccaatgtatagaacaccagaaatcatagacttgtattccaacttcccgatcggcgagaagcaggatatctgggccctgggctgcatcttgtacctgctgtgcttccggcagcacccttttgaggatggagcgaaacttcgaatagtcaatgggaagtactcgatccccccgcacgacacgcagtacacggtcttccacagcctcatccgcgccatgctgcaggtgaacccggaggagcggctgtccatcgccgaggtggtgcaccagctgcaggagatcgcggccgcccgcaacgtgaaccccaagtctcccatcacagagctcctggagcagaatggaggctacgggagcgccacactgtcccgagggccaccccctcccgtgggccccgctggcagtggctacagtggaggcctggcgctggcggagtacgaccagccgtatggcggcttcctggacattctgcggggtgggacagagcggctcttcaccaacctcaaggacacctcctccaaggtcatccagtccgtcgctaattatgcaaagggtgacctggacatatcttacatcacatccagaattgcagtgatgtcattcccagcagaaggtgtggagtcagcgctcaaaaacaacatcgaagatgtgcggttgttcctggactccaagcacccagggcactatgccgtctacaacctgtccccgaggacctaccggccctccaggttccacaaccgggtctccgagtgtggctgggcagcacggcgggccccacacctgcacaccctgtacaacatctgcaggaacatgcacgcctggctgcggcaggaccacaagaacgtctgcgtcgtgcactgcatggacgggagagccgcgtctgctgtggccgtctgctccttcctgtgcttctgccgtctcttcagcaccgcggaggccgccgtgtacatgttcagcatgaagcgctgcccaccaggcatctggccatcccacaaaaggtacatcgagtacatgtgtgacatggtggcggaggagcccatcacaccccacagcaagcccatcctggtgagggccgtggtcatgacacccgtgccgctgttcagcaagcagaggagcggctgcaggcccttctgcgaggtctacgtgggggacgagcgtgtggccagcacctcccaggagtacgacaagatgcgggactttaagattgaagatggcaaagcggtgattcccctgggcgtcacggtgcaaggagacgtgctcatcgtcatctatcacgcccggtccactctgggcggccggctgcaggccaagatggcatccatgaagatgttccagattcagttccacacggggtttgtgcctcggaacgccaccactgtgaaatttgccaagtatgacctggacgcgtgtgacattcaagaaaaatacccggatttatttcaagtgaacctggaagtggaggtggagcccagggacaggccgagccgggaagccccaccatgggagaactcgagcatgagggggctgaaccccaaaatcctgttttccagccgggaggagcagcaagacattctgtctaagtttgggaagccggagcttccccggcagcctggctccacggctcagtatgatgctggggcagggtccccggaagccgaacccacagactctgactcaccgccaagcagcagcgcggacgccagtcgcttcctgcacacgctggactggcaggaagagaaggaggcagagactggtgcagaaaatgcctcttccaaggagagcgagtctgccctgatggaggacagagacgagagtgaggtgtcagatgaagggggatccccgatctccagcgagggccaggaacccagggccgacccagagccccccggcctggcagcagggctggtgcagcaggacttggtttttgaggtggagacaccggctgtgctgccagagcctgtgccacaggaagacggggtcgacctcctgggcctgcactccgaggtgggcgcagggccagctgtacccccgcaggcctgcaaggccccctccagcaacaccgacctgctcagctgcctccttgggccccctgaggccgcctcccaggggcccccggaggatctgctcagcgaggacccgctgctcctggcaagcccggcccctcccctgagcgtgcagagcaccccaagaggagggccccctgccgctgctgacccctttggcccgcttctgccgtcttcaggcaacaactcccagccctgctccaatcctgatctcttcggcgaatttctcaattcggactctgtgaccgtcccaccatccttcccgtctgcccacagcgctccgcccccatcctgcagcgccgacttcctgcacctgggggatctgccaggagagcccagcaagatgacagcctcgtccagcaacccagacctgctgggaggatgggctgcctggaccgagactgcagcgtcggcagtggcccccacgccagccacagaaggccccctcttctctcctggaggtcagccggccccttgtggctctcaggccagctggaccaagtctcagaacccggacccatttgctgaccttggcgacctcagctccggcctccaaggctcaccagctggatttcctcctgggggcttcattcccaaaacggccaccacggccaaaggcagcagctcctggcagacaagtcggccgccagcccagggcgcctcatggccccctcaggccaagccgccccccaaagcctgcacacagccaaggcctaactatgcctcgaacttcagtgtgatcggggcgcgggaggagcggggggtccgcgcacccagctttgctcaaaagccaaaagtctctgagaacgactttgaagatctgttgtccaatcaaggcttctcctccaggtctgacaagaaagggccaaagaccattgcagagatgaggaagcaggacctggctaaagacacggacccactcaagctgaagctcctggactggattgagggcaaggagcggaacatccgggccctgctgtccacgctgcacacagtgctgtgggacggggagagccgctggacgcccgtgggcatggccgacctggtggctccggagcaagtgaagaagcactatcgccgcgcggtgctggccgtgcaccccgacaaggctgcggggcagccgtacgagcagcacgccaagatgatcttcatggagctgaatgacgcctggtcggagtttgagaaccagggctcccggcccctcttctgaggccgcagtggtggtggctgcgcacacagctccacaggttgggagccgtcgtgggacctgggtccccaccgtgaggaccccgtgggcgacagcaggtgtggccagggtggggctccgagccccgggtcaccgcccgcccagcgttccaggcacatgaagagaaagcattccaaagcctctgattgttgtttcctttttctcctcccgaaggaacagctgattcatgctcctcccgcaattgtcacgtctgtgatttatttggtgtttcgggcgtggcctctggagccccggcacgtggtgggccacgctgctggcgctcatgggccctggtgtttgcaccgcactttgtaatcagtcccgtggttgtctgtacagaattaaactattttccgatg

SEQ ID NO: 248 - DNA, 1471 bp, human
gactctccagtcctcagtcaccttggacaaagaagtgtggatcctcagattccatcttttccaactccaaggtgccatggcagagaaggtgctggtaacaggtggggctggctacattggcagccacacggtgctggagctgctggaggctggctacttgcctgtggtcatcgataacttccataatgccttccgtggagggggctccctgcctgagagcctgcggcgggtccaggagctgacaggccgctctgtggagtttgaggagatggacattttggaccagggagccctacagcgtctcttcaaaaagtacagctttatggcggtcatccactttgcggggctcaaggccgtgggcgagtcggtgcagaagcctctggattattacagagttaacctgaccgggaccatccagcttctggagatcatgaaggcccacggggtgaagaacctggtgttcagcagctcagccactgtgtacgggaacccccagtacctgccccttgatgaggcccaccccacgggtggttgtaccaacccttacggcaagtccaagttcttcatcgaggaaatgatccgggacctgtgccaggcagacaagacttggaacgtagtgctgctgcgctatttcaaccccacaggtgcccatgcctctggctgcattggtgaggatccccagggcatacccaacaacctcatgccttatgtctcccaggtggcgatcgggcgacgggaggccctgaatgtctttggcaatgactatgacacagaggatggcacaggtgtccgggattacatccatgtcgtggatctggccaagggccacattgcagccttaaggaagctgaaagaacagtgtggctgccggatctacaacctgggcacgggcacaggctattcagtgctgcagatggtccaggctatggagaaggcctctgggaagaagatcccgtacaaggtggtggcacggcgggaaggtgatgtggcagcctgttacgccaaccccagcctggcccaagaggagctggggtggacagcagccttagggctggacaggatgtgtgaggatctctggcgctggcagaagcagaatccttcaggctttggcacgcaagcctgaggaccctcccctaccaaggaccaggaaaagcagcagctgcctgctctccagcctctggaggaactcagggccctggagctgctggggccaagccaagggcctcccctacctcaaaccccagctgggcccgcttagcccaccaggcatgaggccaaggctccactgaccaggaggccgaggtctctaactcttatcttccacagggtccaagagttcatcaggacccccaagagtgagtgagggggcaaggctctggcacaaaacctcctcctcccaggcactcatttatattgctctgaaagagctttccaaagtatttaaaaataaaaacaagttttcttacactgg

SEQ ID NO: 249 - DNA, 1510 bp, human
agatctgaattcggcgaaatatggctacagagagccctgctacgcgtcgggtccaggtggcagaacatcctaggttactgaagctaaaggagatgtttaactccaagtttggatctattcccaagttttatgttcgagcaccaggaagagtcaacataataggagagcatatagattattgtggatattctgttcttcctatggctgtagaacaagatgtgctaatagctgtagaacctgtgaaaacgtacgctctccaactggccaatacaaatcccttgtatccggacttcagtactagtgctaataacatccagattgataaaaccaagcctttgtggcacaactatttcttatgtggacttaaaggaattcaggaacactttggtcttagtaacctgactggaatgaactgcctggtagatggaaatatcccaccaagttctggcctctccagctccagtgctttggtctgttgtgctggcttggtgacgctcacagtgctgggaaggaatctatccaaggtggaacttgcagaaatctgtgccaagagtgagcgttacattggcactgaaggaggaggcatggaccagtctatatcatttcttgcagaagaaggaactgccaagttgatagaatttagtcctctgagggcaaccgatgtaaaactcccaagtggagcagtgtttgtgattgccaacagttgtgtggagatgaataaggcagcaacttcccatttcaatatcagggtgatggagtgtcggctggctgcgaagctcctggctaaatacaaaagcttgcaatgggacaaagtactgaggctggaggaggtgcaggctaaactagggattagtctagaagaaatgctgttggtcacagaagatgcccttcatcctgaaccctataaccctgaggagatctgcaggtgtctgggaattagcctggaggaactccgaacccaaatcctgagtccaaacactcaagatgtgctcatcttcaaactctatcagcgggcaaagcatgtgtacagcgaggctgcgcgagtgctccagtttaagaagatatgtgaagaagcacctgaaaacatggtccagctgctgggagagttgatgaaccagagccacatgagctgccgggacatgtatgagtgcagctgccccgagctggatcagctggtggacatctgtcggaagtttggggctcaagggtcacgacttactggagcaggatggggaggctgtacagtatcaatggtacctgcggacaagctgcccagctttctagcaaatgtgcacaaagcttattaccagaggagtgatggaagcttagcaccggagaagcaaagtttgtttgctaccaaacctggaggtggggctttggttttgcttgaggcctgaaaaaatgtaaaaagtctgagagaaactacttagggcacttaggaattggcaggactttctgtgccacagtaaattaatcttccttctgttttgtattatgatgaacggttgct

SEQ ID NO: 250 - DNA, 3778 bp, human
tttttaaattttgcatttgacttaaagtgccatgagaaaatttgcatactgcaaggtggtcctagccacctccttgatttgggtactcttggatatgttcctgctgctttacttcagtgaatgcaacaaatgtgatgaaaaaaaggagagaggacttcctgctggagatgttctagagccagtacaaaagcctcatgaaggtcctggagaaatggggaaaccagtcgtcattcctaaagaggatcaagaaaagatgaaagagatgtttaaaatcaatcagttcaatttaatggcaagtgagatgattgcactcaacagatctttaccagatgttaggttagaagggtgtaaaacaaaggtgtatccagataatcttcctacaacaagtgtggtgattgttttccacaatgaggcttggagcacacttctgcgaactgtccatagtgtcattaatcgctcaccaagacacatgatagaagaaattgttctagtagatgatgccagtgaaagagactttttgaaaaggcctttagagagttatgtgaaaaaactaaaagtaccagttcatgtaattcgaatggaacaacgttctggattgatcagagctagattaaaaggagctgctgtgtctaaaggccaagtgatcaccttcctggatgcccattgtgagtgtacagtgggatggctggagcctctcttggccaggatcaaacatgacaggagaacagtggtgtgtcccatcatcgatgtgatcagtgatgatacttttgagtacatggcaggctctgatatgacctatggtgggttcaactggaagctcaattttcgctggtatcctgttccccaaagagaaatggacagaaggaaaggtgatcggactcttcctgtcaggacacctaccatggcaggaggccttttttcaatagacagagattactttcaggaaattggaacatatgatgctggaatggatatttggggaggagaaaacctagaaatttcctttaggatttggcagtgtggaggaactttggaaattgttacatgctcacatgttggacatgtgtttcggaaagctacaccttacacgtttccaggaggcacagggcagattatcaataaaaataacagacgacttgcagaagtgtggatggatgaattcaagaatttcttctatataatttctccaggtgttacaaaggtagattatggagatatatcgtcaagagttggtctaagacacaaactacaatgcaaacctttttcctggtacctagagaatatatatcctgattctcaaattccacgtcactatttctcattgggagagatacgaaatgtggaaacgaatcagtgtctagataacatggctagaaaagagaatgaaaaagttggaatttttaattgccatggtatggggggtaatcaggttttctcttatactgccaacaaagaaattagaacagatgacctttgcttggatgtttccaaacttaatggcccagttacaatgctcaaatgccaccacctaaaaggcaaccaactctgggagtatgacccagtgaaattaaccctgcagcatgtgaacagtaatcagtgcctggataaagccacagaagaggatagccaggtgcccagcattagagactgcaatggaagtcggtcccagcagtggcttcttcgaaacgtcaccctgccagaaatattctgagaccaaatttacaaaaaaacgaaaaaaataaggattgactgggctacctcagcatacatttctgccacattcttaagtagcaaaaaaggaaaagtgctttcctcctctgcaggatgtaaggtttatcagccattaaaacttagacttctctagcttttcactagctgtgaaccagccttcctgtccatggacgtgaaactgcatagtaatgagactgtgcacactgatgtttacaagattgaaagagtctttctccgaaaatcatggtaaagaatactgagacaatgaaaaaaaatcaacaaaatatgctttctggagaactgtaccttctatggtttgcttgcacatcagtagtttctgctgaacgtgctgtcataatgaagagatttccaagattttttttcctgattagaacgggtagccagtatattaaatattgatagaaaaataaaagaactggaaccagattcagaatcttgaaaacaacattttttacaacaaacaaaaaaactatattaaacagggtttaaaggaaaattaaaacagaactatgaagaagtacaatttgttatagtatagtatcaaatttctatatagattttatacctcagtggggaaaaataactgattccaatgacattcattttgttttcatctgtgatagtcatggatgcttttattttccttggggtgctgaaattgagctgaaaaaaaaaggctctttgaatatagttttaatttctctctacagttttttttgtttggtttgtgggctgttggaattgtaatttttaattgccttctaaaaaatggaaatttaacaatgtctgatctcagctgaacaaattagatgtttcagttgctcttgggtcaactggcttacagatttacatgtgcacacacacacaaatttcttatcacattttcgacttcttcacttgacctaactgattatgcgaaatacccaagattcatgctactgttccacatttgttttcacagcaataaatcttcagttctgttgtttatgattccacttaacaaggggcctgcaaatgtgatttattatttgggtatttggagataatacatttgagggttttttggaaaacctttttcactccatactcaaatatgcttcattgtcaaatgcatatttaaattaaattattgaattgtaatgtttatctgctgctttttttaaataaaatttgactgaaaatgtttaattggcattttttaatgacttacccaagaaaagtgcagctattattccatattaataggcttgcatttcttttcctaaatcttatttaggctaaatcagttttattgtcctctgattttttttaataccacagaaatcacctgagtgtcaattgaaaagttgtcaattaaaaggtaaccttttaactctcgtaggaggaatctcattaagacatttttcctgatatgtagagcagtctgttggcaaaaatgcatatattttctttcatatttgtaaaattatatttaatggaattcttttctttgattatcaaggactttcactgcaggcagtgctatttcttgtgcctaagaatgtttccaaaagtcgcatcgctaatgatatttgccaagttgagtgtacacaaagtttctcatatcctgttcaagttaatcaacatcaaacacatggggatgctttagggtgagtctataatacaaaatgcataaaccatgtccccaggaaatttgaaaggaagcaagtgctgaatggaatttttttccttttccatgagctgtgttaattctatctccagtaggcctaatgcttgaaataagcaagatgtctaatcaataaattattttcatgctcagaatttcaggtttttgtactccagcatagcttggtcttatttcttactgtatgaaagcttaacagcaatgtgatttaaggttttgttttaaatgggagatgtaagtgatttaattcatgggtacttttagaacctgatagataatcccattgcctttatttttctaattaaagaatcctaaatactttgaaaatacaaaatattcctg

SEQ ID NO: 251 - DNA, 1347 bp, human
gtggacggagaaagtgaaaggtgaggcacggccctgcagattttccagcggatcccccggtggcctcatgtcgcgcagtggaaccgatcctcagcaacgccagcaggcgtcagaggcggacgccgcagcagcaaccttccgggcaaacgaccatcagcatatccgctacaacccgctgcaggatgagtgggtgctggtgtcagctcaccgcatgaagcggccctggcagggtcaagtggagccccagcttctgaagacagtgccccgccatgaccctctcaaccctctgtgtcctggggccatccgagccaacggagaggtgaatccccagtacgatagcaccttcctgtttgacaacgacttcccagctctgcagcctgatgcccccagtccaggacccagtgatcatccccttttccaagcaaagtctgctcgaggagtctgtaaggtcatgtgcttccacccctggtcggatgtaacgctgccactcatgtcggtccctgagatccgggctgttgttgatgcatgggcctcagtcacagaggagctgggtgcccagtacccttgggtgcagatctttgaaaacaaaggtgccatgatgggctgttctaacccccacccccactgccaggtatgggccagcagtttcctgccagatattgcccagcgtgaggagcgatctcagcaggcctataagagtcagcatggagagcccctgctaatggagtacagccgccaggagctactcaggaaggaacgtctggtcctaaccagtgagcactggttagtactggtccccttctgggcaacatggccctaccagacactgctgctgccccgtcggcatgtgcggcggctacctgagctgacccctgctgagcgtgatgatctagcctccatcatgaagaagctcttgaccaagtatgacaacctctttgagacgtcctttccctactccatgggctggcatggggctcccacaggatcagaggctggggccaactggaaccattggcagctgcacgctcattactaccctccgctcctgcgctctgccactgtccggaaattcatggttggctacgaaatgcttgctcaggctcagagggacctcacccctgagcaggctgcagagagactaagggcacttcctgaggttcattaccacctggggcagaaggacagggagacagcaaccatcgcctgaccacgccgaccacagggccttgaatccttttttgttttcaacagtcttgctgaattaagcagaaagggccttgaatcctggcctggaatttgggcagatatagcattaataaaactgtgcatctcaaaaaaaaaaaaaaa

SEQ ID NO: 252 - DNA, 1283 bp, human
ctctctgctcctcctgttcgacagtcagccgcatcttcttttgcgtcgccagccgagccacatcgctcagacaccatggggaaggtgaaggtcggagtcaacggatttggtcgtattgggcgcctggtcaccagggctgcttttaactctggtaaagtggatattgttgccatcaatgaccccttcattgacctcaactacatggtttacatgttccaatatgattccacccatggcaaattccatggcaccgtcaaggctgagaacgggaagcttgtcatcaatggaaatcccatcaccatcttccaggagcgagatccctccaaaatcaagtggggcgatgctggcgctgagtacgtcgtggagtccactggcgtcttcaccaccatggagaaggctggggctcatttgcaggggggagccaaaagggtcatcatctctgccccctctgctgatgcccccatgttcgtcatgggtgtgaaccatgagaagtatgacaacagcctcaagatcatcagcaatgcctcctgcaccaccaactgcttagcacccctggccaaggtcatccatgacaactttggtatcgtggaaggactcatgaccacagtccatgccatcactgccacccagaagactgtggatggcccctccgggaaactgtggcgtgatggccgcggggctctccagaacatcatccctgcctctactggcgctgccaaggctgtgggcaaggtcatccctgagctgaacgggaagctcactggcatggccttccgtgtccccactgccaacgtgtcagtggtggacctgacctgccgtctagaaaaacctgccaaatatgatgacatcaagaaggtggtgaagcaggcgtcggagggccccctcaagggcatcctgggctacactgagcaccaggtggtctcctctgacttcaacagcgacacccactcctccacctttgacgctggggctggcattgccctcaacgaccactttgtcaagctcatttcctggtatgacaacgaatttggctacagcaacagggtggtggacctcatggcccacatggcctccaaggagtaagacccctggaccaccagccccagcaagagcacaagaggaagagagagaccctcactgctggggagtccctgccacactcagtcccccaccacactgaatctcccctcctcacagttgccatgtagaccccttgaagaggggaggggcctagggagccgcaccttgtcatgtaccatcaataaagtaccctgtgctcaacc

SEQ ID NO: 253 - DNA, 2162 bp, human
cttccggcgagcgggcaagcgggaaccaggtggccacccggtgtcggtttcattttcctttggaatttctgctttacagacagaacaatggcagcccgagtacttataattggcagtggaggaagggaacatacgctggcctggaaacttgcacagtctcatcatgtcaaacaagtgttggttgccccaggaaacgcaggcactgcctgctctgaaaagatttcaaataccgccatctcaatcagtgaccacactgcccttgctcaattctgcaaagagaagaaaattgaatttgtagttgttggaccagaagcacctctggctgctgggattgttgggaacctgaggtctgcaggagtgcaatgctttggcccaacagcagaagcggctcagttagagtccagcaaaaggtttgccaaagagtttatggacagacatggaatcccaaccgcacaatggaaggctttcaccaaacctgaagaagcctgcagcttcattttgagtgcagacttccctgctttggttgtgaaggccagtggtcttgcagctggaaaaggggtgattgttgcaaagagcaaagaagaggcctgcaaagctgtacaagagatcatgcaggagaaagcctttggggcagctggagaaacaattgtcattgaagaacttcttgacggagaagaggtgtcgtgtctgtgtttcactgatggcaagactgtggcccccatgcccccagcacaggaccataagcgattactggagggagatggtggccctaacacagggggaatgggagcctattgtccagcccctcaggtttctaatgatctattactaaaaattaaagatactgttcttcagaggacagtggatggcatgcagcaagagggtactccatatacaggtattctctatgctggaataatgctgaccaagaatggcccaaaagttctagagtttaattgccgttttggtgatccagagtgccaagtaatcctcccacttcttaaaagtgatctttatgaagtgattcagtccaccttagatggactgctctgcacatctctgcctgtttggctagaaaaccacaccgccctaactgttgtcatggcaagtaaaggttatcctggagactacaccaagggtgtagagataacagggtttcctgaggctcaagctctaggactggaggtgttccatgcaggcactgccctcaaaaatggcaaagtagtaactcatgggggtagagttcttgcagtcacagccatccgggaaaatctcatatcagcccttgaggaagccaagaaaggactagctgctataaagtttgagggagcaatttataggaaagacgtcggctttcgtgccatagctttcctccagcagcccaggtaaaactctaagcaagttagctgtagtgccatttcagaaactggcctaaatggctatgtagaacatttcattaaccctataagtcattcagtattcttttctctctgtgggagtgatacagtcttggtttgtattttgtttgaatcaaaactggttatagcaatactcaaattaaatggaaaaaacttcatgatagcgtaagtttggaaagtttagcaaaatcacagtggtactgatttttatttgttttctattttttttaatttatatttttaatttttttaacagggtcttcctctctcgcccaagttctcatgcctcagcctcccaaatagctgggactacaggcacaggccaccacacctggctaatttttttgtattttttgtggagatggggtttcaccatgttgccaaggccagtctgaaatcctgggctcaagtgatcctcctgctttggcctcccaaaatgctgggattataggcatgagccgctgcacttggcctgatactgatttttattccttgcgttatcacatagtgttgtatttgaaacatagttcatggttttatcaaagaactgaagatgagaatactggtcatctaactttgtaatttgatttgattatactgtaaagtttgacagtctcattttatcactgcgtttgtatctattactaaaatgtattttttgacctcttactgattcattgttggtatgtacaaactgttgacttgtaaaatcaataaagtcttagttggaaaaaaaaaaaaaaa

SEQ ID NO: 254 - DNA, 1798 bp, human
cggtcgccgtcgttgctccgctcgctctgagagagcatggccctgagaggcgtctccgtgcggctgctgagccgcggacccggcctgcacgtccttcgcacgtgggtctcgtcggcggcgcagaccgagaaaggcgggagaacacagagccaactggctaagtcctcgcgtcccgagtttgactggcaggacccgctggtgctggaggagcagctgaccacagatgagatcctcatcagggacaccttccgcacctactgccaggagagactcatgcctcgcatcctgttggccaatcgcaacgaagtttttcatcgggagatcatttcggagatgggggagttgggtgtgctgggccccaccatcaaaggatatggctgtgctggggtttcgtctgtggcctatgggctcctggcccgagagctggagcgggtggacagtggctacaggtcggcgatgagtgtccagtcctccctcgtcatgcaccctatctatgcctatggcagcgaggaacagcggcagaagtacctgccccagctggccaagggggagctcctgggctgcttcgggctcacagagcccaacagcggaagtgaccccagcagcatggagaccagagcccactacaactcatccaacaagagctacaccctcaatgggaccaagacctggatcacgaactcgcctatggccgatctgtttgtagtgtgggctcggtgtgaagatggctgcattcggggcttcctgctggagaaggggatgcggggtctctcggcccccaggatccagggcaagttctcgctgcgggcctcagccacaggcatgatcatcatggacggtgtggaggtgccagaggagaatgtgctccctggtgcatccagcctggggggtcccttcggctgcctgaacaacgcccggtacggcatcgcgtggggcgtgcttggagcttcggagttctgcttgcacacagcccggcagtacgccctcgacaggatgcagtttggtgtcccactggccaggaaccagctgattcagaagaagctggcagacatgctcactgagattaccctgggccttcacgcctgcctgcagctcggccgcttgaaggaccaggacaaggctgcccccgagatggtttctctgctgaagaggaataactgtgggaaagccctggacatcgcccgccaggcccgagacatgctgggggggaatgggatttctgacgagtatcacgtgatccggcacgccatgaacctggaggccgtgaacacctacgaaggtacacatgacattcacgccctgatccttgggagagctatcacgggaatccaggcgttcacggccagcaagtgagccgctccatcaggggcccgaaactctcaagcccctttctggagagatgcctggctggaccgtaggagcgctgtgctctgagcttagaaagggaggtggcggatggagtgggaagtgagagacactgatttttaaatatcaaaatttcccttctgaagtcgttcagatgtgttccttaaaaagaagatggaattctctgtagagcgtctcaatccacttttaaccatggatgagagcagactccatttaccctgaaatagcagcttctcttgagaggagagtgacatggaagcaactccgtctgctgcagctgaccccctcacactgagttcacagtgcgccctccctccctcccatctgggggtagtgccttatgctgggtgttggagcagagtgagggagaggaaaataaagacctgcacatctgaaaaaaaaaaaaaaaaaa

SEQ ID NO: 255 - DNA, 2921 bp, human
ccggctcggagtgtgatctaagcaggtcgcgtaccttcctcaggtgactccggccacagcccattgtccgcggccaccggcggagtttagccgcagacctcgaagcgccccggggtccttcccgaacggcagcggctgcggcgggtccatggagaagggccctgtgcgggcaccggcggagaagccgcggggcgccaggtgcagcaatgggttccccgagcgggatccgccgcggcccgggcccagcaggccggcggagaagcccccgcggcccgaggccaagagcgcgcagcccgcggacggctggaagggcgagcggccccgcagcgaggaggataacgagctgaacctccctaacctggcagccgcctactcgtccatcctgagctcgctgggcgagaacccccagcggcaagggctgctcaagacgccctggagggcggcctcggccatgcagttcttcaccaagggctaccaggagaccatctcagatgtcctaaacgatgctatatttgatgaagatcatgatgagatggtgattgtgaaggacatagacatgttttccatgtgtgagcatcacttggttccatttgttggaaaggtccatattggttatcttcctaacaagcaagtccttggcctcagcaaacttgcgaggattgtagaaatctatagtagaagactacaagttcaggagcgccttacaaaacaaattgctgtagcaatcacggaagccttgcggcctgctggagtcggggtagtggttgaagcaacacacatgtgtatggtaatgcgaggtgtacagaaaatgaacagcaaaactgtgaccagcacaatgttgggtgtgttccgggaggatccaaagactcgggaagagttcctgactctcattaggagctgagcttcattcagtgtgtgtgcgttggttgccgatcgtactgccagtagcattgtctgtctgtccggtcttgtttgtacattccattttcaattgttacagatgtgaactttattccttgtcactaattatatttaaaattatttctaggaagtcaaataaatataataaagggttgagcctctactttcttcttgccacctttttgtggcaatattaaagtgaactgctaatagtgtaagtatgtgcacaaaaccactgccagataaccagaggggcctgggaagggagaagaattagtgtatttttttcaaatagtacagtaatttgcctcataagcataggagcattgggaatgagagggaactgtgcccagtatactgttttttttcttcctccaataaaagtggtgtagtgccgaaagtgctaaaatatttagtgcggtattgctctgtgaattcaagttcaacagacttcactttggtcatgtttattaaaccaccagtgacatttaaaaatatatttttagcagtcgtaatgttagtcaccaagggaaggtggtggaatgtctatgtttttgattttactgtgagttaaaaaggcacatttctaccttctattgtttttaaattcaagaatagggaattagttcctggtgttgtttacgagtgtattctcgtgtcaacatacagggatttagacatttaactctctgtgccttgataagaatatcatttagagtgtagatacttttgcctttttaaaaaagccattattttatgagacttagtactcacactgcaaataactagtcagctcagttttaactttataggtttattgagtttcctttgtgtgatccatgtagatgcctcaaaatgtttcttcttcttcttttttttaatcttataagatatttttctaagtatttccagaaacatttgagagtgcccatcattttcaggtctgcagaaccatagcttccacgcacctgaacgagcacagaatgaactgacggtggaagacattatgagctgtgtccaacgttttaaccaaagcgtatcgtaccaacgatctgtgaaaatgcactggaagcttctggtcccggtttcctttgtggtctatgtgggtcttgtcctcattgtaactccgtatagatggtataggtattttaatcctggaagctgttgccttattaatgattatcttaaaatttcctccattggggcagcgtgggccaaattaaaacaaacaaaaccgcaactcctccacagaaacacaaacacagttattccatgaagtttagtatttggttgacatagtgctcttcaaattcatcccattaccctaaaagtaataactttgatgcttgctttaactttagtcccatctctgccactttgatgctatttgggttatgatggggcaagatggcagaggtattgggtttttttgtttttttccattcctctctacttctgtttcctagctttttctttctggagtttaagtacagtgatggttggcttgagtacctttttaaatctagcccagtataaacattagcctgcttaatatttagacatttataggtagaattctgagcactcaactcatgtttggcattttaaagtaaaaacaagtgtgacttcgaggaccaaagaaattgtcagctatacatttatctttatgaactcatttatattcctttttaatgactcgttgttctaacatttcctagaagtgttcttataaaggtctaatgtatccacaggctgttgtcttattagtaaatgcaaagtaatgactttgtctgttttactctagtctttagtacttcaaaattaccttttcatatccatgatcttgagtccatttgggggatttttaagaatttgatgtatttcaatacactgttcaaaattaaattgtttaattttatgtatgagtatgtatgttcctgaagttggtcctatttaaattattaaactattgtaactttaaaaaaaaaaaaaaaaaaaaa

SEQ ID NO: 256 - DNA, 2248 bp, human
aagcgcgaccgacgcggggccggggcgcggggcggagagacgcggccgcctcggcctcgacgccagcccaggcgccgacctccgattctcctgtcgccgaggacgcctcccggaggcggcgtgccgggcctgcgtcgacttcaagacgtggatgcggacgcagcagaagcgggacaccaagtttagggaggactgcccgccggatcgcgaggaactgggccgccacagctgggctgtcctccacaccctggccgcctactaccccgacctgcccaccccagaacagcagcaagacatggcccagttcatacatttattttctaagttttacccctgtgaggagtgtgctgaagacctaagaaaaaggctgtgcaggaaccacccagacacccgcacccgggcatgcttcacacagtggctgtgccacctgcacaatgaagtgaaccgcaagctgggcaagcctgacttcgactgctcaaaagtggatgagcgctggcgcgacggctggaaggatggctcctgtgactagagggtggtcagccagagctcatgggacagctagccaggcatggttggataggggcagggcactcattaaagtgcatcacagccagagcctgttgtgtctcagttgggtggtccccaggacactgcctgtggggacctgccctgcccctcttaggtttggagcagaagtggaggtgcccacagcaggtacccactggccccctcctcagtggagaccccaaggagctgcagctgaactgcaggggagggaaggaggagcagcctgggctgccccttgacattcaggatgtagcttcctgcccaccgcataccctggcgcctcactcctcacacgggaagacagcgggcctggctgggcatccctgtgcctgtccctggcggccaggccattgccttcccactatgcagccagggatgcccctgccccccatggctctgtgctgctcactttagggggctcaattctccactctgctcagtcctacagggaaagctcaggtcgggtctttctgagggtccaccagccatcctaccctctccctgcctggcacatgcctgccagcgttgtgtcatgcctgtccacaggggattcgtggggctcacttcatcagagtttgaagcccaaatgaaacgctgaagtgactgagaacctggcttcagtatattttctgctggggcttaataaagcagtagacagggcttgttccatccctctgtgctcagctgcatttcctgctggggtcctggttcctcaggagagagagaccacagggtgagagtgagccaggaacagcaaggacgttgattggttggggcaggggggccagagtagctgatgtaggagtactgggaggccagacggcacgaggtctccaaggccccagcaaagccatggcttctacccctagttcccctgacaggaagttcttggcgggtttggagccaggggatggcatggagtgatgtggctttgaagggtcctctggctgctgagctgggatgaggcaggtaagggtggaacaggaggggtggggaggaagccggggcagtcaccgagtgaccaccaagaggaagacccaccccacggcggggacagatgcggggtacgttaaagggagagccagagaactcatggggtgaggatggagtccgaggagactgctgggagccgccgtgtgggtcagagatggagaaggctgagtgcagcaaggtggggggtgactgggacccagcctttgggcctccccagccagagcagcccagcaacagtgtgtcctgtggtcataaaactccagggacctctatcctccaggagtctcagcctttccctgggcgcaggcccaccttggcatggccgcctcaggcctccatggagggagctgctatgtccccaccagattggccccgtgcggctgctggcttctgtagaggctgcccagaggggccaggtggcacaaataagagaggggagatggggggcagccaggagaggaggtgtcccttcctcgcccagacacagcgcgcttctctctggcctttcccgaggcctgtgagtgcctcaggaagcagctgggccctctgggaaggctgtgttcagcttaggaacataccgcctgtatctgctgtccctcccctgcccccctgccccccccaccgccttccctttttccctgtcttccttaaagtttcactcctgaataaaacttcactttgccttaaa

SEQ ID NO: 257 - DNA, 2224 bp, human
cggggcaagtgaggtgctgccgtcatccaggctggacagttcagtgatttgcctgaggccccacagcagagttcaactggagacagagaaaccagctagaggcagagggaggtaacacggagtcccccagaaaggtctgggctgcgcgtgcttcaggtaacctcccttgaccttcaggagaacgagaaggctgcctgatcagagagtccctgaagaagattctgtggctacaggcttcagcagagtgtgagggagaccccggttatttcctcagctatttccaccaaatcctcctgtctttcgtggccaacaccccaggcaaggcttggggcccccgtctgctgctggacgcagagccatgaagaagaagttagtggtgctgggcctgctggccgtggtcctggtgctggtcattgtcggcctctgtctctggctgccctcagcctccaaggaacctgacaaccatgtgtacaccagggctgccgtggccgcggatgccaagcagtgctcgaagattgggagggatgcactgcgggacggtggctctgcggtggatgcagccattgcagccctgttgtgtgtggggctcatgaatgcccacagcatgggcatcgggggtggcctcttcctcaccatctacaacagcaccacacgaaaagctgaggtcatcaacgcccgcgaggtggcccccaggctggcctttgccaccatgttcaacagctcggagcagtcccagaagggggggctgtcggtggcggtgcctggggagatccgaggctatgagctggcacaccagcggcatgggcggctgccctgggctcgcctcttccagcccagcatccagctggcccgccagggcttccccgtgggcaagggcttggcggcagccctggaaaacaagcggaccgtcatcgagcagcagcctgtcttgtgtgaggtgttctgccgggatagaaaggtgcttcgggagggggagagactgaccctgccgcagctggctgacacctacgagacgctggccatcgagggtgcccaggccttctacaacggcagcctcacggcccagattgtgaaggacatccaggcggccgggggcattgtgacagctgaggacctgaacaactaccgtgctgagctgatcgagcacccgctgaacatcagcctgggagacgcggtgctgtacatgcccagtgcgccgctcagcgggcccgtgctggccctcatcctcaacatcctcaaagggtacaacttctcccgggagagcgtggagagccccgagcagaagggcctgacgtaccaccgcatcgtagaggctttccggtttgcctacgccaagaggaccctgcttggggaccccaagtttgtggatgtgactgaggtggtccgcaacatgacctccgagttcttcgctgcccagctccgggcccagatctctgacgacaccactcacccgatctcctactacaagcccgagttctacacgccggatgacgggggcactgctcacctgtctgtcgtcgcagaggacggcagtgctgtgtccgccaccagcaccatcaacctctactttggctccaaggtccgctccccggtcagcgggatcctgttcaataatgaaatggacgacttcagctctcccagcatcaccaacgagtttggggtacccccctcacctgccaatttcatccagccagggaagcagccgctctcgtccatgtgcccgacgatcatggtgggccaggacggccaggtccggatggtggtgggagctgctgggggcacacagatcaccacggccactgcactggccatcatctacaacctctggttcggctatgacgtgaagcgggccgtggaggagccccggctgcacaaccagcttctgcccaacgtcacgacagtggagagaaacattgaccaggcagtgactgcagccctggagacccggcaccatcacacccagatcgcgtccaccttcatcgctgtggtgcaagccatcgtccgcacggctggtggctgggcagctgcctcggactccaggaaaggcggggagcctgccggctactgagtgctccaggaggacaaggctgacaagcaatccagggacaagatactcaccaggaccaggaaggggactctgggggaccggcttcccctgtgagcagcagagcagcacaataaatgaggccactgtgccaggtgcctccctggcctgtctccccac

SEQ ID NO: 258 - DNA, 3717 bp, human
aggaagaagccagtgcaccagaccggcaaagagaagcgggagccgccgcggcagcgcggccgtggggtccgccgccgccgcatcggagcgggaggaggagcagcggggagggcgaggccgccgggccgagagccgtcccgcctgctctcggtcttctgccttcgcctccgcgcggtgcgtcggacccagggtctgtcacctgggcgccaggggccgccgccggggagccggagcgggcaggaccctccctccgccgactgcggcccgagagcgcccccgcggggtggagcggcagccgccttctgcgggcggctgagtgtccgtctcgcgcccggagcgggcgaccgccgtcagcccggaggaggaggaggaggaggagggggcggccatggggctgctgtcccagggctcgccgctgagctgggaggaaaccaagcgccatgccgaccacgtgcggcggcacgggatcctccagttcctgcacatctaccacgccgtcaaggaccggcacaaggacgttctcaagtggggcgatgaggtggaatacatgttggtatcttttgatcatgaaaataaaaaagtccggttggtcctgtctggggagaaagttcttgaaactctgcaagagaagggggaaaggacaaacccaaaccatcctaccctttggagaccagagtatgggagttacatgattgaagggacaccaggacagccctacggaggaacaatgtccgagttcaatacagttgaggccaacatgcgaaaacgccggaaggaggctacttctatattagaagaaaatcaggctctttgcacaataacttcatttcccagattaggctgtcctgggttcacactgcccgaggtcaaacccaacccagtggaaggaggagcttccaagtccctcttctttccagatgaagcaataaacaagcaccctcgcttcagtaccttaacaagaaatatccgacataggagaggagaaaaggttgtcatcaatgtaccaatatttaaggacaagaatacaccatctccatttatagaaacatttactgaggatgatgaagcttcaagggcttctaagccggatcatatttacatggatgccatgggatttggaatgggcaattgctgtctccaggtgacattccaagcctgcagtatatctgaggccagatacctttatgatcagttggctactatctgtccaattgttatggctttgagtgctgcatctcccttttaccgaggctatgtgtcagacattgattgtcgctggggagtgatttctgcatctgtagatgatagaactcgggaggagcgaggactggagccattgaagaacaataactataggatcagtaaatcccgatatgactcaatagacagctatttatctaagtgtggtgagaaatataatgacatcgacttgacgatagataaagagatctacgaacagctgttgcaggaaggcattgatcatctcctggcccagcatgttgctcatctctttattagagacccactgacactgtttgaagagaaaatacacctggatgatgctaatgagtctgaccattttgagaatattcagtccacaaattggcagacaatgagatttaagccccctcctccaaactcagacattggatggagagtagaatttcgacccatggaggtgcaattaacagactttgagaactctgcctatgtggtgtttgtggtactgctcaccagagtgatcctttcctacaaattggattttctcattccactgtcaaaggttgatgagaacatgaaggtagcacagaaaagagatgctgtcttgcagggaatgttttatttcaggaaagatatttgcaaaggtggcaatgcagtggtggatggttgtggcaaggcccagaacagcacggagctcgctgcagaggagtacaccctcatgagcatagacaccatcatcaatgggaaggaaggtgtgtttcctggactgatcccaattctgaactcttaccttgaaaacatggaagtggatgtggacaccagatgtagtattctgaactacctaaagctaattaagaagagagcatctggagaactaatgacagttgccagatggatgagggagtttatcgcaaaccatcctgactacaagcaagacagtgtcataactgatgaaatgaattatagccttattttgaagtgtaaccaaattgcaaatgaattatgtgaatgcccagagttacttggatcagcatttaggaaagtaaaatatagtggaagtaaaactgactcatccaactagacattctacagaaagaaaaatgcattattgacgaactggctacagtaccatgcctctcagccagcccgtgtgtataatatgaagaccaaatgatagaactgtactgttttctgggccagtgagccagaaattgattaaggctttctttggtaggtaaatctagagtttatacagtgtacatgtacatagtaaagtatttttgattaacaatgtattttaataacatatctaaagtcatcatgaactggcttgtacatttttaaattcttactctggagcaacctactgtctaagcagttttgtaaatgtactggtaattgtacaatacttgcattccagagttaaaatgtttactgtaaatttttgttcttttaaagactacctgggacctgatttattgaaatttttctctttaaaaacattttctctcgttaattttcctttgtcatttcctttgttgtctacattaaatcacttgaatccattgaaagtgcttcaagggtaatcttgggtttctagcaccttatctatgatgtttcttttgcaattggaataatcacttggtcaccttgccccaagctttcccctctgaataaatacccattgaactctgatggctgttatcaaaggaacttttctttgtttaaatttgctgatgcaggaattaagtttaaacacaactctatagaaagaaaggagattattacccagaattcacatgtagtgattattaaggacaatttttttttttaactaaaaaagttggcggcaggggtggggggtggcaatcatttttcttcctatacatacaaaggatattgtcaaaaatggcgttcttctcttgtggcctgttattctgattgctgctgtatacagttttgtcactctttagtttttagttaagcatactgatagactttcctctaaaagccattcactccagattttacctggggaatattctacatactgcttactttctctataaaactcatcaataaatcatgaaaggcactgagttttgtaaatcaggaccctaaatgtttaattgtaaataagtttcagataattattatagctttgcgttgaagtttgttgttttttttctcaactagttaagtcaactgcttctgaaataactctgtattgtagattatgcagatctttacaggcataaatatttaaactgtaatatgctaacttgaagagattgcaataaagctgcttcagctaaccctgtttatgtttaaatactagggtttgttctatattttatacatgcattttggatgattaaagaatgcctggttttcgtttgcaatttgcttgtgtaaatcaggttgtaaaaaggcagataaattgaaatgtttgtggtatgaggaaataaaagaatggaattagctttcattcagaaa

SEQ ID NO: 259 - DNA, 1610 bp, human
ggcacgaggctgcggccgcagtagccggagccggagccgcagccaccggtgccttcctttcccgccgccgcccagccgccgtccggcctccctcgggcccgagcgcagaccaggctccagccgcgcggcgccggcagcctcgcgctccctctcgggtctctctcgggcctcgggcaccgcgtcctgtgggcggccgcctgcctgcccgcccgcccgcagccccttgcctgccggcccctgggcggcccgtgccatgggcaccgacagccgcgcggccaaggcgctcctggcgcgggcccgcaccctgcacctgcagacggggaacctgctgaactggggccgcctgcggaagaagtgcccgtccacgcacagcgaggagcttcatgattgtatccaaaaaaccttgaatgaatggagttcccaaatcaacccagatttggtcagggagtttccagatgtcttggaatgcactgtatctcatgcagtagaaaagataaatcctgatgaaagagaagaaatgaaagtttctgcaaaactgttcattgtagaatcaaactcttcatcatcaactagaagtgcagttgacatggcctgttcagtccttggagttgcacagctggattctgtgatcattgcttcacctcctattgaagatggagttaatctttccttggagcatttacagccttactgggaggaattagaaaacttagttcagagcaaaaagattgttgccataggtacctctgatctagacaaaacacagttggaacagctgtatcagtgggcacaggtaaaaccaaatagtaaccaagttaatcttgcctcctgctgtgtgatgccaccagatttgactgcatttgctaaacaatttgacatacagctgttgactcacaatgatccaaaagaactgctttctgaagcaagtttccaagaagctcttcaggaaagcattcctgacattcaagcgcacgagtgggtgccgctgtggctactgcggtattcggtcattgtgaaaagtagaggaattatcaaatcaaaaggctacattttacaagctaaaagaaggggttcttaactgacttaggagcataacttacctgtaatttccttcaatatgagagaaaattgagatgtgtaaaatctagttactgcctgtaaatggtgtcattgaggcagatattctttcgtcatatttgacagtatgttgtctgtcaagttttaaatacttatcttgcctccatatcaatccattctcatgaacctctgtattgctttccttaaactattgttttctaattgaaattgtctataaagaaaatacttgcaatatatttttcctttatttttatgactaatataaatcaagaaaatttgttgttagatatattttggcctaggtatcagggtaatgtatatacatattttttatttccaaaaaaaattcattaattgcttcttaactcttattataaccaagcaatttaattacaattgttaaaactgaaatactggaagaagatatttttcctgtcattgatgagatatatcagagtaactggagtagctgggatttactagtagtgtaaataaaattcactcttcaatac

SEQ ID NO: 260 - DNA, 3783 bp, human
cccgcgagcgtccatccatctgtccggccgactgtccagcgaaaggggctccaggccgggcgcacgtcgacccgggggaccgaggccaggagaggggccaagagcgcggctgacccttgcgggccggggcaggggacggtggccgcggccatgcagtcctgtgccagggcgtgggggctgcgcctgggccgcggggtcgggggcggccgccgcctggctgggggatcggggccgtgctgggcgccgcggagccgggacagcagcagtggcggcggggacagcgccgcggctggggcctcgcgcctcctggagcgccttctgcccagacacgacgacttcgctcggaggcacatcggccctggggacaaagaccagagagagatgctgcagaccttggggctggcgagcattgatgaattgatcgagaagacggtccctgccaacatccgtttgaaaagacccttgaaaatggaagaccctgtttgtgaaaatgaaatccttgcaactctgcatgccatttcaagcaaaaaccagatctggagatcgtatattggcatgggctattataactgctcagtgccacagacgattttgcggaacttactggagaactcaggatggatcacccagtatactccataccagcctgaggtgtctcaggggaggctggagagtttactcaactaccagaccatggtgtgtgacatcacaggcctggacatggccaatgcatccctgctggatgaggggactgcagccgcagaggcactgcagctgtgctacagacacaacaagaggaggaaatttctcgttgatccccgttgccacccacagacaatagctgttgtccagactcgagccaaatatactggagtcctcactgagctgaagttaccctgtgaaatggacttcagtggaaaagatgtcagtggagtgttgttccagtacccagacacggaggggaaggtggaagactttacggaactcgtggagagagctcatcagagtgggagcctggcctgctgtgctactgaccttttagctttgtgcatcttgaggccacctggagaatttggggtagacatcgccctgggcagctcccagagatttggagtgccactgggctatgggggaccccatgcagcattttttgctgtccgagaaagcttggtgagaatgatgcctggaagaatggtgggggtaacaagagatgccactgggaaagaagtgtatcgtcttgctcttcaaaccagggagcaacacattcggagagacaaggctaccagcaacatctgtacagctcaggccctcttggcgaatatggctgccatgtttcgaatctaccatggttcccatgggctggagcatattgctaggagggtacataatgccactttgattttgtcagaaggtctcaagcgagcagggcatcaactccagcatgacctgttctttgataccttgaagattcattgtggctgctcagtgaaggaggtcttgggcagggcggctcagcggcagatcaattttcggctttttgaggatggcacacttggtatttctcttgatgaaacagtcaatgaaaaagatctggacgatttgttgtggatctttggttgtgagtcatctgcagaactggttgctgaaagcatgggagaggagtgcagaggtattccagggtctgtgttcaagaggaccagcccgttcctcacccatcaagtgttcaacagctaccactctgaaacaaacattgtccggtacatgaagaaactggaaaataaagacatttcccttgttcacagcatgattccactgggatcctgcaccatgaaactgaacagttcgtctgaactcgcacctatcacatggaaagaatttgcaaacatccacccctttgtgcctctggatcaagctcaaggatatcagcagcttttccgagagcttgagaaggatttgtgtgaactcacaggttatgaccaggtctgtttccagccaaacagcggagcccagggagaatatgctggactggccactatccgagcctacttaaaccagaaaggagaggggcacagaacggtttgcctcattccgaaatcagcacatgggaccaacccagcaagtgcccacatggcaggcatgaagattcagcctgtggaggtggataaatatgggaatatcgatgcagttcacctcaaggccatggtggataagcacaaggagaacctagcagctatcatgattacatacccatccaccaatggggtgtttgaagagaacatcagtgacgtgtgtgacctcatccatcaacatggaggacaggtctacctagacggggcaaatatgaatgctcaggtgggaatctgtcgccctggagacttcgggtctgatgtctcgcacctaaatcttcacaagaccttctgcattccccacggaggaggtggtcctggcatggggcccatcggagtgaagaaacatctcgccccgtttttgcccaatcatcccgtcatttcactaaagcggaatgaggatgcctgtcctgtgggaaccgtcagtgcggccccatggggctccagttccatcttgcccatttcctgggcttatatcaagatgatgggaggcaagggtcttaaacaagccacggaaactgcgatattaaatgccaactacatggccaagcgattagaaacacactacagaattcttttcaggggtgcaagaggttatgtgggtcatgaatttattttggacacgagacccttcaaaaagtctgcaaatattgaggctgtggatgtggccaagagactccaggattatggatttcacgcccctaccatgtcctggcctgtggcagggaccctcatggtggagcccactgagtcggaggacaaggcagagctggacagattctgtgatgccatgatcagcattcggcaggaaattgctgacattgaggagggccgcatcgaccccagggtcaatccgctgaagatgtctccacactccctgacctgcgttacatcttcccactgggaccggccttattccagagaggtggcagcattcccactccccttcatgaaaccagagaacaaattctggccaacgattgcccggattgatgacatatatggagatcagcacctggtttgtacctgcccacccatggaagtttatgagtctccattttctgaacaaaagagggcgtcttcttagtcctctctccctaagtttaaaggactgatttgatgcctctccccagagcatttgataagcaagaaagatttcatctcccaccccagcctcaagtaggagttttatatactgtgtatatctctgtaatctctgtcaaggtaaatgtaaatacagtagctggagggagtcgaagctgatggttggaagacggatttgctttggtattctgcttccacatgtgccagttgcctggattgggagccattttgtgttttgcgtagaaagttttaggaactttaacttttaatgtggcaagtttgcagatgtcatagaggctatcctggagacttaatagacatttttttgttccaaaagagtccatgtggactgtgccatctgtgggaaatcccagggcaaatgtttacattttgtataccctgaagaactctttttcctctaatatgcctaatctgtaatcacatttctgagtgttttcctctttttctgtgtgaggttttttttttttttaatctgcatttattagtattctaataaaagcattttgatcggaaaaaaaaaaaaaaaaaaaaa

SEQ ID NO: 261 - DNA, 4799 bp, human
gaattccgttgctgtcggcgcgcagcagcagcagcagcagcagcagcagcagcagcagcagcagcacccgcatccgctgcgggagtccgagccggaaccacacccaagtagctgccctttcctcttctgtcatctcaccgccccaccacagaccgcgttccccgaggaaaccggccgcccacgcccggagcatcctcccctgttgagcgggcgctgacggacccggcggcatgatgcggctgcgaggctcggggatgctgcgggacctgctcctgcggtcgcccgccggcgtgagcgcgactctgcggcgggcacagcccttggtcaccctgtgccggcgtccccgaggcgggggacggccggccgcgggcccggctgccgccgcgcgactccacccgtggtggggcgggggcggctggccggcggagcccctcgcgcggggcctgtccagctctccttcggagatcttgcaggagctgggcaaggggagcacgcatccgcagcccggggtgtcgccacccgctgccccggcggcgcccggccccaaggacggccccggggagacggacgcgtttggcaacagcgagggcaaagagctggtggcctcaggtgaaaataaaataaaacagggtctgttacctagcttggaagatttgctgttctatacaattgctgaaggacaagagaaaatacctgttcataaatttattacagcactcaaatctacaggattgcgaacgtctgatcccaggttgaaagagtgtatggatatgttaagattaactcttcaaacaacatcagatggtgtcatgctagacaaagatctttttaaaaaatgtgttcagagcaacattgttttgttgacacaagcatttagaagaaagcttgtgattcctgactttatgtcttttacctcacacattgatgagttatatgaaagtgctaaaaagcagtctggaggaaaggttgcagattatattcctcaactggccaaattcagtcccgatttgtggggtgtgtctgtttgtacagtagatggacagaggcattctactggagataccaaagttcccttctgtcttcagtcctgtgtaaaacctttgaaatatgccattgctgttaatgatcttggaactgaatatgtgcatcgatatgttggaaaagagccgagtggactaagattcaacaaactatttttgaatgaagatgataaaccacataatcctatggtaaatgctggagcaattgttgtgacttcactaataaagcaaggagtaaataatgctgaaaaatttgactatgtcatgcagtttttgaataagatggctggtaatgaatatgttggattcagtaatgcaacgtttcagtctgaaagagaaagtggagatcgaaattttgcaataggatattacttaaaagaaaagaagtgctttccagaaggcacagacatggttggtatattagacttctacttccagctgtgctccattgaagtgacttgtgaatcagccagtgtgatggctgcgacactggctaatggtggtttctgcccaattactggtgaaagagtactgagccctgaagcagttcgaaatacattgagtttgatgcattcctgtggcatgtatgacttctcagggcagtttgctttccatgttggtcttcctgcaaaatctggagttgctgggggcattcttttagttgtccccaatgttatgggtatgatgtgctggtctcctcctctggataagatgggcaacagtgttaagggaattcacttttgtcacgatcttgtttctctgtgtaatttccataactatgataatttgagacactttgcaaaaaaacttgatcctcgaagagaaggtggtgatcaaagggtaaagtcagtgataaatcttttgtttgctgcatatactggagatgtgtctgcacttcgaagatttgctttgtcagctatggacatggaacagcgggactatgattctagaacagcactccatgtagctgctgcagagggtcatgttgaagttgttaaatttttgctggaagcctgcaaagtaaaccctttccccaaggacaggtggaataacactcccatggatgaagcactgcactttggacaccatgatgtatttaaaattctccaagaataccaagtccagtacacacctcaaggagattctgacaacgggaaggaaaatcaaaccgtccataagaatcttgatggattgttgtaatggtctcaaatcccaagatttaaatcacttacctatttaattgtggaaaatgattatgaagaacatgtgtatttctatctggtagtgatgtatattttacatttgtcatttcagtgttactggagttttcttcattgtgcacacaggacaaatctgatctctttgggaaaaaatagaaataaaacaatctccctccataatgtgagcaatattacctcgtgcattgtataatttgatgtaaaagaaatagttaccaatgctagcttgtgtggtcttccatgatttatttgtgttttgtgaattttcaatttatggtgatgatctgctgatatgcatttataaagtaagctctgttgtacagtctgtccaaatgggtcaaggttgcctttagaagcaaatagtgtgattttcaagacttcaaatacaaatttagtttaagtgtttgaacaactatatgcacttacggttgtgtgtttaaaatgtctctctctcaccctagcttcatgatgtgactcttaaaaaactataatagttaacaactgttagtaagatagaccaattctgattagactttatcagggaatctgtttaagatatgtttggtgaccaaaacgtatgtgtgaatgtagttataatgcttttgaaaaattttcctttttctatatccccttagtccagcctctcttctcagacatttagctatctgcctctttcctttagctgggaaagtgagagctggcatactatgcagtttttatgttttccatagtaagtcagaaaatgcctcctatttctggcatcagaactttgccatttgtctacagaagacgaaccagagacaaaattactaagtataaattagtcaagtttatcagtctaaaaagcgaagggatgtgcaactgcagctctttaagaagtttttttttttagcttctagggtaaagataaattcagaaatgctctaagctaccaaagttattctgaaagtatgggaactgctacaactaacaaacatttgtttccaagcctgtcattaagagtctgcatcaagagatttgtcctccttgggggaccactggatcattccagatttcttgtgatttttctattgtgtaattcttggtgggctctgtagtttaataataagaaaaaggccatttcattttaaattgtgacctataattctttgtcttgggttggtaattcaggattcatttggaaagtgggtaaaaggggcttcaaaaaacggatagaacaggattttctaggagttacacatacattttatcctgtcatacctcgagataaagtggcatgttagtgaggagttctgatattaagcacacacacacatgcacacaaatggacttctctgaagctgtgtttagtgaaatgagctcaagtacatgaatgttagttgttatcacatacagcaaattcctttttttttctttttctatgagcacactctgctgcttctaaactttacatgcctgatggcaccttactccagcagcctccaggtgctttcattttcacttccagtctaagccagtggctcctgccactgccctcccattacctagatggcacctcctttggtgaaaccacggccaatgttccttagctgcaccaggcccgaagctgttcccatgcttgagcttccatggggaggatgctgagtgagcagtttcctacgccgtggatctagcaagccatggagacaggtagcatttgtaagatgctgcacaggagcagcattatccccaaagatattacagggtagacacgttttaactgaaatcaatcaagataactttattcaaagagcagcccgctttgtgtgactaaaatgaaacaagacagttgaattgtgtgacttgaagattaccaatgattttgaggcttttctataataaaaagaggttctaaccattatttgggaacaaagagagttttcatcttttttcagatcaaaaccattctgtaaaatctttgttgtttaattaaatgtgccgttatttacccctgatgttatttatgactatgtgccgattcctgcttgggctgtttgctgttggctggtaataatatatttgatttaaatgctgttgactgtgctattaactgctgccgtcagtaaactccaaagatctttttgttttggctttagtatcatatgtgctttttctgtatcctgagcgctctatatgatcatgttaatttaaagctttatacacattgttgtttttgctggtctcatctttggtaatatgctataccccactgctgcccgacactgccctttagctgcagagctggattagctgttgaccatttgatgctgttgtctgtctggcagggactgaatgacctgatgtcagatttagattcttcctggggattacacagctatgaatgtatttgcttctaaaacctcccaaagtgaatctaatcttaaaactacaagttgtaagtattctgaaattgggaaacatttattttaaatgcaatcaggtagtgttgctttttacagcataataaatatatgtttcaaaa

SEQ ID NO: 262 - DNA, 3051 bp, human
gggcaacccgcgcgggacccttcctccctagtcgcggggagtctgagaaagcgcgcctgtttcgcgaccatcacgcacctcccctccgcttgtggccatgtaccgctacctgggcgaagcgctgttgctgtcccgggccgggcccgctgccctgggctcggcgtccgccgactcggccgcgttgctgggctgggcccggggacagcccgccgccgccccgcagccggggctggcattggccgcccggcgccactacagcgaggcggtggccgaccgcgaggacgaccccaacttcttcaagatggtggagggcttcttcgatcgcggcgccagcatcgtggaggacaagctggtggaggacctgaggacccgggagagcgaggagcagaagcggaaccgggtgcgcggcatcctgcggatcatcaagccctgcaaccatgtgctgagtctctccttccccatccggcgcgacgacggctcctgggaggtcatcgaaggctaccgggcccagcacagccagcaccgcacgccctgcaagggaggtatccgttacagcactgatgtgagtgtagatgaagtaaaagctttggcttctctgatgacatacaagtgtgcagtggttgatgtgccgtttgggggtgctaaagctggtgttaagatcaatcccaagaactatactgataatgaattggaaaagatcacaaggaggttcaccatggagctagcaaaaaagggctttattggtcctggcattgatgtgcctgctccagacatgagcacaggtgagcgggagatgtcctggatcgctgatacctatgccagcaccatagggcactatgatattaatgcacacgcctgtgttactggtaaacccatcagccaagggggaatccatggacgcatctctgctactggccgtggtgtcttccatgggattgaaaatttcatcaatgaagcttcttacatgagcattttaggaatgacaccagggtttggagataaaacatttgttgttcagggatttggtaatgtgggcctacactctatgagatatttacatcgttttggtgctaaatgtattgctgttggtgagtctgatgggagtatatggaatccagatggtattgacccaaaggaactggaagacttcaaattgcaacatgggtccattctgggcttccccaaggcaaagccctatgaaggaagcatcttggaggccgactgtgacatactgatcccagctgccagtgagaagcagttgaccaaatccaacgcacccagagtcaaagccaagatcattgctgaaggtgccaatgggccaacaactccagaagctgacaagatcttcctggagagaaacattatggttattccagatctctacttgaatgctggaggagtgacagtatcttactttgagtggctgaagaatctaaatcatgtcagctatggccgtttgaccttcaaatatgaaagggattctaactaccacttgctcatgtctgttcaagagagtttagaaagaaaatttggaaagcatggtggaactattcccattgtacccacggcagagttccaagacaggatatcgggtgcatctgagaaagacatcgtgcactctggcttggcatacacaatggagcgttctgccaggcaaattatgcgcacagccatgaagtataacctgggattggacctgagaacagctgcctatgttaatgccattgagaaagtcttcaaagtgtacaatgaagctggtgtgaccttcacatagatggatcatggctgacttcctcactatcctcttcacatgtaacttctgcagacctatcacaagtttacatgtaaccacagaaatccctttctctcctgactcattaataatggataccattctcaacaagtcaatccaagtcagcccgttaaggagaaagaaattaaggttagcggatcatgtacaagctgagtgtgaaagtagaaatcacctacaccagagagccattttggtattttgcctttaaataaaaagcctcctttatctggctgtgcagccttgctctgtggcttttcccaacacaatcagtgctagtgctggggaggaacagtcaagagcagtcagttgcttgcttattttttctggatgagtctgggacacactgtaactttaacacatttaagaagtaggtgtgtggccttttcagaaggtggcatggtcctcaagtgagttcttagtattttatatcagcaaaataattcaattttgcaggttgcaaacaaatataaaacctgtttctgtttatgaatattattcttttagaatagaataagtacatgctgctgtaataaaattgcctttaatcacttaacaagcctaaccttgactcaaacagtgaatgcctatagaaataataaatgaaaaaaactagtatttttatatcataaaacaatgtcatttatagcttatcattcatgtattgtccagcagacattaaaagccctgtggataattaagttatcttcatacctgcaaaatggtggaggctattttcattaaaactgtcagaatttgcttaccataattatgatacagtccaaagaatgcagtcactttttatcatgttaactaattgttctcttttgaagatctatggttgactaattaaacaataattcaagtagagtgtcccagaaaaaaaccacttgggctccctgtttggagtctggctggctctgagcattgccaatggcccctactcacctgactttgtatcctctccttttagaggctttgcattctgcacccagcttcactaacagtgggctgaaaacatccttgggttgagtgtttcatttgggagttatttggccagggccttttgaacagtagtgtccccatgaagtgctagataatatatgtgtaagagtcagcttttttttttttttttaactctaacacccttcagaaatttctaactactttgtaactgcatggcttaacctggtgataaaagcagttattaaaagtctacgttttccaaaaaaaaaaaaaaa

SEQ ID NO: 263 - DNA, 3137 bp, human
gcggagcgtgtgagcagtactgcggcctcctctcctctcctaacctcgctctcgcggcctacctttacccgcccgcctgctcggcgaccagcggggatcctcccccagccgcaagtccacgaagaaagcaacgaatgaaaattatgaagacaacgagaagtcagactcctccgggtcgcgctccagctgcttcggcttcgtcgcctactctgtgaactccggggagagatctcgagtcaagattaagaccttaacccaccaacctgcctgttcggacaccccccgggccggccgctgtctgtccccttctccatcgccctctcccagaaagctccggtgcttggaccagctagagtctgagaaagaggagaggcgcgaacgccactccaaaaagagaagggttaaagagggcaaccctaacgatacgcttgactttctgtggctgggaacaccttccaccatgaccacctcagcaagttcccacttaaataaaggcatcaagcaggtgtacatgtccctgcctcagggtgagaaagtccaggccatgtatatctggatcgatggtactggagaaggactgcgctgcaagacccggaccctggacagtgagcccaagtgtgtggaagagttgcctgagtggaatttcgatggctccagtactttacagtctgagggttccaacagtgacatgtatctcgtgcctgctgccatgtttcgggaccccttccgtaaggaccctaacaagctggtgttatgtgaagttttcaagtacaatcgaaggcctgcagagaccaatttgaggcacacctgtaaacggataatggacatggtgagcaaccagcacccctggtttggcatggagcaggagtataccctcatggggacagatgggcacccctttggttggccttccaacggcttcccagggccccagggtccatattactgtggtgtgggagcagacagagcctatggcagggacatcgtggaggcccattaccgggcctgcttgtatgctggagtcaagattgcggggactaatgccgaggtcatgcctgcccagtgggaatttcagattggaccttgtgaaggaatcagcatgggagatcatctctgggtggcccgtttcatcttgcatcgtgtgtgtgaagactttggagtgatagcaacctttgatcctaagcccattcctgggaactggaatggtgcaggctgccataccaacttcagcaccaaggccatgcgggaggagaatggtctgaagtacatcgaggaggccattgagaaactaagcaagcggcaccagtaccacatccgtgcctatgatcccaagggaggcctggacaatgcccgacgtctaactggattccatgaaacctccaacatcaacgacttttctgctggtgtagccaatcgtagcgccagcatacgcattccccggactgttggccaggagaagaagggttactttgaagatcgtcgcccctctgccaactgcgaccccttttcggtgacagaagccctcatccgcacgtgtcttctcaatgaaaccggcgatgagcccttccagtacaaaaattaagtggactagacctccagctgttgagcccctcctagttcttcatcccactccaactcttccccctctcccagttgtcccgattgtaactcaaagggtggaatatcaaggtcgtttttttcattccatgtgcccagttaatcttgctttctttgtttggctgggatagaggggtcaagttattaatttcttcacacctaccctcctttttttccctatcactgaagctttttagtgcattagtggggaggagggtggggagacataaccactgcttccatttaatggggtgcacctgtccaataggcgtagctatccggacagagcacgtttgcagaagggggactcttcttccaggtagctgaaaggggaagacctgacgtactctggttaggttaggacttgccctcgtggtggaaacttttcttaaaaagttataaccaacttttctattaaaagtgggaattaggagagaaggtaggggttgggaatcagagagaatggctttggtctcttgcttgtgggactagcctggcttgggactaaatgccctgctctgaacacgaagcttagtataaactgatggatatccctaccttgaaagaagaaaaggttcttactgcttggtccttgatttatcacacaaagcagaatagtatttttatatttaaatgtaaagacaaaaaactatatgtatggttttgtggattatgtgtgttttgctaaaggaaaaaaccatccaggtcacggggcaccaaatttgagacaaatagtcggattagaaataaagcatctcattttgagtagagagcaagggaagtggttcttagatggtgatctgggattaggccctcaagacccttttgggtttctgccctgcccaccctctggagaaggtgggcactggattagttaacagacgacacgttactagcagtcacttgatctccgtggctttggtttaaaagacacacttgtccacataggtttagagataagagttggctgttcaacttgagcatgttactgacagagggggtattggggttattttctggtaggaatagcatgtcactaaagcaggccttttgatattaaattttttaaaaagcaaaattatagaagtttagattttaatcaaatttgtagggtttctaggtaatttttacagaattgcttgtttgcttcaactgtctcctacctctgctcttggaggagatggggacagggctggagtcaaaacacttgtaattttgtatcttgatgtctttgttaagactgctgaagaattattttttttcttttataataaggaataaaccccacctttattccttcatttcatctaccattttctggttcttgtgttggctgtggcaggccagctgtggttttcttttgccatgacaacttctaattgccatgtacagtatgttcaaagtcaaataactcctcattgtaaacaaactgtgtaactgcccaaagcagcacttataaatcagcctaacataaaaaaaaaaaaaaaaaaaaaaaaaaaaaaaaaaaaaaaaaaaaaaaa

SEQ ID NO: 264 - DNA, 1698 bp, human
cccggccctccctgcacggcctcccgtgcgcccctgtcagactgtggcggccggtcgcgcggtgcgctctccctccctgcccgcagcctggagaggcgcttcgtgctgcacacccccgcgttcctgccggcaccgcgcctgccctctgccgcgctccgccctgccgccgaccgcacgcccgccgcgggacatggcacacgcaccggcacgctgccccagcgcccggggctccggggacggcgagatgggcaagcccaggaacgtggcgctcatcaccggtatcacaggccaggatggttcctacctggctgagttcctgctggagaaaggctatgaggtccatggaattgtacggcggtccagttcatttaatacgggtcgaattgagcatctgtataagaatccccaggctcacattgaaggaaacatgaagttgcactatggcgatctcactgacagtacctgccttgtgaagatcattaatgaagtaaagcccacagagatctacaaccttggagcccagagccacgtcaaaatttcctttgacctcgctgagtacactgcggacgttgacggagttggcactctacgacttctagatgcagttaagacttgtggccttatcaactctgtgaagttctaccaagcctcaacaagtgaactttatgggaaagtgcaggaaataccccagaaggagaccacccctttctatccccggtcaccctatggggcagcaaaactctatgcctattggattgtggtgaacttccgtgaggcgtataatctctttgcagtgaacggcattctcttcaatcatgagagtcccagaagaggagctaatttcgttactcgaaaaattagccggtcagtagctaagatttaccttggacaactggaatgtttcagtttgggaaatctggatgccaaacgagattggggccatgccaaggactatgtggaggctatgtggttgatgttgcagaatgatgagccggaggacttcgttatagctactggggaggtccatagtgtccgggaatttgtcgagaaatcattcttgcacattggaaaaaccattgtgtgggaaggaaagaatgaaaatgaagtgggcagatgtaaagagaccggcaaagttcacgtgactgtggatctcaagtactaccggccaactgaagtggactttctgcagggcgactgcaccaaagcgaaacagaagctgaactggaagccccgggtcgctttcgatgagctggtgagggagatggtgcacgccgacgtggagctcatgaggacaaaccccaatgcctgagcagcgcctcggagcccggcccgccctccggctacaatccccgcagagtctccggtgcagacgcgctgcggggatggggagcggcgtgccaatctgcgggtcccctgcggcccctgctgccgctgcgctgtcccggccgcaagagcggggccgccccgccgaggtttgtagcagccgggatgtgaccctccagggtttgggtcgctttgcgtttgtcgaagcctcctctgaatggctttgtgaaatcaagatgttttaatcacattcactttacttgaaattatgttgttacacaacaaattgtggggccttcaaattgtttttctcttttcatattaaaaatggtctttctgtgaactagcaaaaaaaaaaaaaaaaaaaaaaaaaaa

SEQ ID NO: 265 - DNA, 4125 bp, human
cgactgggccaggcgccggggcaggaagggaggcggccgccgtgccattcttaaaggcgcccgagtgtaggcgacaggccgctgacggccggaaggaaaatgagtgagtctttggttgtttgtgatgttgccgaagatttagtggaaaagctgagaaagtttcgttttcgcaaagaaacgaacaacgctgctattataatgaagattgacaaggataaacgcctggtggtactggatgaggagcttgagggcatttcaccagatgaacttaaagatgaactacctgaacgacaacctcgcttcattgtgtatagttataaatatcaacatgatgatggaagagtttcatatcctctgtgctttattttctccagtcctgttggatgtaagcctgaacaacagatgatgtatgctggaagtaagaataagctagtccagacagctgaactaaccaaggtatttgaaataagaaataccgaagacctaactgaagaatggttacgtgagaaacttggattttttcactaatgtgaacttctgtgtttctaaagtatttatgtattaacctgaccatactggaatcagacataaatacttatttatgcctaaaaatgcactgttacttacagtttgtttcctgcagtaaagaaaaattcttcatttgtgcaaaatttgaacaaagaggaaatcatcttcatagtaatgaaactttgtaaagtgtttccttatattggtaattgttaggtggactacttttctccagggactttttgcactcttgtgactaatttctataacttatggttcggaatttgttactatttacagacaccattggaaagtggatatattagattgtgagagacaacagttgcctccttttgacaaatactggatattagcagtttatttatgaaaatagcgtattatcacttgtcaaatcattgaaattcatttggggtcaaagacttgagtgacccagtattgagccatgaataatttagtgtaacctgtattacaagtacattgatgaattctgtatcttctttggtttcctgtatctttttaatcaagtctagaaactatgttcatcagtcactcatttttaaggtcgggagttagattttatgatagaattatgactgttagcttttctccttatagcatcttagtcttagaaattggtgggttgtaataatcaagggcttcattccttttatgtcatttctagacagttttgaatctaggttaataacactttatttataaagcacctcaatgtcctgtgaacactaattattttaaatgtgttaatactgtgcctttgatttgttagctttaaagttagtttaagacttttacactgccagtattccacatttggtgaaattaatacttttttaaagggtccaaataaaataattttctaatgtgtatatctgaaatttgtaataaaatcaacttcatattttaaaaattccaactatctgcttgcattggtgaatatatggcagtcgagagttataattttgggtatacttgtggttagttttgtgccataggaaaaaattatcttaaaactttggccatagttaataacattaacacttcaatagcaatcacatcttatatcctaaatgtcagaagatattctgaactggatgcctgaatagttaactaaaccagtcttgttagatgatggtactcttggcataaagcgaggattctgatatttggcatacttgtaaaaacaaatacataagtaaccattgaacattaatttgataataggtctagagactctaaaaactaaccaaacttggtgagtgtattcttatattaagaatatcttagtcatctcaaaactagcaaaatttaaattttggcatgttttccattcatatgttctttgcattttatttttgaggtttctgtgagaagtaaagatagttggaatttttgcgatattgaatagaacatcttctgttcccaacactgtttggcttcactaatttagaagtcaggaagcaatagaaagttggagatgaggaagtgctagagtaggtgtttgttttggttcttggagggaaaagattctttattccaatttccagagagaagagaaaactcacccaggaagtttaaaaattctttaaacaggtattttgatattggagaataacatgcatataattctgtaggaatgcacatgtaatccaagtgagtggagagtgtttttaatgtttttgaatgaaggaaatgaggttttgtttcacctgttttgcagcagtaagagaaactagtgctgcaagaatgtattttttaatgaagttccttattttgtcttgcatgttttagttttgcttatttttaaatttggaggtcctccataatgtcagataatattgacctgccatacgttagcactcttagttccgctactgtctttaacaggagcaaagagctgtgataaaccatgcttttttgagcttgtctgactcctaattaataacatgtttttggcaagacaacagattgaggttagaggatcagtaggacatttttattccatctgtcctatggggaaatttacaaatcccgtgctctaaaatgttctcaaacatttatatagatttccctttcatcttactaaattttgcattgttcttttcaagtatgtttcgtatttactgtctttttttctgccatttcccaaataataactccagatttcataattccagtttttacattccgttatctttctggtacaaccattcccattcagccttaaatctgagtcctttttagcagcaacttttttcctgggatcctccttcgtggtcttctaagtcagtgttagttttgaaatttttggccctgcataagttctgcatagcatctaatgtcaaaatagaaccaactggtaatcacagtattatttagtgtggtttccatgacaacaaaaatacatacgaagaaaacttctcaggttactatgctgaaattccaaaatgtctgagttttgaatagtgatcactttgttctggtattgacgcaattatattaggaaaaaagttggttgactgtttttgtttaattgacttctaaaatgttcaaattgtctagttctaaaagtttactaaatgcctagtgcagttaaacatactcttgtttaagtgtgtgttgctaaattttttactgtcattactaaataatctgtgtggcaaaatgtgtgtcagcacttttccctccttttttatctcctattttcaggagtcaaatgtagccataaactgtatccttgtctgacactttagctaaaaatttccagttaggggagtttattgccaaattaaatttggctgttccccccaacccatatagatattaaggaaggtgtacttaaaaaatgtttggactgcttttaaaacctgagcaatgtcattaatccatatgtggactagtgatgaatagatattttcataagagtttaaatgctgatatttggtggaagtagagagtaactcatattctatcaattcaagtattcttactatggttgctttccctatttgttcaatagactgataatactggaatttatagagtttgagccattacaacttttgtgaggatgtgtttcaaacatttctggacaaatcttattttgtatttctggaagaatgtagtaatcttctagaccgcttaaaaccaatgctcccaagctgaatattcttgagaaatttgtttttattatgccatttgacatttcaaatcagtgctcatatacagtaaacttgtgatagaaattgtattttattgctttttggattataattcatataaatataattacttgaatattgtttgagatcattaacatgccagggcagttcccactgatttagatggtccaagataatctcattcaggaggcttgaaacattaatggtttagtcttgtgaattttaacagttctctgtcatcgtttaacaaaaccaacaactgacacaactccttaagctgtggtttcagtctctgctagttcatattgcatgtttattttggacagtcttttgttaagcatggtgcttgtactggtttaaataaaatgttaacatt

SEQ ID NO: 266 - DNA, 2215 bp, human
atgggatgtactctgagcgcagaggagagagccgccctcgagcggagcaaggcgattgagaaaaacctcaaagaggatggcatcagcgccgccaaagacgtgaaattactcctgctcggggctggagaatcaggaaaaagcaccattgtgaagcagatgaagatcatccatgaagatggcttctccggagaagacgtgaaacagtacaagcctgttgtctacagcaacactatccagtccctggcagccatcgtccgggccatggacactttgggcatcgaatatggtgataaggagagaaaggctgacgccaagatggtgtgtgatgtggtgagtcggatggaagacaccgagcccttctctgcagagctgctttctgccatgatgcggctctggggcgactcaggaatccaagagtgcttcaaccggtcccgggagtatcaactcaacgactctgccaaatactacctggacagcctggatcggattggggccgccgactaccagcccactgagcaggacatcctccgaaccagggtcaaaaccactggcatcgtagaaacccacttcacattcaagaacctccacttcaggctgtttgacgtcggaggccagcgatctgaacgcaagaagtggatccattgcttcgaggacgtcacggccatcattttctgtgtcgcgctcagcggctatgaccaggtgctccacgaagacgaaaccacgaaccgcatgcacgagtctctcatgctcttcgactccatctgtaacaacaagttcttcatcgatacctccatcattctcttcctcaacaagaaagatctctttggcgagaagatcaagaagtcacctttgaccatctgctttcctgaatacacaggccccaatacctatgaagacgcagccgcctacatccaagcacaatttgaaagcaaaaaccgctcacccaacaaagaaatatattgtcacatgacttgtgccacagacacgaataacatccaggtggtgttcgacgccgtcaccgacatcatcattgccaacaacctccggggctgcggcttgtactgacctcttgtcctgtatagcaacctattttgactgcttcacggactctttgctgttgacgttgatctcctggtagcatgaccttttggcctttgtaagacacacagcctttctgtatcaagcccctgtctaacctacgaccccagagtgactgacggctgtgtatttctgtagaatgctgtagaatccggttttagttgagtcttcacatttagaatttgaaaggaaaaacagaacatttctcatgtgctttgtagcttaaaaaaaggaaaactcaccatttcaaccatatttctttttcttgcaaaacaaacatacccatctgcaccgacgcctgccccgtcccacctcgcgcgagcccctggagctcctgctgggggaggcccatctgccgcctggggctccggtgcggtgcatggtccgaggagtgtgctcaggccgggctttccagaaggcacaggccactgcaaaccctgctgctgccggccgcccagacaccacagacgccactggcggccctaagccactcccgccacacgctcactccaggttcgtatagaaaaagcacagctctcactggccagtagctgccaaaaagaacacccatcgtataaggaaatccagccccatagaaaacaatctgcccaccgaccccctttctaaggatagcctttgtaggggttttttggttcctttttttttttttcagtttgtgtttttacttttgtcccgccgagtactatgtattaccagcccccacccacagatcagtttcctagtctttgggaaacgggttgtgttttttttcctttgccgtgttggatttccggtcgcggctgacacctcccttcgtgtgtgcgcccctccccacccctgcctgtgttctgtgccctgtgtccgctctctcatgtggggatgtttgtgctgcagacaaaaagaacaaaaaaaaatttttaaataccacaagatggaaaaaaaaaacaaaaaaatttaaaaagatggaatgtagtgtttacattaaagccgccgttttcatgaccaatcctatgtcatttctactttgactaatacccaaaccctaaacctcttcacggtttcacttttaagacttaatctgtgctgaagaagaccagtcacagccatttcaaataaa

SEQ ID NO: 267 - DNA, 5130 bp, human
cacgtgatcgcgcctagggagaaaacgtctgactccagccaccggccttcaaggcacggctttttattccttcggctggtcggcctctcgcccttcagctacctgtgcgtccctccgtcccgtcccgtcccggggtcaccccggagcctgtccgctatgcggctcctgcctctagccccaggtcggctccggcggggcagcccccgccacctgccctcctgcagcccagcgctgctactgctggtgctgggcggctgcctgggggtcttcggggtggctgcgggaacccggaggcccaacgtggtgctgctcctcacggacgaccaggacgaagtgctcggcggcatgacaccgctaaagaaaaccaaagctctcatcggagagatggggatgactttttccagtgcttatgtgccaagtgctctctgctgccccagcagagccagtatcctgacaggaaagtacccacataatcatcacgttgtgaacaacactctggaggggaactgcagtagtaagtcctggcagaagatccaagaaccaaatactttcccagcaattctcagatcaatgtgtggttatcagaccttttttgcagggaaatatttaaatgagtacggagccccagatgcaggtggactagaacacgttcctctgggttggagttactggtatgccttggaaaagaattctaagtattataattacaccctgtctatcaatgggaaggcacggaagcatggtgaaaactatagtgtggactacctgacagatgttttggctaatgtctccttggactttctggactacaagtccaactttgagcccttcttcatgatgatcgccactccagcgcctcattcgccttggacagctgcacctcagtaccagaaggctttccagaatgtctttgcaccaagaaacaagaacttcaacatccatggaacgaacaagcactggttaattaggcaagccaagactccaatgactaattcttcaatacagtttttagataatgcatttaggaaaaggtggcaaactctcctctcagttgatgaccttgtggagaaactggtcaagaggctggagttcactggggagctcaacaacacttacatcttctatacctcagacaatggctatcacacaggacagttttccttgccaatagacaagagacagctgtatgagtttgatatcaaagttccactgttggttcgaggacctgggatcaaaccaaatcagacaagcaagatgctggttgccaacattgacttgggtcctactattttggacattgctggctacgacctaaataagacacagatggatgggatgtccttattgcccattttgagaggtgccagtaacttgacctggcgatcagatgtcctggtggaataccaaggagaaggccgtaacgtcactgacccaacatgcccttccctgagtcctggcgtatctcaatgcttcccagactgtgtatgtgaagatgcttataacaatacctatgcctgtgtgaggacaatgtcagcattgtggaatttgcagtattgcgagtttgatgaccaggaggtgtttgtagaagtctataatctgactgcagacccagaccagatcactaacattgctaaaaccatagacccagagcttttaggaaagatgaactatcggttaatgatgttacagtcctgttctgggccaacctgtcgcactccaggggtttttgaccccggatacaggtttgacccccgtctcatgttcagcaatcgcggcagtgtcaggactcgaagattttccaaacatcttctgtagcgacctcacacagcctctgcagatggatccctgcacgcctctttctgatgaagtgattgtagtaggtgtctgtagctagtcttcaagaccacacctggaagagtttctgggctggctttaagtcctgtttgaaaaagcaacccagtcagctgacttcctcgtgcaatgtgttaaactgtgaactctgcccatgtgtcaggagtggctgtctctggtctcttcctttagctgacaaggacactcctgaggtctttgttctcactgtattctttttatcctggggccacagttcttgattattcctcttgtggttaaagactgaatttgtaaacccattcagataaatggcagtactttaggacacacacaaacacacagacacaccttttgatatgtaagcttgacctaaagtcaaaggacctgtgtagcatttcagattgagcacttcactatcaaaaatactaacatcacatggcttgaagagtaaccatcagagctgaatcatccaagtaagaacaagtaccattgttgattgataagtagagatacattttttatgatgttcatcacagtgtggtaaggttgcaaattcaaaacatgtcacccaagctctgttcatgtttttgtgaattctaggctggtgctgcactgaaatagagcagtaagcttgtgataaaggccaattccaggtagctcttgaaggtgatagccatctactttccagtggctgccaaccacagggagtgccagttaacactggaaggattaaggcaaggtcccttctcttgagactcccctctgagatctgaaaaatgaagtggcttaggaacatcagcagtgaagaactgccaagagttggtgaaggttgtctcttccgagggccttctgaagacagggctcttgaacagacaagtggaagggctgtaccagggataaaggaaagaagtgcctgtccagcagggagcttgaatttaagttccatgtatgaagtcattggctctatctgcatttttctgtcattctcttcatttgttttaaggtggaaaattttcttacagttgatgcaaagtatcaactactttaccctaccttctccccttttagatgggttcttcctgagttttggagtcttgtatgattatcagtattcccctgtcaaaatcaaatctattcaggtttcttcactgttgagaacacctaaatgtttttatttttgagaagtggggacagagtctcactatgtcacccaggctggagtgcaatggcatgatctcagctcactgcaaccttcgcctcctgggttcaagcgattctcctgcctccgcctcctgagtagctgggattataggcacgcaccaccacgcccagctaattttttgtatttttagtagagacagagtttcaccatgttggccaggctggtcttgaactcctgaccttgtgatccacccacctcggcctcccagagtgctgggattacaggcatgagccaccacgcttggctaagaacacctaaatttttatgtttcttggctcaaaaaccagttccatttctaatgttgtcctcacaagaaggctaattggtggtgagacagcaggggaggaggaagagctgtggtttgtaacttgttcaactcaggcaataagcgattttagctttatttaaagtcttctgtccagctttaagcactttgtaagacatggctgaaagtagcttttctatcagaattgcagatagtcatgttgggctaacagtcaattggatatattcctttacctcacatgaccccagcaactgtggtggtatctagaggtgaaacaggcaagtgaaatggacacctctgctgtgaatgttttagagaaggaaattcaaaaaatgttgtaactgaaagcactgttgaatatgggtatcggctttctttttcactttgactcttaacattatcagtcaacttccacattaatgaaagttgaccatagttatttccaaataaaaagaaaccaactcttaccaggtcttggactgtgatgtcatattattcagttttatgcttgttcctgagcagaactcataagagtgacatagtcagctgctgacggcacctcagccacgccactcttactcagttcagtgggtgtgcttgcgtggtaggatgtggtgcagccctctctacgctcttctatttttggtatatttcctatctaaccttcaaatagcttccaattctttttttcttggactggcttcattctgaatttgtgctaaaataatctttcataaagagacctcagtttatagcgtaacagactacacaatgcactgatgttttcataatgtttaagggacccactgcaagaagcttgctgcctccttttaattgtattcatttagattttgattttccatgttaagaaggtgaggtccatgttggtgcccttcagagtagagaaccatgtaaacattaggaatgaacagaggccttaggaatgaatagagagtttgccttatacaatttcctgttacaaagctctccctctcatgcaaagtagggaacaccttttgagcatctttgaatttgacaaatggtgctgttgcaaacactttttttttgagatgaagtctcgcggttgtcacccgggctggagtgcagtggcgtgatctcggctcactgcaacttccacctcctgggttccagcagttctcctgcctcagcctcccaagtagctgagattacaggcgcctgccaccccacctggctgatttttgtaattttagtagagacggggtttcaccatgttggccaggctgattaactcctgacctcaggtgatccacctttctcggcctcccaaagtgctgggattacgggtgtgagccaccgtgcccggcctgcaaacacattttaattgacaacactagggctgttgtacaaaatagtaatgatagccatggaagttttaccttattctgtgagaagtgttcttaaacttattaagtgtctaaactaaggtttagtgcttttttaaaggaaagttgtcccaggattcatcctaaagaaagcaaaagttaattcaactgatccaccaatggaattagatgggtagagttgggttcttgagttttaccaccacttagttcccactgaattttgtaacttcctgtgtttgcatcctctgttcctattctgcccttgctctgtgtcatctcagtcatttgacttagaaagtgcccttcaaaaggaccctgttcactgctgcacttttcaatgaattaaaatttatttctgttctagtgggaaaaaaaaaaaaaaaaaa

SEQ ID NO: 268 - DNA, 2339 bp, human
ggtccaccatggccctgctgcactccggccgcgtcctccccgggatcgccgccgccttccacccgggcctcgccgccgcggcctctgccagagccagctcctggtggacccatgtggaaatgggacctccagatcccattctgggagtcactgaagcctttaagagggacaccaatagcaaaaagatgaatctgggagttggtgcctaccgggatgataatggaaagccttacgttctgcctagcgtccgcaaggcagaggcccagattgccgcaaaaaatttggacaaggaatacctgcccattgggggactggctgaattttgcaaggcatctgcagaactagccctgggtgagaacagcgaagtcttgaagagtggccggtttgtcactgtgcagaccatttctggaactggagccttaaggatcggagccagttttctgcaaagattttttaagttcagccgagatgtctttctgcccaaaccaacctggggaaaccacacacccatcttcagggatgctggcatgcagctacaaggttatcggtattatgaccccaagacttgcggttttgacttcacaggcgctgtggaggatatttcaaaaataccagagcagagtgttcttcttctgcatgcctgcgcccacaatcccacgggagtggacccgcgtccggaacagtggaaggaaatagcaacagtggtgaagaaaaggaatctctttgcgttctttgacatggcctaccaaggctttgccagtggtgatggtgataaggatgcctgggctgtgcgccacttcatcgaacagggcattaatgtttgcctctgccaatcatatgccaagaacatgggcttatatggtgagcgtgtaggagccttcactatggtctgcaaagatgcggatgaagccaaaagggtagagtcacagttgaagatcttgatccgtcccatgtattccaaccctcccctcaatggggcccggattgctgctgccattctgaacaccccagatttgcgaaaacaatggctgcaagaagtgaaaggcatggctgaccgcatcattggcatgcggactcaactggtctccaacctcaagaaggagggttccacccacaattggcaacacatcaccgaccaaattggcatgttctgtttcacagggctaaagcctgaacaggtggagcggctgatcaaggagttctccatctacatgacaaaagatggccgcatctctgtggcaggggtcacctccagcaacgtgggctaccttgcccatgccattcaccaggtcaccaagtaatgtccctgggtcgaggaaacagagacaacctttctgtcttcagcctctgctattgagagcttcacacagacaatgagagagggtggatggtggtgagtggatcatttctttcagccacagtgtgtaacactcagcatttgaatgtttctcagaaaagaacatgtagtgacacagggcagaggcatccatggctggcgtctggaatattaaaccaaactctccccggtccttttttctccaacttttctcaaagagtttacatgtgcaagaaagtcatcgcaccaaaaaacctgtcaattatgccattgcaatatttcagaagctttaactgaagtgtcaggttcctcgtgagaaacaagcacaccttagaggctttgagagaaggccagctagttctgtcatgagtagtcggcctcgtgtctgtcctcccatcttggaacaaccttatcaacaggccgcactgcagaaatgatgttttatgaaaaccatgagctgctgccactccagcaagggaaataatgcagtttcctgtcttatttaagaaaaagagaaggctctcttttctcccttgtcattgccgttcttttccttacacgcaaaacatttttaactattgcagtttcatcccattctactgcttgattgaccatcaactccatcctatcgagattatttaagaatgaagaacataatttttctgctgatgccgtaccctcacccttttcagcaaagaatagtggagagtaggaaactgtactttatctcggcatcctcttgaatgatagtgcaagtttctccagttgggatgttgtctctgcccggttggacctcctccctttgttgaatgtggtgtgcagcctctcatctcacactgtgagtccagcggcgcagggtggtaccaggaaagaggatattctaggcttgcgtgctgctagctgggttcaggcttcacccactggaaagaaccaccatctgctctaaccatgtagacttattgcggcctggttttctctgttacaataaaattactgtagaccc

SEQ ID NO: 269 - DNA, 2909 bp, human
gcactgagccggctcaggcagagacgcggcaccatggctagcaagaaagtctgcattgtaggctccgggaactggggctcagccatcgccaagatcgtgggtggcaatgcagcccagctggcacagtttgacccacgggtgaccatgtgggtatttgaggaagacattggaggcaaaaagctgactgagatcatcaacacgcagcatgagaatgtcaaatacctgccagggcacaagttgcccccaaatgtggtggctgtcccagatgtggtccaggctgcagaggatgctgacatcctgatctttgtggtgccccatcagttcatcggcaagatctgtgaccagctcaagggccatctgaaggcaaacgccactggcatatctcttattaagggggtagacgagggccccaatgggctgaagctcatctcggaagtgattggggagcgcctcggcatccccatgagtgtgctgatgggggccaacattgccagcgaggtggctgatgagaagttctgtgagacaaccattggctgcaaggacccggcccagggacaactcctgaaagagctgatgcagacaccaaacttccgtatcacagtggtgcaagaggtggacacagtagagatctgtggagccttaaagaatgtagtggccgtgggggctggcttctgtgatggcctgggctttggcgacaacaccaaggcggcagtgatccggctgggactcatggagatgatagccttcgccaagctcttctgcagtggccctgtgtcctctgccaccttcttggagagctgtggtgttgctgacctgatcactacctgctatggagggcggaaccggaaagtggctgaggcctttgcgcgtacaggaaagtccattgagcagctggagaaagagttgctgaatgggcagaaactgcaggggcccgagacagcccgggagctatacagcatcctccagcacaagggcctggtagacaagtttcccttgttcatggctgtgtacaaggtgtgctacgagggccagccagtgggtgaattcatccactgcctgcagaatcatccagaacatatgtgagtggggccagggcccaggccaggccgcttttttaccccagcggagaccagcagaagcctggggtacctagtcaccaggatctccaggactcccagggagcagagtcttctcatcttttcactggaggacaggaggctatggggcccagctacgcacctggagatcctgaactgtcaagccactggcagcctcatgccaccacatttgccagaaatgcagttgccctgtccctctccagatgtggggctttctccatatcctctgggaggggtggaatcaagccccagtgctgcctgcttggtggcgggggtgatgtatgtggagaagggttgggggagaggccggtagggcaggggctgctagtggctgtctcacatacaccagtaatcctgttaaagggctgaagaagtatcttagccacaggagcgatgaggcaaggattgtcagggaggggtctgggcttctgagctgatgcaggccccaaggacccctttgctgacctctgccaggacccacacagcttcgatggatctcagtgtttgttaacaaaatacaaagatctcaaacaaaccccttttagcttctcctagcaacatctgtgtcctcagaaacctctggttctcccccttccccctcccccaggctgccctggcacccaaattgctgccatgctggcatctgtagctcggtggcttgacattctccccagggacttcccggttcctagttctttgccagctcctccccactctgtgcgacctttccaagccttccctcaccctccccgccagcaccctctttggggagcaggaacttaatctgctgacagagctacacctttcataacaggctcagatcactcagctccctgtgacctttgtattcacccaggcttccttctcagtagctctagctgggggaggtgtcagctgggcccctcctgtgctatctccccagaggacatccctgactccacccctttcttcctcccaaactctgcacctcttcctcagctgctccagaccggccagggtaaccagctaaccatgcctggcatctggaagccagcaggccagagggtggcccaaaggctgatgaacggtagggaagggtgagcagattcctatgttggtgggcaccaatattccaagggcagctctctttgctgaatgagggccttctcgtgaggtactgacaacaccagcaactcgagagctgggaaactcaaggaggaggaagaaaatcaaaaccaccctactccctggggtgaggaaagaacaggaggggaggaggaggagtgtgctctgcacttgccttgctccagcatggggtggcagcagaggaatgtcacaggtcagcagcctaggcctccagctataaatagtccggagggcccgagaggctcccgcccgtccagcagggctgtcagcttcctgtgtggcagcacctggcacactggctctggccagcattatgctaaaaccctgttactctccaatgaaccagggaggcgggctcctctctgcgcctatcccttgagaattctgtcttaccagtgaagggtggggctgcccagatcaggcagcaggagtgaggggcacagtcaccccaggccttgctgagcccaggtctgggtactgagtgtccagagctgcctccccaggaggttaaggtgggggcaaaggggaagcttcaagcactttgcctacttttgttcactccccagtgcactgtgactcaggccttcccatcaggcctatttgtctacccaataaagcgtgttttttccagaaaaaaaaaaaaaaaaaaaaaaaaaaaaaaaaaaa

SEQ ID NO: 270 - DNA, 2618 bp, human
gcggggctggcacccgggccgaggctctgattctggggggaggccgactccaccctggctggaggaactgggtgctcctgcccgctggcccctcgcgcgtgaggatctatctcaggctaagaaatggcatttcaaaaggcagtgaaagggacgattcttgttggaggaggtgctcttgcaactgttttaggactttctcagtttgctcattacagaaggaaacaaatgaacctggcctatgttaaagcagcagactgcatttcagaaccagttaacagggagcctccttccagagaagctcagctactgactttgcaaaacacatctgaatttgatatccttgttattggaggaggagcaacaggaagtggctgtgcgctagatgctgtcaccagaggactaaaaacagcccttgtagaaagagatgatttctcatcagggaccagcagcagaagcactaaattgatccatggtggtgtgagatatctgcagaaggccatcatgaagttggatattgagcagtataggatggtaaaagaagcccttcatgagcgtgccaacctgctagaaattgctccccatttatcagctccattgcctataatgcttccagtttacaagtggtggcagttaccttactactgggtaggaatcaagctgtatgatttggttgcaggaagcaattgcctaaaaagcagttatgtcctcagcaaatcaagagcccttgaacatttcccaatgctccagaaggacaaactggtaggagcaattgtctactatgacggacaacataacgatgcacggatgaaccttgccattgctctgactgctgccaggtatggggctgccacagccaattacatggaggtagtgagcttgctcaagaagacagacccccagacagggaaagtgcatgtgagcggcgcacggtgcaaggatgtcctcacagggcaggaatttgacgtgagagccaaatgtgttatcaatgccacgggacctttcacggactctgtgcgcaaaatggatgataaagacgcagcagctatctgccagccaagtgctggtgtccatattgtgatgcctggttattacagcccagagagcatgggacttcttgacccagcgaccagtgatgggcgagttattttcttcttaccctggcaaaagatgacgatcgctggcactactgatactccaactgatgttacacaccatccaattccttcagaagaagatatcaacttcattttgaatgaagtgcgtaattacctgagttgtgatgttgaagtgagaagaggggatgtcctggcagcatggagtggaatccgtcctcttgttacagaccccaaatctgcagatactcagtctatctcccgaaatcatgttgttgatatcagtgagagtggccttattactatagcaggtggaaagtggacaacttatcggtctatggcagaagataccataaatgctgctgtcaaaactcataatttaaaagcaggaccaagtagaacagttgggcttttccttcaagggggtaaagattggagccccacactctacattaggcttgtgcaggattatggacttgaaagcgaggtggcacagcatcttgccgccacctatggtgataaggcctttgaggtggccaaaatggcaagtgtgactggcaaaaggtggcctattgttggagtacatcttgtgtcagaatttccatatattgaagcagaggtgaaatatgggattaaggagtatgcctgcactgctgtggatatgatttcacgtcgtactcgcctggcctttctaaatgtccaggcagcagaggaagccctacccaggattgttgaactgatgggcagggaactgaattgggatgattataagaagcaggaacaacttgaaacagccaggaagtttctatattatgaaatgggctataaatctcgatcagaacagttaacagatcgctctgaaattagcctactgccttcagacattgacaggtataagaagagatttcataagtttgatgcagaccagaaaggctttattaccattgttgatgttcagcgtgtattagagagtatcaatgtccaaatggatgaaaatacactccatgaaattctaaatgaagttgatttgaataaaaatggacaggttgaactcaatgaatttttgcagctgatgagtgctattcaaaaaggaagggtatctggaagccggcttgctatactaatgaaaactgcagaagagaacctcgacagaagagttccaattccagtggaccgtagttgtggaggattgtgagtctgggcagtaaatccacagccaacaaacatagaaacgacaaatcaccatgtaacaaccagagatgactgaaaccactctgaaataatgaatgtggatagctgccttttttaacactagaaaacattccaaaactttaaggtgttggtgtatttgccagctttatttgctgtactttatttgtatttgccattcagtctagcttttaagtatatttttttctttttctcattttcaatgcacattagttttgcatctgttttgtgacctgttagatgtgacacattctctttttgtttattcccttattc

SEQ ID NO: 271 - DNA, 3795 bp, human
cagcggcggtggcccaggtagaggggtccgcgctggcggcggcggcggcgctgttccccgcgcggtccgcggagcggggtccgggctgcgcgacgtggggcggcggcggcactgcggccccggcccaagcccgaccccgggtcccctcctcggccgccccccgcccggccgcccgccctcgggcctccccccgggccctcggtcccctcccccgctggcggggcccggacagaagatggtgcagaagaaaccagccgaacttcagggtttccaccgttcgttcaaggggcagaaccccttcgagctggccttctccctagaccagcccgaccacggagactctgactttggcctgcagtgctcagcccgccctgacatgcccgccagccagcccattgacatcccggacgccaagaagaggggcaagaagaagaagcgcggccgggccaccgacagcttctcgggcaggtttgaagacgtctaccagctgcaggaagatgtgctgggggagggcgctcatgcccgagtgcagacctgcatcaacctgatcaccagccaggagtacgccgtcaagatcattgagaagcagccaggccacattcggagcagggttttcagggaggtggagatgctgtaccagtgccagggacacaggaacgtcctagagctgattgagttcttcgaggaggaggaccgcttctacctggtgtttgagaagatgcggggaggctccatcctgagccacatccacaagcgccggcacttcaacgagctggaggccagcgtggtggtgcaggacgtggccagcgccttggactttctgcataacaaaggcatcgcccacagggacctaaagccggaaaacatcctctgtgagcaccccaaccaggtctcccccgtgaagatctgtgacttcgacctgggcagcggcatcaaactcaacggggactgctcccctatctccaccccggagctgctcactccgtgcggctcggcggagtacatggccccggaggtagtggaggccttcagcgaggaggctagcatctacgacaagcgctgcgacctgtggagcctgggcgtcatcttgtatatcctactcagcggctacccgcccttcgtgggccgctgtggcagcgactgcggctgggaccgcggcgaggcctgccctgcctgccagaacatgctgtttgagagcatccaggagggcaagtacgagttccccgacaaggactgggcccacatctcctgcgctgccaaagacctcatctccaagctgctggtccgtgacgccaagcagaggctgagtgccgcccaagtcctgcagcacccctgggttcaggggtgcgccccggagaacaccttgcccactcccatggtcctgcagaggaacagctgtgccaaagacctcacgtccttcgcggctgaggccattgccatgaaccggcagctggcccagcacgacgaggacctggctgaggaggaggccgcggggcagggccagcccgtcctggtccgagctacctcacgctgcctgcagctgtctccaccctcccagtccaagctggcgcagcggcggcaaagggccagtctgtcctcggccccagtggtcctggtgggagaccacgcctgaccctcccatctcccctctgtacataggtcacccgtcccccaatcaaatctaaaggttttttaagctatcgccagccggtgtccagcgggctgcccctcctctgcctggattcccaggcactaagctcagctgaggggggtgttttatagaaggtttttgcttttgggttttttttttcctgtttccacccctccccgttattttttcctttggatggttaaaagcattgcaggcacccgggaaggtgagcagagggtaggtgggtgggcttgtcccctccccggtcccccgccctgctcacctctactatgaaggtgcccccaggtcacctgtgctgcccgccatctgcccacgtggcttgcagtgactcaggagagcaggcccacagcgtttgccatcttgcagagctggggaggggcacaggaccctgccctcgtgttccctcccagcccgcagtatttcagggacaggctcttcccctctatccctcaccctgagagcacccctggtggcttggttggggaagggaggggctgcctgtctctggaggtgtcaggcaggcaggtggcaggcagctcacccacccaccccatgggatcccccagcccttcacccgcgcctgccttgtccccatgatagttgacaatcggggcttcctgcaaggcccgtctgtctgtccaggactcctggtggccagattcggcctccgaccttgaccttaaactgcagctgaccccaggggctcgccgctgcccctcccctccacaccaaggcctgagacagcaggagccccgcctggcccgaagccgtttccaccgcagcaggcagaggggctggacaggcactgtcagccaatgtggggggtcctgaagacacccccttggggcacccgagtgccccttctcagggctcagtctgaccgtagccacgtcctgcctcgcgccgcccctcgggcctgacctggaagctccgtcagctccgtccttgtccttagagctgagcccagaccccggggtctggccgaatcctcacccccagggcagtgtttttggtctgccaccttcaggaaaacggctgcggcctcggcctcccttcgggcacccaggaatgcgggggtctgctcagtccccccaccctccatgctccaacccccgggggctgcggagcctgctgccccctccccgcgggtggggacgttctatgcaatacagggttccactttagaagtgcgcgcggctagggtcaccgcccgcccttcccggcgcagcccccgagctccacagctggggcagcccctctggcttctaaatccgcggtcgggattcttcctcctgtttagttttttagtttttccttaaaaaaaaacaacacatcgatggactttgcttccctgttcttgaagaatacttgaatgtcggggggcctgggggtgggggcctcggagaccgtctgcctggccctgctgcccctcctgaatctcgtatgatggtcacagtccggtggccgtgggggtgctctgccttccctggtccccactgcccatatctgtggactgccccttccaaagacccctggggggggtggggcattccgcccacccctttcccccatcacttctcgcctgtcagtgattccatgtttcgtaacgggggattctctgcctttttgtatcaaagaacaagcaaatggacccccgcccgctgcaggcgcccatagccatcgggtctctaaagctgagtggctagcagcgtttgtttgtttgtttttttttttttttctgaaggtgggacagtcacttcctcctccctccccacccctgtcgcatccacgtgcgacctggaggactggtcagaaccgttactgtgaatgagtgaagatcctggaggaccctgggccccaggccagctcccatcgctgggggacggtgaacggccatgtgttaatgttacgatgtttttaaaagacaaaaaaaaaaaaaaaacctcaaaagtttttttaaagtgggggaaaaacatccaagcactttaattccaatgtaccaggtgaactgacggagctcagaagttttcctttacaccaactgtcaatgccggaattttgtattctgttttgtaaagatttaataaaagtcaaaaaacttgcaaaaaaaaaaaaaaaaaaaa

SEQ ID NO: 272 - DNA, 5211 bp, human
agcggagatggcggcagggtcgggtgggagtgggggctctgggggaggccctggaccggggccgggcgggggtgggggccccagcgggagcggctcaggaccggggtccaacgggggtctgggcagcggcggggaactgcacccgcgcactgggcgcttggtgagcctgtcggcctgtgggcgtacggcgcggcggcagcagccgggccaggagtttaaccacgggctggtgttgagccgagaacccttgcgcgatggacgcgtcttcaccgtccgcatcgaccgcaaggtcaactcctggagcggctccattgagattggggtgacagcgctggaccccagtgtgctggactttccaagcagtgccacgggcctgaaggggggctcgtgggtagtgtcgggctgctctgtgctgagagatggacgctctgtgttggaggagtatggtcaggacctggaccagcttggtgaaggggaccgcgtgggcgtggagcgcacagttgctggggagcttcggctctgggtgaatgggcgggattgcggtgtggctgccacaggcctgccccctcgtgtctgggccgtcgtggacctttatggcaagtgcacccagatcaccgtgctaccccctgagccaggcttcagcccccctactcccatccccacacctcccctcgagcccttggcccccactgaagactctgccttggctgaacaggggacctctgcagatgaagccttcatggtgtccccagcgcaggcccggccggagacgtttcctaacagccttgagtcgcataatgactttgccaacatggagctgtctgaggtggtgagcaacaccatcctgtctgcctacaatggagggctcctgaatgtgaacctgagctccccaccggcaggggaaggcctgggatctagcggtgctgccacctcgcccattctcacttccaacgatgccctgctctttcatgaaaagtgcgggaccctcatcaaactcagcaacaataataagacggctgagcgccggcggcccctggatgaattcaacaatggggttgtcatgaccaatcgcccccttcgggacaatgagatgtttgagatccgtatcgacaagcttgttgataagtggtcaggctccattgagattggggtcaccacccacaaccccaacagtttggagtacccagccaccatgaccaacctccagtcaggcaccatcatgatgagcggctgtggaatcctgaccaatggcaagggcacccgccgggagtactgcgaattcagtctggatgagttgcaggagggtgaccacattggcctcacaaggaagtccaactctgccctacacttcttcattaatggtatcgatcagggagtggcaacccccttgacgcccccagtggtgtatggtgtggtggacttgtacgggatggcagtgaaggtgaccatcgtccacaataacaaccacagtgaccgtctccgccgaaacaacgccatcctgcgggcgctgtcccccgagggtgctctccgccgtgctgcccctgccgcccaggcagaacctgagcgcctgctcttccaccccaactgtgggcagaaggcagccatcacccacgagggacgcactgccctgaggccccatgccaccgatgacttcaatcacggcgtggtgctgagcagcagagccctgcgggatggagaggtgttccaggtgcgcatcgacaagatggtggacaaatgggctggctccattgaaattggtgtcaccacccacaaccctgcctacctccagttgccctccaccatgaccaacttgcgctctgggacctggatgatgactgggaatggggtgatgcacaatgggacgaccatcctggatgaatacgggcacaatctggaccgcctcaaggcaggggacacggtgggcgtggtacggcgggaggacgggactctccacttctttgtcaatgggatgactcagggccctgctgcctggaacgtgcccccgggcgtctatgctgtcgtcgatctctatggccaggcggcccaggccaccattgtggacgacgtggaggtggctccagttcctgaaccactccctgaggggaacaaccaggtgtctccaagctctccgtcctcaggggccgggggctctgacctgcgcttccatcagctgcacggcagtaacgcagtcatcactaacgggggccgcaccgccctccgccacaactgtcgcagcgagtttaatgacgccatcgtcatctccaaccgggccctgcgggatggagagctgtttgaaattgtcattcagaagatggtggaccgctggtcaggctccattgaggctggagtgactgctattcggcctgaagacctggaattccccaacaccatgacagacattgactatgacacatggatgctgagtggtacagccatcatgcaagacggtaacacgatgcgcaacaattatgggtgtgacctggatgcgctgggcacaggtgcacgcattggcatgatgcgaactgccaagggcgacctgcactacttcatcaacggccaggaccaaggcgctgcctgctcgggcctgcctccggaggtgtatgcggtagtcgatctctatggccagtgtgtccaagtgtccatcaccaatgccaccggccccatggacaacagcctggcgaccagcaacactgccaccgagaagtccttcccactgcactccccagtggctggcgtggctcaccgattccacagtacttgcggcaagaacgtcactctagaggaggatggcacgagggcagtgcgtgccgctggctatgctcatggccttgtcttcagtaccaaggagctgagggctgaggaagtctttgaggtgaaagtggaagagctagatgagaagtgggcaggttccctgcggctggggctgaccacactagcaccgggggagatgggacccggggcaggcggtggtggcccagggctgcctccttccctgccagagctccggacgaagaccacttggatggtatccagctgtgaagtgaggcgtgatgggcagctccagaggatgaactatggccggaacctagagaggctgggggtggggagccgtgtgggtgttcgtcggggggcagatgacacgatgcacatcctggtggatggagaggatatggggcctgcagccactggcattgccaagaacgtgtgggctgtgttggatctctacgggccagtccgcggtgtgtcaattgtcagttccacgagactggaggagtcagaaggcacccagcctccttcccccagttcagacaccggcagtgagggcgaggaggatgacgagggcgaggagcatggcctgggaggccagaatgaagtgggtattatacccaccaccctcgagttcctggagaaccatgggaagaatatccttttgtctaatgggaaccgtacggccacacgggtggccagctacaatcagggcatcgttgtcatcaaccaacctctggtgccccagctgctggtgcaggtgcggatagatttcctaaaccgacagtggacatcttcccttgtcctgggagtcatcacctgcgcgcctgagaggctcaacttccctgcttctgcctgtgccctcaaacgggcagcctggctgctgcggggccgtggggtcttccacaacggtctcaagatctgcgagaagtttgggcccaatctggacacgtgccctgaaggcaccatcctgggactgcggctggacagctctggggggctgcatcttcatgttaatggggtggaccagggggtagctgtgccagatgtgccccagccctgccatgcgcttgtggacctctatgggcagtgtgagcaggtgacaatcgtgaaccctgagccaggggctgccagtgggaaaagtgctggaacccaaggggacatggagaaagcagacatggtggacggtatcaaagagagtgtgtgctggggtccaccacctgccgctagtcctctaaagagctgcgagtaccatgccctttgctctcgcttccaagaactcctgctgcttcccgaagattatttcatgcctccgccaaagcgaagcctgtgctactgtgagtcttgccggaagctgcgaggagacgaggcccacaggcgcagaggggagcctccccgggaatatgcactgccctttggctggtgcaggttcaacctcagagtgaatccccgcctggaggctgggacactaaccaagaagtggcacatggcatatcacgggagcaatgttgccgctgtacggagagtgctggaccgaggggagctgggagcaggtactgcctccatcctgagctgccgtcctttgaagggagaacctggggtagggttcgaggagcctggcgagaactgtgcacctcctcgggaggagcagccccctcctgtgctgctttccccctcccttcaatatgctggggcggagaccctggcctccaaagtgcaattccgggaccccaaatcccagcggacgcaccaggctcaggtggcgttccaggtgtgtgtgcgccctggctcctacaccccgggacccccttccgctgcccttggagaacctcctgaccctcacttcagtccagccgaacttgagtgggtcactaaggagaagggggccacactcctctgtgccctgctggtacgggtggaatgaggggtgagacaccactactacaagcacagtcgggccgcgggcccatggactctgagtggcgactgcctccacctcattcccgtgactcgtggcatgcgcaggtgctggagcttggcagccgcgcaggagcatgtaggcaggctctcagatgtaggtggcaagtggcacagctccatgtccggaggcccagcactccgtctgatgggaggagtcgtgggagcccagctccaggccctggtacccctcttcatgcactgatttggggaacatgactcccttttactcccctaccccacatcacttaatttatttccgtttttgtttctggttactgtgaatcccagaggagtctctccctgtgcccacatgaagctgctttttccggggccaccgggcgggagtggggaagggtgggcgcacggaagatgggggcctctgtacagttgttactgactctgatttctaaggagccaataaacaccgtctcagagaaaaaaaaaaaaaaaaaaaaaaaaaaaaaa

SEQ ID NO: 273 - DNA, 3317 bp, human
agttctcgcgggacaccgacggggagcggaagccaggaggtattgctgcttcggcgaccgggcggcggcagcggcggcggcggctgtggcagagtctgtgcctgtggcggtgacggcggcgggagcaagcgctgccctcgcagagcagccttggggtcgccggccgctcgcagcgttgtggaggggcgggccggacgctgagcggagcagctgcgccacgggtggcattgtgtgtcccagagtgccggagcgagtcccagaagagaggcgaggctaagcccagagcgctgggttgcttcagcagggaagactcccttccccctgcttcaggctgctgagcactgagcagcgctcagaatggaagccatcgccaaatatgacttcaaagctactgcagacgacgagctgagcttcaaaaggggggacatcctcaaggttttgaacgaagaatgtgatcagaactggtacaaggcagagcttaatggaaaagacggcttcattcccaagaactacatagaaatgaaaccacatccgtggttttttggcaaaatccccagagccaaggcagaagaaatgcttagcaaacagcggcacgatggggcctttcttatccgagagagtgagagcgctcctggggacttctccctctctgtcaagtttggaaacgatgtgcagcacttcaaggtgctccgagatggagccgggaagtacttcctctgggtggtgaagttcaattctttgaatgagctggtggattatcacagatctacatctgtctccagaaaccagcagatattcctgcgggacatagaacaggtgccacagcagccgacatacgtccaggccctctttgactttgatccccaggaggatggagagctgggcttccgccggggagattttatccatgtcatggataactcagaccccaactggtggaaaggagcttgccacgggcagaccggcatgtttccccgcaattatgtcacccccgtgaaccggaacgtctaagagtcaagaagcaattatttaaagaaagtgaaaaatgtaaaacacatacaaaagaattaaacccacaagctgcctctgacagcagcctgtgagggagtgcagaacacctggccgggtcaccctgtgaccctctcactttggttggaactttagggggtgggagggggcgttggatttaaaaatgccaaaacttacctataaattaagaagagtttttattacaaattttcactgctgctcctctttcccctcctttgtcttttttttcatccttttttctcttctgtccatcagtgcatgacgtttaaggccacgtatagtcctagctgacgccaataataaaaaacaagaaaccaagtgggctggtattctctctatgcaaaatgtctgttttagttggaatgactgaaagaagaacagctgttcctgtgttcttcgtatatacacacaaaaaggagcgggcagggccgctcgatgcctttgctgtttagcttcctccagaggaggggacttgtaggaatctgccttccagcccagacccccagtgtattttgtccaagttcacagtagagtagggtagaaggaaagcatgtctctgcttccatggcttcctgagaaagcccacctgggctgggcgcggtggctcacgcctgtaatcccagcactttgggaggccaaggtgggcggatcacaaggtcaggagttcgagaccaacctagccaacatggtgaaaccccgtctctactaaaaataagaaattagccgggtgtggcacgcacctgtagtcccagctacttgggagcctgaggcaggagaatcgcttgaacctgggaagtggaggttgagtgagccgggaccgtgccattgtactccagcctgggtgacagagcgagattccgtctcaaaaaaaaaaaaaaaaagcccacctgaaagcctgtctctttccactttgttggcccttccagtgggattatcgagcatgttgttttttcatagtgcctttttccttatttcaagggttgcttctgagtggtgttttttttttttttttaatttgttttgttttaaaataagttaaaggcagtccagagcttttcagccaatttgtctcctactctgtgtaaatatttttccctccgggcaggggagccagggtagagcaaaggagacaaagcaggagtggaaggtgaggcgttctcctgcttgtactaagccaggaggctttaagctccagctttaagggttgtgagccccttgggggttcagggaactgcttgcccagggtgcagtgtgagtgtgatgggccaccggggcaagagggaaggtgaccgcccagctctcccacatcccactggatctggcttacaggggggtcggaagcctgtcctcaccgtctcgggggttgtggcccccgccccctccctatatgcacccctggaaccagcaagtcccagacaaggagagcggaggaggaagtcatgggaacgcagcctccagttgtagcaggtttcactattcctatgctggggtacacagtgagagtactcacttttcacttgtcttgctcttagattgggccatggctttcatcctgtgtcccctgacctgtccaggtgagtgtgagggcagcactgggaagctggagtgctgcttgtgcctcccttcccagtgggctgtgttgactgctgctccccacccctaccgatggtcccaggaagcagggagagttggggaaggcaagattggaaagacaggaagaccaaggcctcggcagaactctctgtcttctctccacttctggtcccctgtggtgatgtgcctgtaatctttttctccacccaaaccccttcccacgacaaaaacaagactgcctccctctcttccgggagctggtgacagccttgggcctttcagtcccaaagcggccgatgggagtctccctccgactccagatatgaacagggcccaggcctggagcgtttgctgtgccaggaggcggcagctcttctgggcagagcctgtccccgccttccctcactcttcctcatcctgcttctcttttcctcgcagatgataaaaggaatctggcattctacacctggaccatttgattgttttattttggaattggtgtatatcatgaagccttgctgaactaagttttgtgtgtatatatttaaaaaaaaaatcagtgtttaaataaagacctatgtacttaatcctttaactctgcggatagcatttggtaggtagtgattaactgtgaataataaatacacaatgaattcttcaaaaaaaaaaaaaaa

SEQ ID NO: 274 - DNA, 2169 bp, human
gccagagcggcgcggcctggaagaggccagggcccgggggaggcgacggcagcggcggcggctggggcagcccgggcagcccgagccccgcagcctgggcctgtgctcggcgccatgagcggcggcgggccttcgggaggcggccctgggggctcgggcagggcgcggactagctcgttcgcggagcccggcggcggaggcggaggaggcggcggcggccccggaggctcggcctccggcccaggcggcaccggcggcggaaaggcatctgtcggggccatgggtgggggcgtcggggcctcgagctccgggggtggacccggcggcagcggcggaggaggcagcggaggccccggcgcaggcactagcttcccgccgcccggggtgaagctgggccgtgacagcgggaaggtgaccacagtcgtagccactctaggccaaggcccagagcgctcccaagaagtggcttacacggacatcaaagtgattggcaatggctcatttggggtcgtgtaccaggcacggctggcagagaccagggaactagtcgccatcaagaaggttctccaggacaagaggttcaagaaccgagagctgcagatcatgcgtaagctggaccactgcaatattgtgaggctgagatactttttctactccagtggcgagaagaaagacgagctttacctaaatctggtgctggaatatgtgcccgagacagtgtaccgggtggcccgccacttcaccaaggccaagttgaccatccctatcctctatgtcaaggtgtacatgtaccagctcttccgcagcttggcctacatccactcccagggcgtgtgtcaccgcgacatcaagccccagaacctgctggtggaccctgacactgctgtcctcaagctctgcgattttggcagtgcaaagcagttggtccgaggggagcccaatgtctcctacatctgttctcgctactaccgggccccagagctcatctttggagccactgattacacctcatccatcgatgtttggtcagctggctgtgtactggcagagctcctcttgggccagcccatcttccctggggacagtggggtggaccagctggtggagatcatcaaggtgctgggaacaccaacccgggaacaaatccgagagatgaaccccaactacacggagttcaagttccctcagattaaagctcacccctggacaaaggtgttcaaatctcgaacgccgccagaggccatcgcgctctgctctagcctgctggagtacaccccatcctcaaggctctccccactagaggcctgtgcgcacagcttctttgatgaactgcgatgtctgggaacccagctgcctaacaaccgcccacttccccctctcttcaacttcagtgctggtgaactctccatccaaccgtctctcaacgccattctcatccctcctcacttgaggtcccccagcggcactaccaccctcaccccgtcctcacaagctttaactgagactccgaccagctcagactggcagtcgaccgatgccacacctaccctcactaactcctcctgagggccccaccaagcacccttccacttccatctgggagccccaagagggcgtgggaaggggggccatagcccatcaagctcctgccctggctgggcccctagactagagggcagaggtaaatgagtccctgtccccacctccagtccctccctcaccagcctcacccctgtggtgggctttttaagaggattttaactggttgtggggagggaagagaaggacagggtgttggggggatgaggacctcctacccccttggccccctcccctcccccagacctccacctcctccagaccccctcccctcctgtgtcccttgtaaatagaaccagcccagcccgtctcctcttcccttccctggcccccgggtgtaaatagattgttataatttttttcttaaagaaaacgtcgattcgcaccgtccaacctgccccgcccctcctacagctgtaactcccctcctgtcctctgcccccaaggtctactccctcctcaccccaccctggagggccaggggagtggagagagctcctgatgtcttagtttccacagtaaggtttgcctgtgtacagacctccgttcaataaattattggcatgaaaa

SEQ ID NO: 275 - DNA, 1639 bp, human
atcatctatatgttaaatatccgtgccgatctgtcttgaaggagaaatatatcgcttgttttgttttttatagtatacaaaaggagtgaaaagccaagaggacgaagtctttttctttttcttctgtgggagaacttaatgctgcatttatcgttaacctaacaccccaacataaagacaaaaggaagaaaaggaggaaggaaggaaaaggtgattcgcgaagagagtgatcatgtcagggcggcccagaaccacctcctttgcggagagctgcaagccggtgcagcagccttcagcttttggcagcatgaaagttagcagagacaaggacggcagcaaggtgacaacagtggtggcaactcctgggcagggtccagacaggccacaagaagtcagctatacagacactaaagtgattggaaatggatcatttggtgtggtatatcaagccaaactttgtgattcaggagaactggtcgccatcaagaaagtattgcaggacaagagatttaagaatcgagagctccagatcatgagaaagctagatcactgtaacatagtccgattgcgttatttcttctactccagtggtgagaagaaagatgaggtctatcttaatctggtgctggactatgttccggaaacagtatacagagttgccagacactatagtcgagccaaacagacgctccctgtgatttatgtcaagttgtatatgtatcagctgttccgaagtttagcctatatccattcctttggaatctgccatcgggatattaaaccgcagaacctcttgttggatcctgatactgctgtattaaaactctgtgactttggaagtgcaaagcagctggtccgaggagaacccaatgtttcgtatatctgttctcggtactatagggcaccagagttgatctttggagccactgattatacctctagtatagatgtatggtctgctggctgtgtgttggctgagctgttactaggacaaccaatatttccaggggatagtggtgtggatcagttggtagaaataatcaaggtcctgggaactccaacaagggagcaaatcagagaaatgaacccaaactacacagaatttaaattccctcaaattaaggcacatccttggactaaggattcgtcaggaacaggacatttcacctcaggagtgcgggtcttccgaccccgaactccaccggaggcaattgcactgtgtagccgtctgctggagtatacaccaactgcccgactaacaccactggaagcttgtgcacattcattttttgatgaattacgggacccaaatgtcaaactaccaaatgggcgagacacacctgcactcttcaacttcaccactcaagaactgtcaagtaatccacctctggctaccatccttattcctcctcatgctcggattcaagcagctgcttcaacccccacaaatgccacagcagcgtcagatgctaatactggagaccgtggacagaccaataatgctgcttctgcatcagcttccaactccacctgaacagtcccgagcagccagctgcacaggaaaaaccaccagttacttgagtgtcactcagcaacactggtcacgtttggaaagaatattaaaaaaaaaaaaaaaaaa

SEQ ID NO: 276 - DNA, 1004 bp, human
atgggtctggagctctacctggacctgctgtcccagccctgccgcgctgtttacatctttgccaagaagaacgacattcccttcgagctgcgcatcgtggatctgattaaaggtcagcacttaagcgatgcctttgcccaggtgaaccccctcaagaaggtgccggccttgaaggacggggacttcaccttgacggagagtgtggccatcctgctctacctgacgcgcaaatataaggtccctgactactggtaccctcaggacctgcaggcccgtgcccgtgtggatgagtacctggcatggcagcacacgactctgcggagaagctgcctccgggccttgtggcataaggtgatgttccctgtgttcctgggtgggccagtatctccccagacactggcagccaccctggcagagttggatgtgaccctgcagttgctcgaggacaagttcctccagaacaaggccttccttactggtcctcacatctccttagctgacctcgtagccatcacggagctgatgcatcccgtgggtgctggctgccaagtcttcgaaggccgacccaagctggccacatggcggcagcgcgtggaggcagcagtgggggaggacctcttccaggaggcccatgaggtcattctgaaggccaaggacttcccacctgcagaccccaccataaagcagaagctgatgccctgggtgctggccatgatccggtgagctgggaaacctcacccttgcaccgtcctcagcagtccacaaagcattttcatttctaatggcccatgggagccaggcccagaaagcaggaatggcttgcttaagacttgcccaagtcccagagcacctcacctcccgaagccaccatccccaccctgtcttccacagccgcctgaaagccacaatgagaatgatgcacactgaggccttgtgtcctttaatcactgcatttcattttgattttggataataaacctggctcagcctgagcctctgcttct

SEQ ID NO: 277 - DNA, 6996 bp, human
atggaccaaggcccttggcggtgcgttgcgcacccccggggcgccgcgactgaagtagcaatggacgcgctggagtcgttgttggacgaagtcgctctggaggggctcgatggcctgtgtctgccagcgctgtggagccggctggagacgcgagtgccgcccttcccgctgcctttggaaccctgcacgcaggagtttctctggcgggccctcgccacgcacccgggcatcagcttctatgaggagcctcgggagcgacccgacctacagctccaggaccggtatgaagaaattgatttggaaactggaattttggagtctaggagggacccggtggctttggaggatgtctaccccattcatatgatcttagagaataaggatggcatccagggctcatgccgctactttaaggagaggaaaaacattaccaatgacatcagaaccaagtccttgcagcctcgctgtacaatggtggaaccctttgacaggtgggggaagaaactgatcatcggttccctcccagcccatgcggtacaggcccttgatagcccaggagggggatcccgacctgaagctgcccgacttctcctactgcatcctggaacggctaggccggtccaggtgcaaggggagctccagcgagaccttcacaccactgctttcaaggttgatgctgggaagctgcactatcacagaaaaattttgaacaaaaacgggctgattacaatgcagtcccatgtgatccgattacccactggagcccagcaacactcaatcctcctcctactgaaccggtttcatgtggacaggaggagcaaatacgacatcctcatggagaagctttcggtcatgctgagcacacggactaaccacatagagacgctgggaaagctgagggaagagctggggctgtgcgaaaggacgtttaagcgtctgtaccagtatatgctgaacgccgggctagccaaggtggtgtctcttcgcttgcaagagatccaccctgaatgtggaccttgtaagacaaagaaagggaccgacgtcatggttcggtgcctcaagctgctgaaggaatttaaacggaatgaccatgatgatgacgaggacgaggaggtcatctccaagacagtgcctccagtggacattgtgttcgagcgggatatgctcacacagacctacgacctcattgagcgcagaggcacgaaaggaatttcccaagctgaaatccgagtggctatgaatgtgggaaaactagaagcaagaatgctgtgccgacttcttcaaagattcaaagttgtcaagggattcatggaagacgaaggtcggcagcgaaccaccaagtacatttcctgcgtgtttgcagaggagagcgacctaagccggcagtaccaaagagagaaggcccgcagcgagctcttgaccaccgtgagcctggcgtctatgcaggaggagtcgcttctgcctgaaggcgaggacaccttcctctctgagtcggacagtgaggaggagaggagcagcagcaagcggagaggcagagggtcccagaaagacacaagagcctctgcaaacctccggcccaagacccagcctcatcactccaccccaaccaagggtgggtggaaagttgtaaacctacacccattgaaaaagcagccgccctccttcccaggagctgctgaagagagagcctgccagagccttgccagcagggacagcctcttagataccagcagcgtctcagaacccaacgtgtcctttgtctcccactgtgcggacagcaacagtggtgacatagctgtgatcgaggaggtccggatggaaaacccaaaggagagtagcagttccctgaagactgggaggcacagctcaggccaagacaaaccacacgaaacttaccgactgctgaaacgcaggaatctgatcatagaagctgtcaccaatcttcgcttaatcgagagtttattcacgattcagaagatgatcatggatcaggagaagcaggaaggcgtgtccaccaagtgctgcaagaagtccattgtccgcttggtgcggaacctgtctgaggaaggtctcttgcgattgtatcggaccactgtcattcaagatggcatcaagaagaaggtggatctggtggtgcacccgtccatggaccagaacgaccctctagtgagaagtgccatcgagcaggtccgcttccggatctccaattcaagcacagccaacagggttaaaacttcccagcctccagtgccccaaggggaggcagaagaagacagtcaaggaaaagagggcccaagtggatcaggggactctcagctgagtgcttcctctagatcagaaagtggacggatgaaaaaaagtgataataaaatgggcataaccccgcttagaaattatcaccccattgtagttcccggactggggcgttctctaggatttctgcccaaaatgcctcgcctgcgggtggtccacatgtttctgtggtacctcatctacgggcaccctgccagcaacaccgtggagaagccaagcttcatcagtgaacggagaacgataaagcaggagtcaggcagggcaggcgtccggccgtcctcctctggaagtgcctgggaggcctgctctgaagccccatctaaaggcagccaagatggtgtcacctgggaggctgaagtggagcttgccacggagacagtgtatgtcgacgatgcctcgtggatgcgctacatccccccaatcccagtccacagggacttcggctttggctgggctctcgtcagcgacatcctcctctgccttcccctctccatcttcatccagattgtgcaagtcagctacaaggtggacaacctggaggaatttctgaacgacccgctgaagaagcacacgctgatccgctttctccccaggcccattcggcagcagcttctgtacaagaggcgttacattttttcggtggtggagaaccttcagaggctgtgctacatgggggtgctacagtttggtcccacggaaaagtttcaggataaagatcaggtctttatcttcttgaagaagaatgcagtcattgttgacactaccatctgcgacccacattacaacctgggccgcaggaggcggcccttcgagaggcgcctctatgtcctgaactcaatgcaggatgtggaaaactactggtttgacctgcagtgcgtctgcctcaacaccccactaggcgtggtgcgctgcccgcgcgtcaggaagaacagcagcacagaccagggcagcgacgaggagggcagcctgcagaaggagcaggagagcgccatggacaagcacaacctggagcgcaagtgcgccatgctggagtacaccactggaagccgtgaggtggtggatgaaggcttgatccctggagatgggctgggtgccgcagggctcgattccagcttctacggacacctcaagcgcaactggatctggaccagctacatcatcaaccaggccaaaaaggagaacactgccgcagagaatggactcacagtgaggctccagacatttctgtccaagcgcccaatgcccctcagtgccagaggcaacagcaggttgaatatttggggggaagcaagagtaggctccgagctctgtgctggctgggaagagcagtttgaggtggaccgagagccctcgctggaccgaaaccggagagtgaggggtgggaaaagccagaagcggaagcggctgaagaaggaccctgggaagaagatcaagagaaagaagaaaggagagttcccaggagaaaaaagcaaaaggctgcgctaccatgatgaagccgaccagagtgccctgcatcggatgacgcggcttcgtgtcacctggtctatgcaggaggatgggctgcttgtgctgtgccgcattgccagcaatgtcctcaacaccaaggtgaagggtccatttgtcacctggcaggtggtacgggacattttgcatgccacgtttgaagagtctttggataaaacatctcattcccttggacgaagagctcgctacatagtcaaaaacccacaggcctatctcaactataaagtgtgcctggccgaggtgtaccaggataaagcacttgttggagatttcatgaatcgaagaggtgactatgatgacccaaaggtttgtgccaacgagtttaaagaatttgtggagaagcttaaagaaaagttcagttcagccctaaggaattctaaccttgaaatcccagacacactccaggagctgttcgccaggtaccgagttttggcaattggggatgaaaaagatcaaaccaggaaagaggatgaacttaacagcgtggatgacatccactttctggtgcttcagaacctgatccagagcacgctggccctctcagacagtcagatgaagtcctaccagtcattccagactttccgcctctatcgggagtacaaggaccacgttcttgtgaaggccttcatggagtgccagaagaggagcttggtcaaccggcgccgggtcaaccacacgctgggccccaagaagaaccgggccctccccttcgtgccaatgtcctaccagctatcccagacctactacaggatttttacgtggcgatttccaagcaccatctgcacggagtcattccagtttttggacagaatgcgggctgccggcaagttggaccagcctgatcgtttctctttcaaagaccaggataataacgagcccacaaacgacatggtggccttttcactggacggccctggaggaaattgtgtggccgtcctgaccctcttctctctgggcctcatttctgtggatgtcaggatcccggagcagatcatcgtggtagacagctcaatggtggagaatgaggtcatcaaaagcttggggaaggacggcagcctggaggatgacgaggatgaagaggatgacttggacgaaggtgtagggggcaagcgccggagcatggaggtgaaacctgcgcaagcctcccacaccaactacctgctgatgaggggctactactcccccggcatcgtcagcacccgcaacctcaaccccaacgacagcattgtggtcaactcctgccagatgaagttccagctccgctgcacccctgtgcccgcccggctcaggcccgctgccgctcctctggaagagctaacaatgggaacctcctgcctccctgatacgttcaccaagctgataaacccccaggaaaacacctgcagcttggaggagtttgtcctccagctggagctgtctgggtatagtcccgaagacctgactgctgccttggagatcttggaagccattatagccacgggttgttttgggattgacaaggaggagctgcgcagacggttctcggccttggagaaggcaggtggtgggcgcaccaggacattcgcagattgcatccaggccctcctggagcagcatcaggtgctggaggtcggtggcaacactgcgcgcctggtagccatgggctctgcctggccttggctcctgcactccgtgcggctgaaagacagagaagacgccgacatccagagagaagacccccaggccagacccctggaggggtcttccagtgaggacagcccccccgaggggcaggcacctccttctcacagcccccggggcaccaagaggcgcgccagctgggccagtgagaatggggagaccgacgccgagggcacccagatgacccctgccaagaggccagcgctccaggactcaaatttggcccccagccttgggcccggagctgaagatggggcagaagcccaggccccatctccacccccagctcttgaagacaccgctgcagcgggagcagcacaggaagaccaagagggtgtcggtgagttcagttccccaggccaagagcagctgagcggccaggcgcagcctccagagggctctgaagaccccagagggttcacagagagtttcggagctgccaacatctcccaggcagcacgggaaagggactgtgagagtgtctgcttcatcggccggccgtggcgtgtcgtggatggccacctgaaccttcctgtatgcaagggtatgatggaggccatgctgtaccacatcatgaccaggcctggcatccccgagagctccctgctgcgccactaccagggggtcctgcagcccgtcgccgtgctggagttgctccagggcctggagtccctcggctgcatccggaagcgctggctgagaaagccaaggcctgtctcgctcttctctacacccgtggtggaagaggtggaagtgccctccagcctggacgagagccccatggctttctatgagcccaccttggactgtaccctccggctgggccgtgtgttcccccacgaggtcaactggaacaagtggatccacctctaggacccctgtgggcgtcccctccctcccagccaccgcctgccacaccactcctgcctggtgctcggcagaccccactgtgccctggccttgggtctgccgagcctcctgcagcaggggacgggtgctttggccagagtcacagactgacacgtttcccactgtactggaactctggaaagaggggctccccgacctgcccatcccccaggctcttctgggccttccccttgggaactggcctcatcacactgggagttggtgcttcttgtctctgggtctccagagtttgccccgcctgtgcacacctcacattccagactctagccatctcggcaggatctcctggctccttgagtgcccaggtgccaccaagaggaagggccttgtgggatacaccttgcagaatagggatcggtgtgccccgctgcgaggggccccccatgggggctgtggcccctccgcaggcaggacatcccaacccctggctgggactgaaccacccagagcggagcggctcccttttcagccttgtgagtcacctggcaggccccagctgggctggctgtccgtgtccctcagcctggctggtgattccttgcaggaggg

SEQ ID NO: 278 - DNA, 873 bp, human
cgcagtttgaatcgcggtgcgacgaaggagtaggtggtgggatctcaccgtgggtccgattagccttttctctgccttgcttgcttgagcttcagcggaattcgaaatggctggcggtaaggctggaaaggactccggaaaggccaagacaaaggcggtttcccgctcgcagagagccggcttgcagttcccagtgggccgtattcatcgacacctaaaatctaggacgaccagtcatggacgtgtgggcgcgactgccgctgtgtacagcgcagccatcctggagtacctcaccgcagaggtacttgaactggcaggaaatgcatcaaaagacttaaaggtaaagcgtattacccctcgtcacttgcaacttgctattcgtggagatgaagaattggattctctcatcaaggctacaattgctggtggtggtgtcattccacacatccacaaatctctgattgggaagaaaggacaacagaagactgtctaaaggatgcctggattccttgttatctcaggactctaaatactctaacagctgtccagtgttggtgattccagtggactgtatctctgtgaaaaacacaattttgcctttttgtaattctatttgagcaagttggaagtttaattagctttccaaccaaccaaatttctgcattcgagtcttaaccatatttaagtgttactgtggcttcaaagaagctattgattctgaagtagtgggttttgattgagttgactgtttttaaaaaactgtttggattttaattgtgatgcagaagttatagtaacaaacatttggttttgtacagacattatttccactctggtggataagttcaataaaggtcatatcccaaactaaaa

SEQ ID NO: 279 - DNA, 1047 bp, human
caattgtgttcgcagccgccgccgcgccgccgtcgctctccaacgccagcgccgcctctcgctcgccgagctccagccgaaggagaaggggggtaagtaaggaggtctctgtaccatggctcgtacaaagcagactgcccgcaaatcgaccggtggtaaagcacccaggaagcaactggctacaaaagccgctcgcaagagtgcgccctctactggaggggtgaagaaacctcatcgttacaggcctggtactgtggcgctccgtgaaattagacgttatcagaagtccactgaacttctgattcgcaaacttcccttccagcgtctggtgcgagaaattgctcaggactttaaaacagatctgcgcttccagagcgcagctatcggtgctttgcaggaggcaagtgaggcctatctggttggcctttttgaagacaccaacctgtgtgctatccatgccaaacgtgtaacaattatgccaaaagacatccagctagcacgccgcatacgtggagaacgtgcttaagaatccactatgatgggaaacatttcattctcaaaaaaaaaaaaaaaatttctcttcttcctgttattggtagttctgaacgttagatattttttttccatggggtcaaaaggtacctaagtatatgattgcgagtggaaaaataggggacagaaatcaggtattggcagtttttccattttcatttgtgtgtgaatttttaatataaatgcggagacgtaaagcattaatgcaagttaaaatgtttcagtgaacaagtttcagcggttcaactttataataattataaataaacctgttaaatttttctggacaatgccagcatttggatttttttaaaacaagtaaatttcttattgatggcaactaaatggtgtttgtagcatttttatcatacagtagattccatccattcactatacttttctaactgagttgtcctacatgcaagtacatgtttttaatgttgtctgtcttctgtgctgttcctgtaagtttgctattaaaatacattaaactat

SEQ ID NO: 280 - DNA, 2091 bp, human
gagcggagccgcgggcgggagggcggacggaccgactgacggtagggacgggaggcgagcaagatggcgcagacgcagggcacccggaggaaagtctgttactactacgacggggatgttggaaattactattatggacaaggccacccaatgaagcctcaccgaatccgcatgactcataatttgctgctcaactatggtctctaccgaaaaatggaaatctatcgccctcacaaagccaatgctgaggagatgaccaagtaccacagcgatgactacattaaattcttgcgctccatccgtccagataacatgtcggagtacagcaagcagatgcagagattcaacgttggtgaggactgtccagtattcgatggcctgtttgagttctgtcagttgtctactggtggttctgtggcaagtgctgtgaaacttaataagcagcagacggacatcgctgtgaattgggctgggggcctgcaccatgcaaagaagtccgaggcatctggcttctgttacgtcaatgatatcgtcttggccatcctggaactgctaaagtatcaccagagggtgctgtacattgacattgatattcaccatggtgacggcgtggaagaggccttctacaccacggaccgggtcatgactgtgtcctttcataagtatggagagtacttcccaggaactggggacctacgggatatcggggctggcaaaggcaagtattatgctgttaactacccgctccgagacgggattgatgacgagtcctatgaggccattttcaagccggtcatgtccaaagtaatggagatgttccagcctagtgcggtggtcttacagtgtggctcagactccctatctggggatcggttaggttgcttcaatctaactatcaaaggacacgccaagtgtgtggaatttgtcaagagctttaacctgcctatgctgatgctgggaggcggtggttacaccattcgtaacgttgcccggtgctggacatatgagacagctgtggccctggatacggagatccctaatgagcttccatacaatgactactttgaatactttggaccagatttcaagctccacatcagtccttccaatatgactaaccagaacacgaatgagtacctggagaagatcaaacagcgactgtttgagaaccttagaatgctgccgcacgcacctggggtccaaatgcaggcgattcctgaggacgccatccctgaggagagtggcgatgaggacgaagacgaccctgacaagcgcatctcgatctgctcctctgacaaacgaattgcctgtgaggaagagttctccgattctgaagaggagggagaggggggccgcaagaactcttccaacttcaaaaaagccaagagagtcaaaacagaggatgaaaaagagaaagacccagaggagaagaaagaagtcaccgaagaggagaaaaccaaggaggagaagccagaagccaaaggggtcaaggaggaggtcaagttggcctgaatggacctctccagctctggcttcctgctgagtccctcacgtttcttccccaacccctcagattttatattttctatttctctgtgtatttatataaaaatttattaaatataaatatccccagggacagaaaccaaggccccgagctcagggcagctgtgctgggtgagctcttccaggagccaccttgccacccattcttcccgttcttaactttgaaccataaagggtgccaggtctgggtgaaagggatacttttatgcaaccataagacaaactcctgaaatgccaagtgcctgcttagtagctttggaaaggtgcccttattgaacattctagaaggggtggctgggtcttcaaggatctcctgtttttttcaggctcctaaagtaacatcagccatttttagattggttctgttttcgtaccttcccactggcctcaagtgagccaagaaacactgcctgccctctgtctgtcttctcctaattctgcaggtggaggttgctagtctagtttcctttttgagatactattttcatttttgtgagcctctttgtaataaaatggtacatttct

SEQ ID NO: 281 - DNA, 2376 bp, human
gaggaggagtggggaccgggcggggggtggaggaagaggcctcgcgcagaggagggagcaattgaatttcaaacacaaacaactcgacgagcgcgcacccaccgcgccggagccttgccccgatccgcgcccgccccgtccgtgcggcgcgcgggcggagacgccgtggccgcgccggagctcgggccgggggccaccatcgaggcgggggccgcgcgagggccggagcggagcggcgccgccaccgccgcacgcgcaaacttgggctcgcgcttcccggcccggcgcggagcccggggcgcccggagccccgccatgtcgcgatccaaccggcagaaggagtacaaatgcggggacctggtgttcgccaagatgaagggctacccacactggccggcccggattgacgagatgcctgaggctgccgtgaaatcaacagccaacaaataccaagtcttttttttcgggacccacgagacggcattcctgggccccaaagacctcttcccttacgaggaatccaaggagaagtttggcaagcccaacaagaggaaagggttcagcgaggggctgtgggagatcgagaacaaccctactgtcaaggcttccggctatcagtcctcccagaaaaagagctgtgtggaagagcctgaaccagagcccgaagctgcagagggtgacggtgataagaaggggaatgcagagggcagcagcgacgaggaagggaagctggtcattgatgagccagccaaggagaagaacgagaaaggagcgttgaagaggagagcaggggacttgctggaggactctcctaaacgtcccaaggaggcagaaaaccctgaaggagaggagaaggaggcagccaccttggaggttgagaggccccttcctatggaggtggaaaagaatagcaccccctctgagcccggctctggccgggggcctccccaagaggaagaagaagaggaggatgaagaggaagaggctaccaaggaagatgctgaggccccaggcatcagagatcatgagagcctgtagccaccaatgtttcaagaggagcccccaccctgttcctgctgctgtctgggtgctactggggaaactggccatggcctgcaaactgggaacccctttcccaccccaacctgctctcctcttctactcacttttcccactccaagcccagcccatggagattgacctggatggggcaggccacctggctctcacctctaggtccccatactcctatgatctgagtcagagccatgtcttctccctggaatgagttgaggccactgtgttccttccgcttggagctattttccaggcttctgctggggcctgggacaactgctcccacctcctgacacccttctcccactctcctaggcattctggacctctgggttgggatcaggggtaggaatggaaggatggagcatcaacagcagggtgggcttgtggggcctgggaggggcaatcctcaaatgcggggtgggggcagcacaggagggcggcctccttctgagctcctgtcccctgctacacctattatcccagctgcctagattcagggaaagtgggacagcttgtaggggaggggctcctttccataaatccttgatgattgacaacacccatttttccttttgccgaccccaagagttttgggagttgtagttaatcatcaagagaatttggggcttccaagttgttcgggccaaggacctgagacctgaagggttgactttacccatttgggtgggagtgttgagcatctgtccccctttagatctctgaagccacaaataggatgcttgggaagactcctagctgtcctttttcctctccacacagtgctcaaggccagcttatagtcatatatatcacccagacataaaggaaaagacacattttttaggaaatgtttttaataaaagaaaattacaaaaaaaaattttaaagacccctaaccctttgtgtgctctccattctgctccttccccatcgttgcccccatttctgaggtgcactgggaggctccccttctatttggggcttgatgactttctttttgtagctggggctttgatgttccttccagtgtcatttctcatccacataccctgacctggccccctcagtgttgtcaccagatctgatttgtaacccactgagaggacagagagaaataagtgccctctcccaccctcttcctactggtctctctatgcctctctacagtctcgtctcttttaccctggcccctctcccttgggctctgatgaaaaattgctgactgtagctttggaagtttagctctgagaaccgtagatgatttcagttctaggaaaataaaacccgttgattact

SEQ ID NO: 282 - DNA, 5032 bp, human
agtgcgacctggccttcttcccctcccccatgcggccggcttccgagtgcgcaagcccagagtcgtccgcgttgtccgcctctgcgcaagcgccgtgctcctcccacggcagttggccatatagaggctgggggtggggggggaggtcaagcgtagcctcttctcctttaccaagatggcggcttgtccctgtttcgccacagttcctaccttatgagctcggttttcttatgcttataagagtggaacagcaaaagctggcaggctgacagaggcggcctcaggacggaccttctggctactgaccgttttgctgtggttttcccggattgtgtgtaggtgtgagatcaaccatgagttccgttgcagttttgacccaagagagttttgctgaacaccgaagtgggctggttccgcaacaaatcaaagttgccactctaaattcagaagaggagagcgaccctccaacctacaaggatgccttccctccacttcctgagaaagctgcttgcctggaaagtgcccaggaacccgctggagcctgggggaacaagatccgacccatcaaggcttctgtcatcactcaggtgttccatgtacccctggaggagagaaaatacaaggatatgaaccagtttggagaaggtgaacaagcaaaaatctgccttgagatcatgcagagaactggtgctcacttggagctgtctttggccaaagaccaaggcctctccatcatggtgtcaggaaagctggatgctgtcatgaaagctcggaaggacattgttgctagactgcagactcaggcctcagcaactgttgccattcccaaagaacaccatcgctttgttattggcaaaaatggagagaaactgcaagacttggagctaaaaactgcaaccaaaatccagatcccacgcccagatgaccccagcaatcagatcaagatcactggcaccaaagagggcatcgagaaagctcgccatgaagtcttactcatctctgccgagcaggacaaacgtgctgtggagaggctagaagtagaaaaggcattccaccccttcatcgctgggccgtataatagactggttggcgagatcatgcaggagacaggcacgcgcatcaacatccccccacccagcgtgaaccggacagagattgtcttcactggagagaaggaacagttggctcaggctgtggctcgcatcaagaagatttatgaggagaagaaaaagaagactacaaccattgcagtggaagtgaagaaatcccaacacaagtatgtcattgggcccaagggcaattcattgcaggagatccttgagagaactggagtttccgttgagatcccaccctcagacagcatctctgagactgtaatacttcgaggcgaacctgaaaagttaggtcaggcgttgactgaagtctatgccaaggccaatagcttcaccgtctcctctgtcgccgccccttcctggcttcaccgtttcatcattggcaagaaagggcagaacctggccaaaatcactcagcagatgccaaaggttcacatcgagttcacagagggcgaagacaagatcaccctggagggccctacagaggatgtcaatgtggcccaggaacagatagaaggcatggtcaaagatttgattaaccggatggactatgtggagatcaacatcgaccacaagttccacaggcacctcattgggaagagcggtgccaacataaacagaatcaaagaccagtacaaggtgtccgtgcgcatccctcctgacagtgagaagagcaatttgatccgcatcgagggggacccacagggcgtgcagcaggccaagcgagagctgctggagcttgcatctcgcatggaaaatgagcgtaccaaggatctaatcattgagcaaagatttcatcgcacaatcattgggcagaagggtgaacggatccgtgaaattcgtgacaaattcccagaggtcatcattaactttccagacccagcacaaaaaagtgacattgtccagctcagaggacctaagaatgaggtggaaaaatgcacaaaatacatgcagaagatggtggcagatctggtggaaaatagctattcaatttctgttccgatcttcaaacagtttcacaagaatatcattgggaaaggaggcgcaaacattaaaaagattcgtgaagaaagcaacaccaaaatcgaccttccagcagagaatagcaattcagagaccattatcatcacaggcaagcgagccaactgcgaagctgcccggagcaggattctgtctattcagaaagacctggccaacatagccgaggtagaggtctccatccctgccaagctgcacaactccctcattggcaccaagggccgtctgatccgctccatcatggaggagtgcggcggggtccacattcactttcccgtggaaggttcaggaagcgacaccgttgttatcaggggcccttcctcggatgtggagaaggccaagaagcagctcctgcatctggcggaggagaagcaaaccaagagtttcactgttgacatccgcgccaagccagaataccacaaattcctcatcggcaaggggggcggcaaaattcgcaaggtgcgcgacagcactggagcacgtgtcatcttccctgcggctgaggacaaggaccaggacctgatcaccatcattggaaaggaggacgccgtccgagaggcacagaaggagctggaggccttgatccaaaacctggataatgtggtggaagactccatgctggtggaccccaagcaccaccgccacttcgtcatccgcagaggccaggtcttgcgggagattgctgaagagtatggcggggtgatggtcagcttcccacgctctggcacacagagcgacaaagtcaccctcaagggcgccaaggactgtgtggaggcagccaagaaacgcattcaggagatcattgaggacctggaagctcaggtgacattagaatgtgctataccccagaaattccatcgatctgtcatgggccccaaaggttccagaatccagcagattactcgggatttcagtgttcaaattaaattcccagacagagaggagaacgcagttcacagtacagagccagttgtccaggagaatggggacgaagctggggaggggagagaggctaaagattgtgaccccggctctccaaggaggtgtgacatcatcatcatctctggccggaaagaaaagtgtgaggctgccaaggaagctctggaggcattggttcctgtcaccattgaagtagaggtgccctttgaccttcaccgttacgttattgggcagaaaggaagtgggatccgcaagatgatggatgagtttgaggtgaacatacatgtcccggcacctgagctgcagtctgacatcatcgccatcacgggcctcgctgcaaatttggaccgggccaaggctggactgctggagcgtgtgaaggagctacaggccgagcaggaggaccgggctttaaggagttttaagctgagtgtcactgtagaccccaaataccatcccaagattatcgggagaaagggggcagtaattacccaaatccggttggagcatgacgtgaacatccagtttcctgataaggacgatgggaaccagccccaggaccaaattaccatcacagggtacgaaaagaacacagaagctgccagggatgctatactgagaattgtgggtgaacttgagcagatggtttctgaggacgtcccgctggaccaccgcgttcacgcccgcatcattggtgcccgcggcaaagccattcgcaaaatcatggacgaattcaaggtggacattcgcttcccacagagcggagccccagaccccaactgcgtcactgtgacggggctcccagagaatgtggaggaagccatcgaccacatcctcaatctggaggaggaatacctagctgacgtggtggacagtgaggcgctgcaggtatacatgaaacccccagcacacgaagaggccaaggcaccttccagaggctttgtggtgcgggacgcaccctggaccgccagcagcagtgagaaggctcctgacatgagcagctctgaggaatttcccagctttggggctcaggtggctcccaagaccctcccttggggccccaaacgataatgatcaaaaagaacagaaccctctccagcctgctgacccaaacccaaccacacaatggtttgtctcaatctgacccagcggctggaccctccgtaaattgttgacgctcttcccccttcccgaggtcccgcagggagcctagcgcctggctgtgtgtgcggccgctcctccaggcctggccgtgcccgctcaggacctgctccactgtttaacactaaaccaaggtcatgagcattcgtgctaagataacagactccagctcctggtccacccggcatgtcagtcagcactctggccttcatcacgagagctccgcagccgtggctaggattccacttcctgtgtcatgacctcaggaaataaacgtccttgactttataaaagccaaacgtttgccctcttcctttcccacctccctcctgccagtttcccttggtccagacagtcctgtttgtggagtgcaatcagcctcctccagctgccagagcgcctcagcacaggtgtcagggtgcaaggaagacctggcaatggacagcaggaggcaggttcctggagctggggggtgacctgagaggcagagggtgacgggttctcaggcagtcctgattttacctgccgtggggtctgaaagcaccaagggtccctgcccctacctccactgccagaccctcagcctgaggtctggtgagtggagcctggaggcaaggtggtaggcaccatctgggtcccctgtggccgtcacagtgtctgctgtgattgagatgcgcacaggttgggggaggtagggccttacgcttgtcctcagtgggggcagtttgccttagatgacagctgggctcttcttcacaccacctgcaggccctccctgcccc

SEQ ID NO: 283 - DNA, 1857 bp, human
ctgatccgggccgggcgggaagtcgggtcccgaggctccggctcggcagaccgggcggaaagcagccgagcggccatggagctgtgcgggctggggctgccccggccgcccatgctgctggcgctgctgttggcgacactgctggcggcgatgttggcgctgctgactcaggtggcgctggtggtgcaggtggcggaggcggctcgggccccgagcgtctcggccaagccggggccggcgctgtggcccctgccgctctcggtgaagatgaccccgaacctgctgcatctcgccccggagaacttctacatcagccacagccccaattccacggcgggcccctcctgcaccctgctggaggaagcgtttcgacgatatcatggctatatttttggtttctacaagtggcatcatgaacctgctgaattccaggctaaaacccaggttcagcaacttcttgtctcaatcacccttcagtcagagtgtgatgctttccccaacatatcttcagatgagtcttatactttacttgtgaaagaaccagtggctgtccttaaggccaacagagtttggggagcattacgaggtttagagacctttagccagttagtttatcaagattcttatggaactttcaccatcaatgaatccaccattattgattctccaaggttttctcacagaggaattttgattgatacatccagacattatctgccagttaagattattcttaaaactctggatgccatggcttttaataagtttaatgttcttcactggcacatagttgatgaccagtctttcccatatcagagcatcacttttcctgagttaagcaataaaggaagctattctttgtctcatgtttatacaccaaatgatgtccgtatggtgattgaatatgccagattacgaggaattcgagtcctgccagaatttgatacccctgggcatacactatcttggggaaaaggtcagaaagacctcctgactccatgttacagtagacaaaacaagttggactcttttggacctataaaccctactctgaatacaacatacagcttccttactacatttttcaaagaaattagtgaggtgtttccagatcaattcattcatttgggaggagatgaagtggaatttaaatgttgggaatcaaatccaaaaattcaagatttcatgaggcaaaaaggctttggcacagattttaagaaactagaatctttctacattcaaaaggttttggatattattgcaaccataaacaagggatccattgtctggcaggaggtttttgatgataaagcaaagcttgcgccgggcacaatagttgaagtatggaaagacagcgcatatcctgaggaactcagtagagtcacagcatctggcttccctgtaatcctttctgctccttggtacttagatttgattagctatggacaagattggaggaaatactataaagtggaacctcttgattttggcggtactcagaaacagaaacaacttttcattggtggagaagcttgtctatggggagaatatgtggatgcaactaacctcactccaagattatggcctcgggcaagtgctgttggtgagagactctggagttccaaagatgtcagagatatggatgacgcctatgacagactgacaaggcaccgctgcaggatggtcgaacgtggaatagctgcacaacctctttatgctggatattgtaaccatgagaacatgtaaaaaatggaggggaaaaaggccacagcaatctgtactacaatcaactttattttgaaatcatgtaaaataagatattagacttttttgaataaaatatttttattgattgaa

SEQ ID NO: 284 - DNA, 5991 bp, human
gcgggcgaccacccggcgcaggagcggccgcgtttcggcctcagaatccattgaagacttgaacaagtgggccctatttcttgtgtctccttttatacttgaagcagaacacatagcatttgtgacggagagcatttgggtacaaagtgagaatttacagagatcatcctcttcagaaacagttcggtttttgcccactagggatgatgtggtttctcatgaggttacttgctctaaaggactttatattttggaaccataagagcacccttgtggcccaggcactttatggatgatcccttttagtgctcccagtaaccttccaagattgtcaagtggtcagactgttgtttgccattagcttgcagacctggggatccttatcggctaattgctgaagcaagtgtggacaacttcagcaagctgggggtggcgttcatggaagatagactccacatggataatggactggtaccccaaaagattgtgtcggtgcacttgcaggactccactctgaaggaagttaaggatcaggtctcaaacaagcaagcccagatcctagagccgaagcctgaaccttctcttgagattaagcctgagcaggacggtatggagcatgttggcagagatgacccaaaggctcttggtgaagaacccaaacaaaggagaggcagtgcctctgggagtgagcctgctggggacagtgacaggggagggggccccgttgagcattatcacctccatctgtctagttgccacgagtgtctggaacttgagaacagcaccattgagtcagtcaagtttgcgtctgccgagaacattccagaccttccctacgattatagcagcagtttggagagtgttgctgatgagacctcccccgaaagagaagggaggagagtcaacctcacgggaaaggcacccaacatcctcctctatgtgggctccgactcccaggaagccctcggccggttccacgaggtccggtctgtgctggccgactgtgtggacattgacagttatattctctaccacctgctggaggacagtgctctcagagacccgtggacggacaactgtctgctgttggtcattgctaccagggagtccattcccgaagacctgtaccagaagttcatggcctatctttctcagggagggaaggtgttgggcctgtcttcatccttcacctttggtggctttcaggtgacaagcaagggtgcactgcacaagacagtccagaacttggttttctccaaggctgaccagagcgaggtgaagctcagcgtcttgagcagtggctgcaggtaccaggaaggccccgtccggctcagccccggcaggctccagggccacctggagaatgaggacaaggacaggatgattgtgcatgtgccttttggaactcgcgggggagaagctgttctttgccaggtgcacttagaactacctcccagctccaacatagtgcaaactccagaagattttaacttgctcaagtcaagcaattttagaagatacgaagtccttagagagattctgacaacccttggcctcagctgtgacatgaaacaagttcctgccttaactcctctttacttgctgtcagctgcggaggaaatcagggatcctcttatgcagtggcttgggaaacatgtggactccgagggagaaataaaatccggccagctctctcttagatttgtttcatcctacgtgtctgaagtagaaataaccccatcttgtatacctgtggtgaccaacatggaggccttctcatcagaacatttcaacttagagatctatcgccaaaatctgcagaccaagcagttggggaaagtaattttgtttgccgaagtgacccccacaacgatgcgtctcctggatgggctgatgtttcagacaccgcaggaaatgggcttaatagtgatcgcggcccggcagaccgagggcaaaggacggggagggaatgtgtggctgagccctgtgggatgtgctctttctactctgctcatctccattccactgagatcccagctgggacagaggatcccgtttgtccagcatctgatgtccgtggctgtcgtggaagcagtgaggtccattcccgagtatcaggatatcaacttacgagtgaagtggcccaacgatatttattacagtgacctcatgaagatcggcggagttctggttaactcaacactcatgggagaaacattttatatacttattggctgtggatttaatgtgactaacagtaaccctaccatctgcatcaacgacctcatcacagaatacaataaacaacacaaggcagaactgaagcccttaagagccgattatctcatcgccagagtcgtgactgtgctggagaaactgatcaaagagtttcaggacaaagggcccaacagcgtccttcccctttattaccgatactgggtccacagtggtcagcaagtccatctgggcagcgcagagggaccaaaggtgtccatcgttggcctggacgattctggcttcctccaggttcaccaggagggcggcgaggttgtgactgtgcacccggacggcaactccttcgacatgctgagaaacctcatcctccccaaacggcggtaatgccgggcgtccccgagacgcggctgcctgtccgtgcccatgcatctggaaatctaatttagagttgtaggtgaattttcttttcctccaattcatttgttaagtctttgttctttttctgtgtttctgtttgtttttaggtttgttttgttgtcgttttctttggtgtttgaagaggctctgggatagatggttaagaagtagaaaatttagtttagggaaagccctcccacaggtgggaaattgctctcccctctgtggcttggacttacgtttattgtcaaggggagtttttacatggaaatgacaatgggaaaattcagatattttcttagtagtgcagacctttacccctagtctatgaaaaaacaaaccaaaatatgctcttgcgcccaggccagtggtgagttagaggtatgctatcactgtttgtaagcatctggggaggtactgaactgtaagaacatgcttggacacttagtcattgttctgtgtttttattaatgaagaaaagggaagacagacttccaagagttactgtccacccggtggtgtggccccatagcgaagtctaaatgcctgtagagatagagctagctggtgtggttgcagtgaccttgtagaggaaatcagttcattactttgacatcattcagtgagctctcctttcctaaggaagtttaaatgtccttagttagggactgactttcttaagtaagtttaaatttactacatattgtgaagagacaggatcaagttcagaatccttaaatgtctgattaggcatcacttggatgaggaggtgggcgatttggctctgacagctggagatgaaggcacactcataccacatacaagggaggatttggagcttttaagccagtttcagatttactctgaaatgtggagcattcctgcaagactgtgcagctcacggaatatagaagacatggcattttactcagaagtcataagtttttgcccccctcatttacctcgtattaccaagaaagaaaatgttatcgatactaaacaccatcagttcagagggaggatgtgtgtgtgtgcccgcatatgtgtgtgcgtgcgtgtgtgcgcacatagctttaaaagaagacattcaaaatttgatgtgctacaagcctcatgaaagaacaaaagaaatgaagccttttgatatgcattcgctattcccagatgtacgccatgccttttccatgtccctcctatctctgttgaacttatgaatcatactcattacttttcagctttttaaaaggccaatttttgtccagttttctctcttccagtcccagctgaaattagtggaaagaaagtttgatggagctttcagctttgaacaaaatcccttcattgtaaactagcaccatctttatccaggtcttacccagtcaggctaattccagaaacttgtggtttttagtatagtctgtctacctttagccaggcacaggacagccctatgaaaaaatacccaatatatattttttggaaatgaaacattaaaagaacttaaaaagtaatttttggaaatgaggcttcaattagaattatttttctcaaaaaacaaacaaacaaaaaacacaaaaaaaaccactcttctccaaatgcccaagccttctttcaaaattagttagaaacttaagtaaaatacaagtccacaccatccccaaattacaaaatggacttacccttgagagggcatctgcagaatatcatcagggacaaagatctcgaggctaacgatgtaggtttcatttctcagactttgtaatataaggcaagccctctctcagagctgccatcatcactttttgaatttctttgggggttatttaatgaaaaacatgctatgttttgttttaagctgaagtcctattctggacactctgctttgggaaaaaatgttatcatttaatttcctttctgcaaattaaaactaatgaagtgtggccttgtcaaaggctatggagatgttccgggcatactgctgtgctctgtgctttccagcaggcgctcctccctcacgcaggagactcagttgtcctgagagagatgaagcagccttgaagcagatgctgcgttttccataaacctgattttgcctcacatgaaccaaagactctcaaaactccgcttctatagaattagctgaataaaggcattttactgatagctgttcgtgttagcgaaacctgtctacctgctatagcacactctccgatttgggccatttatgcaccccgcaacctgggatctcaaggagctttaaagtcttaatgggaacttggcattttcctgatgatctttaaaatgtggtcactaaactcaggattggcgtgtgcttttagaacactggagtagcccttgttttagaggctgtgcattgagtatcgaccgtattttgtaaaaggcaagatatcctcccttccaggctggtaacgggtttcaaggggactcttgaggaagtgccccctaaaatagaacacagcaataactgggcttcctgtccccacccccaccccagcagtgctctctggcactgggaactctgctagggagtggtggaagtaggaaggatttgtgtgcaaaggaaaatcgtggttgagtttcactgcagcaggctgacgttgcctgatgtgagagcaagtggccgactggggtgcgggtgcacaggtcgggggagcacaggccacagagcgcagcctctgggggtcccccaaggcacagcatatacagcatggtcgccccttgccctggagtctgggaacaaagagaggagccagcctccccgcactgcttcagatggaaaagggaggcagggtgggcttccgttctccagatctgtttgctcttaacaggcagaacatgggagaatccttattcctggttaatcactatgcatatttgaaataaaagaaagcgtaagcctctgcaattttaacttctcaaaggatgtctctgaaaagaatcactttaaaccaatgcctataaaaagcaagtctaccaaaataaactaagactttctatgtggtttgggctccctcttatttttacaagtttcatttttaaaagtaggcaactactttgggttacagtatttttattcatatttaaacatttttacaaaataaataaagtgttttacatagtaaggaatatgtacgtatttccaagtattaagaagccaagtgtttttttttttgacgtattattgacaaatgtattcagcgccatacacaagagaaatattattactccaaagaacgaaagttaacaaaactccaaagcaaaaacccttttaatggaggtgagaaataaatttaatgtaacaacaaaaaaaaaaaaaaa

SEQ ID NO: 285 - DNA, 1685 bp, human
actgtcctttcgtggctcactccctttcctctcgtgccgctcggtcacgcttgtgcccgaaggaggaaacagtgacagacctggagactgcagttctctatccttcacacagctctttcaccatgcctggatcacttcctttgaatgcagaagcttgctggccaaaagatgtgggaattgttgcccttgagatctattttccttctcaatatgttgatcaagcagagttggaaaaatatgatggtgtagatgctggaaagtataccattggcttgggccaggccaagatgggcttctgcacagatagagaagatattaactctctttgcatgactgtggttcagaatcttatggagagaaataacctttcctatgattgcattgggcggctggaagttggaacagagacaatcatcgacaaatcaaagtctgtgaagactaatttgatgcagctgtttgaagagtctgggaatacagatatagaaggaatcgacacaactaatgcatgctatggaggcacagctgctgtcttcaatgctgttaactggattgagtccagctcttgggatggacggtatgccctggtagttgcaggagatattgctgtatatgccacaggaaatgctagacctacaggtggagttggagcagtagctctgctaattgggccaaatgctcctttaatttttgaacgagggcttcgtgggacacatatgcaacatgcctatgatttttacaagcctgatatgctatctgaatatcctatagtagatggaaaactctccatacagtgctacctcagtgcattagaccgctgctattctgtctactgcaaaaagatccatgcccagtggcagaaagaggcaaatgataacgattttaccttgaatgattttggcttcatgatctttcactcaccatattgtaaactggttcagaaatctctagctcggatgttgctgaatgacttccttaatgaccagaatagagataaaaatagtatctatagtggcctgaaggcctttggggatgttaagttagaagacacctactttgatagagatgtggagaaggcatttatgaaggctagctctgaactcttcagtcagaaaacaaaggcatctttacttgtatcaaatcaaaatggaaatatgtacacatcttcagtatatggttcccttgcatctgttctagcacagtactcacctcagcatttagcagggaagagaattggagtgttttcttatggttctggtttggctgccactctgtactctcttaaagtcacacaagatgctacaccggggtctgctcttgataaaataacagcaagtttatgtgatcttaaatcaaggcttgattcaagaactggtgtggcacaagatgtcttcgctgaaaacatgaagctcagagaggacacccatcatttggtcaactatattccccagggttcaatagattcactctttgaaggaacgtggtacttagttagggtggatgaaaagcacagaagaacttacgctcggcgtcccactccaaatgatgacactttggatgaaggagtaggacttgtgcattcaaacatagcaactgagcatattccaagccctgccaagaaagtaccaagactccctgctacagcagcagaacctgaagcagcagttattagtaatggggtatggtaa

SEQ ID NO: 286 - DNA, 1925 bp, human
gagagggcgaaggtaggctggcagatacgttcgtcagcttgctcctttctgcccgtggacgccgccgaagaagcatcgttaaagtctctcttcaccctgccgtcatgtctaagtcagagtctcctaaagagcccgaacagctgaggaagctcttcattggagggttgagctttgaaacaactgatgagagcctgaggagccattttgagcaatggggaacgctcacggactgtgtggtaatgagagatccaaacaccaagcgctctaggggctttgggtttgtcacatatgccactgtggaggaggtggatgcagctatgaatgcaaggccacacaaggtggatggaagagttgtggaaccaaagagagctgtctccagagaagattctcaaagaccaggtgcccacttaactgtgaaaaagatatttgttggtggcattaaagaagacactgaagaacatcacctaagagattattttgaacagtatggaaaaattgaagtgattgaaatcatgactgaccgaggcagtggcaagaaaaggggctttgcctttgtaacctttgacgaccatgactccgtggataagattgtcattcagaaataccatactgtgaatggccacaactgtgaagttagaaaagccctgtcaaagcaagagatggctagtgcttcatccagccaaagaggtcgaagtggttctggaaactttggtggtggtcgtggaggtggtttcggtgggaatgacaacttcggtcgtggaggaaacttcagtggtcgtggtggctttggtggcagccgtggtggtggtggatatggtggcagtggggatggctataatggatttggcaatgatggtggttatggaggaggcggccctggttactctggaggaagcagaggctatggaagtggtggacagggttatggaaaccagggcagtggctatggcgggagtggcagctatgacagctataacaacggaggcggaggcggctttggcggtggtagtggaagcaattttggaggtggtggaagctacaatgattttgggaattacaacaatcagtcttcaaattttggacccatgaagggaggaaattttggaggcagaagctctggcccctatggcggtggaggccaatactttgcaaaaccacgaaaccaaggtggctatggcggttccagcagcagcagtagctatggcagtggcagaagattttaattaggaaacaaagcttagcaggagaggagagccagagaagtgacagggaagctacaggttacaacagatttgtgaactcagccaagcacagtggtggcagggcctagctgctacaaagaagacatgttttagacaaatactcatgtgtatgggcaaaaaactcgaggactgtatttgtgactaattgtataacaggttattttagtttctgttctgtggaaagtgtaaagcattccaacaaagggttttaatgtagatttttttttttgcaccccatgctgttgattgctaaatgtaacagtctgatcgtgacgctgaataaatgtcttttttttaatgtgctgtgtaaagttagtctactcttaagccatcttggtaaatttccccaacagtgtgaagttagaattccttcagggtgatgccaggttctatttggaatttatatacaacctgcttgggtggagaagccattgtcttcggaaaccttggtgtagttgaactgatagttactgttgtgacctgaagttcaccattaaaagggattacccaagcaaaatcatggaatggttataaaagtgattgttggcacatcctatgcaatatatctaaattgaataatggtaccagataaaattatagatgggaatgaagcttgtgtatccattatcatgtgtaatcaataaacgatttaattctcttgaa

SEQ ID NO: 287 - DNA, 2770 bp, human
agggcgctccaggcgacagcattgcagacgccattatcctctgtttctctgctgcaccgacctcgacgtcttgcctgtgtcccacttgttcgcggcctataggctactgcagcactggggtgtcagttgttggtccgacccagaacgcttcagttctgctctgcaaggatatataataactgattggtgtgcccgtttaataaaagaatatggaaactgaacagccagaagaaaccttccctaacactgaaaccaatggtgaatttggtaaacgccctgcagaagatatggaagaggaacaagcatttaaaagatctagaaacactgatgagatggttgaattacgcattctgcttcagagcaagaatgctggggcagtgattggaaaaggaggcaagaatattaaggctctccgtacagactacaatgccagtgtttcagtcccagacagcagtggccccgagcgcatattgagtatcagtgctgatattgaaacaattggagaaattctgaagaaaatcatccctaccttggaagagggcctgcagttgccatcacccactgcaaccagccagctcccgctcgaatctgatgctgtggaatgcttaaattaccaacactataaaggaagtgactttgactgcgagttgaggctgttgattcatcagagtctagcaggaggaattattggggtcaaaggtgctaaaattaaagaacttcgagagaacactcaaaccaccatcaagcttttccaggaatgctgtcctcattccactgacagagttgttcttattggaggaaaacccgatagggttgtagagtgcataaagatcatccttgatcttatatctgagtctcccatcaaaggacgtgcacagccttatgatcccaatttttacgatgaaacctatgattatggtggttttacaatgatgtttgatgaccgtcgcggacgcccagtgggatttcccatgcggggaagaggtggttttgacagaatgcctcctggtcggggtgggcgtcccatgcctccatctagaagagattatgatgatatgagccctcgtcgaggaccacctccccctcctcccggacgaggcggccggggtggtagcagagctcggaatcttcctcttcctccaccaccaccacctagagggggagacctcatggcctatgacagaagagggagacctggagaccgttacgacggcatggttggtttcagtgctgatgaaacttgggactctgcaatagatacatggagcccatcagaatggcagatggcttatgaaccacagggtggctccggatatgattattcctatgcagggggtcgtggctcatatggtgatcttggtggacctattattactacacaagtaactattcccaaagatttggctggatctattattggcaaaggtggtcagcggattaaacaaatccgtcatgagtcgggagcttcgatcaaaattgatgagcctttagaaggatccgaagatcggatcattaccattacaggaacacaggaccagatacagaatgcacagtatttgctgcagaacagtgtgaagcagtattctggaaagtttttctaagactagtgaagaactgaaggagtcctgcatctttttttttttatctgcttctgtttaaaaagccaacattcctctgcttcataggtgttctgcatttgaggtgtagtgaaatctttgctgttcaccagatgtaatgttttagttcttacaaacagggttgggggggggaagggcgtgcaaaaactaacattgaaattttgaaacagcagcagagtgagtggattttatttttcgttattgtggtggtttaaaaaattccccccatgtaattattgtgaacaccttgctttgtggtcactgtaacatttggggggtgggccagggaggaaaagtaacaatagtccacatgtccctggcatctgttcagagcagtgtgcagaatgtaatgctcttttgtaagaaacgttttatgatttttaaaataaatttagtgaacctatttttggtggtcattttttttttaagacagtcattttaaaatggtggctgaatttcccaacccacccccaaactaaacactaagtttaattttcagctcctctgttggacatataagtgcatctcttgttggacataggcaaaataacttggcaaacttagttctggtgatttcttgatggtttggaagtctattgctgggaagaaattccatcatacatattcatgcttataataagctggggattttttgtttgtttttgcaaatgcttgcccctacttttcaacaattttctatgttagttgtgaagaactaaggtggggagcagtactacaagttgagtaatggtatgagtatataccagaattctgattggcagcaagtttattaatcagaataacacttggttatggaagtgactaatgctgaaaaaattgattatttttattagataatttctcacctatagacttaaactgtcaatttgctctagtgtcttattagttaaactttgtaaaatatatatatacttgtttttccattgtatgcaaattgaaagaaaaagatgtaccatttctctgttgtatgttggattatgtaggaatgtttgtgtacaattcaaaaaaaaaaaagatgaaaaaagttcctgtggatgttttgtgtagtatcttggcatttgtattgatagttaaaattcacttccaaataaataaaacacccatgatgctag

SEQ ID NO: 288 - DNA, 1440 bp, human
aggcctctagtcccagtaggaggtttgactaagatcaatcatgacgacttacagtgacaaaggggcaaagcctgagagaggccgattcctccacttccactctgtgaccttctgggttggcaacgccaagcaggccgcgtcattctactgcagcaagatgggctttgaacctctagcctacaggggcctggagaccggttcccgggaggtggtcagccatgtaatcaaacaagggaagattgtgtttgtcctctcctcagcgctcaacccctggaacaaagagatgggcgatcacctggtgaaacacggtgacggagtgaaggacattgcgttcgaggtggaagattgtgactacatcgtgcagaaagcacgggaacggggcgccaaaatcatgcgggagccctgggtagagcaagacaagtttgggaaggtgaagtttgctgtgctgcagacgtatggggacaccacacacaccctggtggagaagatgaactacatcggccaattcttgcctggatatgaggccccagcgttcatggaccccctacttcctaaactgcccaaatgcagtctggagatgatcgaccacattgtgggaaaccagcctgatcaggagatggtgtccgcctccgaatggtacctgaaaaacctgcagttccaccgcttctggtccgtggatgacacgcaggtgcacacggaatatagctctctgcgatccattgtggtggccaactatgaagagtccatcaagatgcccatcaatgagccagcgcctggcaagaagaagtcccagatccaggaatatgtggactataacgggggcgctggggtccagcacatcgctctcaagaccgaagacatcatcacagcgattcgccacttgagagagagaggcctggagttcttatctgttccctccacgtactacaaacaactgcgggagaagctgaagacggccaagatcaaggtgaaggagaacattgatgccctggaggagctgaaaatcctggtggactacgacgagaaaggctacctcctgcagatcttcaccaaaccggtgcaggaccggcccacgctcttcctggaagtcatccagcgccacaaccaccagggttttggagccggcaacttcaactcactgttcaaggctttcgaggaggagcagaacctgcggggtaacctcaccaacatggagaccaatggggtggtgcccggcatgtaagccccgcccaccccacggaggccacagccacacagccacgccccctgattctggaactcgcccaacttccctactggctgctccccttgggtcccgcccaccagcggactcggcccccaaggctccgcccacactgaccacgcccctcggcggggccgccctctgctccagccctcccgattaaagcgtgccccggtccaaaaaaaaaaaaaaaaaaa

SEQ ID NO: 289 - DNA, 2601 bp, human
ggcacgaggggctgcaccatgcacgtgaacggcaaagtggcgctggtgaccggcgcggctcagggcataggcagagcctttgcagaggcgctgctgcttaagggcgccaaggtagcgctggtggattggaatcttgaagcaggtgtacagtgtaaagctgccctggatgagcagtttgaacctcagaagactctgttcatccagtgcgatgtggctgaccagcaacaactgagagacacttttagaaaagttgtagaccactttggaagactggacattttggtcaataatgctggagtgaataatgagaaaaactgggaaaaaactctgcaaattaatttggtttctgttatcagtggaacctatcttggtttggattacatgagtaagcaaaatggaggtgaaggcggcatcattatcaatatgtcatctttagcaggactcatgcccgttgcacagcagccggtttattgtgcttcaaagcatggcatagttggattcacacgctcagcagcgttggctgctaatcttatgaacagtggtgtgagactgaatgccatttgtccaggctttgttaacacagccatccttgaatcaattgaaaaagaagaaaacatgggacaatatatagaatataaggatcatatcaaggatatgattaaatactatggaattttggacccaccattgattgccaatggattgataacactcattgaagatgatgctttaaatggtgctattatgaagatcacaacttctaagggaattcattttcaagactatgatacaactccatttcaagcaaaaacccaatgaacagcttatgtgttagccatagctgaaaataagcacaaatagcttatattcagatcctatcttcatttgaatatagcttttaaatgaaatgttacagtttgaagttttccttcatgcacttggtgataaacgttttctaaatttttagttaagtatatggataaaaagttatgaactattaaaaatgtgatgtggaccaaaggctaggttgtaatcttgatagtctaaaaaatgatcaaaacaaatgattttcaaggaatattcaatattctgcctttcagaaagtgtatttatatctgtgcttcataaatattaatgttcttcagaacatcattttaaaggagatacttgaattgttatttaaatcaaaccagatgtaaaacactcacatacaagttcatactttaaaagaggaaagctacttaacaatgacaaatatttcacaataataatttttacttatataccatctttcaactgaacatttcagttcttccaagagcttcttagagtagtatattttgggggcagtcaaggaataaactacagtgtaaacatatcccagatgaaaactgctgtatggaaaaatgacagaaagtaactgattgacactgttgattcacagttcagcctcctatctgggaaagacatttctttcctctgctcactttaagaacttttaccgactccaaaaatctcaggaattaaacttttaacagttacagcaataaagaatagttagtactccaaaaatattatatttaagatgctcaacaagaaaaaaatgcaaatgtaatatttttttcaaattacttctttattgacttgtccaaatttcaaaagtgcctacccttcaataaaacttttttattctgatctccataaattacttagtcttctatgtatagctatcaaggaaataaaaccaattttgccacagccacaactgtaaatgtttttgtacccatgctgaaactcataacaacacagacataaaaatagctgtgaggttttgctttttttgttgtcagctatcttaagaatcattaaatacacctgctttgggtaaaactctttgcaagcagtaattaacactagtaacagtgaaagcacaagatttccaaatcagtcgttttctcaaaaaaatatcgtataagtgactcatcctgtctgctaactccagacctcccagcttgaagccaaatctttccatgtgagattgatatggatttcctagaagtactggaatgttgtcatatcttgccctattttaattctgctatagaaaacaattgccttcacttttaaggagtaatttgaatattaataactctggtctagattttcatataatgtattaaagacaaagtagtgaacatcaatgaacatctgatagagataaactgtaatcaggcataagcttgtttgtatgttctggcagtgactaatcagtaaatgatgtcggtttgcccagtatcacttatcttctgtatttttcctctgtcgtgtaaatagtataaccttttcatttatggacaattttttggactagtagccttcaatatacattctgctttgaattaattttttcaaatcaataaattatgtagacatttaaaatcaaatatcaagtagaattgaaaaatgtgagttacataagttaaaaacttactttaaatcttaccttctataggtagctctaaataaattcatatggttatatggcaaaaaaaaaaaaaaaaaaaaaaaaaaaaaaaaaaaaaaaaaaaaaaaaaaaaaaaa

SEQ ID NO: 290 - DNA, 1435 bp, human
gtgggcagccgaggccgcgaactgcatcatggagaattttgtagccaccttggctaatgggatgagcctccagccgcctcttgaagaagtaacccccctttgcccttccctgtgtctgcccccattttccttcccctcccctccccagctgtgggctgagctagagacggggtcagagagactggagagatggtaggcgtggctgaggtgtcctgtggccaggcggaaagcagtgagaagcccaacgctgaggacatgacatccaaagattactactttgactcctacgcacactttggcatccacgaggagatgctgaaggacgaggtgcgcaccctcacttaccgcaactccatgtttcataaccggcacctcttcaaggacaaggtggtgctggacgtcggctcgggcaccggcatcctctgcatgtttgctgccaaggccggggcccgcaaggtcatcgggatcgtgtgttccagtatctctgattatgcggtgaagatcgtcaaagccaacaagttagaccacgtggtgaccatcatcaaggggaaggtggaggaggtggagctcccagtggagaaggtggacatcatcatcagcgagtggatgggctactgcctcttctacgagtccatgctcaacaccgtgctctatgcccgggacaagtggctggcgcccgatggcctcatcttcccagaccgggccacgctgtatgtgacggccatcgaggaccggcagtacaaagactacaagatccactggtgggagaacgtgtatggcttcgacatgtcttgcatcaaagatgtggccattaaggagcccctagtggatgtcgtggaccccaaacagctggtcaccaacgcctgcctcataaaggaggtggacatctataccgtcaaggtggaagacctgaccttcacctccccgttctgcctgcaagtgaagcggaatgactacgtgcacgccctggtggcctacttcaacatcgagttcacacgctgccacaagaggaccggcttctccaccagccccgagtccccgtacacgcactggaagcagacggtgttctacatggaggactacctgaccgtgaagacgggcgaggagatcttcggcaccatcggcatgcggcccaacgccaagaacaaccgggacctggacttcaccatcgacctggacttcaagggccagctgtgcgagctgtcctgctccaccgactaccggatgcgctgaggcccggctctcccgccctgcacgagcccaggggctgagcgttcctaggcggtttcggggctcccccttcctctccctccctcccgcagaagggggttttaggggcctgggctggggggatggggagggcacatcgtgactgtgtttttcataacttatgtttttatatggttgcatttacgccaataaatcctcagctggg

SEQ ID NO: 291 - DNA, 1673 bp, human
gaggcagtaaggacttggactcctctgtccagcttttaacaatctaagttacggttaccctcttctgggtcacgctagaatcagatctgctctccagcatcttctgtttcctggcaagtgtttcctgctactttggattggccacgatgggctggagctgccttgtgacaggagcaggagggcttctgggtcagaggatcgtccgcctgttggtggaagagaaggaactgaaggagatcagggccttggacaaggccttcagaccagaattgagagaggaattttctaagctccagaacaggaccaagctgactgtacttgaaggagacattctggatgagccattcctgaaaagagcctgccaggacgtctcggtcgtcatccacaccgcctgtatcattgatgtctttggtgtcactcacagagagtccatcatgaatgtcaatgtgaaaggtacccagctactgttggaggcctgtgtccaagccagtgtgccagtcttcatctacaccagtagcatagaggtagccgggcccaactcctacaaggaaatcatccagaacggccacgaagaagagcctctggaaaacacatggcccactccatacccgtacagcaaaaagcttgctgagaaggctgtgctggcggctaatgggtggaatctaaaaaatggtgataccttgtacacttgtgcgttaagacccacatatatctatggggaaggaggcccattcctttctgccagtataaatgaggccctgaacaacaatgggatcctgtcaagtgttggaaagttctctacagtcaacccagtctatgttggcaacgtggcctgggcccacattctggccttgagggctctgcgggaccccaagaaggccccaagtgtccgaggtcaattctattacatctcagatgacacgcctcaccaaagctatgataaccttaattacatcctgagcaaagagtttggcctccgccttgattccagatggagccttcctttaaccctgatgtactggattggcttcctgctggaagtagtgagcttcctactcagcccaatttactcctatcaaccccccttcaaccgccacacagtcacattatcaaatagtgtgttcaccttctcttacaagaaggctcagcgagatctggcgtataagccactctacagctgggaggaagccaagcagaaaaccgtggagtgggttggttcccttgtggaccggcacaaggagaccctgaagtccaagactcagtgatttaaggatgacagagatgtgcatgtgggtattgttaggaaatgtcatcaaactccacccacctggcttcatacagaaggcaacaggggcacaagcccaggtcctgctgcctctctttcacacaatgcccaacttactgtcttcttcatgtcatcaaaatctgcacagtcactggcccaaccagaactttctgtcctaatcatacaccagaagacaaacaatatgatttgctgttaccaaatctcagtggctgattctgaacaattgtggtctctcttaacttgaggttctcttttgactaatagagctccatttcccctcttaaatgagaaagcatttcttttctctttaatctcctattccttcacacagttcaacataaagagcaataaatgttttaatgcttaa

SEQ ID NO: 292 - DNA, 2593 bp, human
ggccagcgcgtctgcttgttcgtgtgtgtgtcgttgcaggccttattcatgggctcaccgctgaggttcgacgggcgggtggtactggtcaccggcgcgggggcaggattgggccgagcctatgccctggcttttgcagaaagaggagcgttagttgttgtgaatgatttgggaggggacttcaaaggagttggtaaaggctccttagctgctgataaggttgttgaagaaataagaaggagaggtggaaaagcagtggccaactatgattcagtggaagaaggagagaaggttgtgaagacagccctggatgcttttggaagaatagatgttgtggtcaacaatgctggaattctgagggatcgttcctttgctaggataagtgatgaagactgggatataatccacagagttcatttgcggggttcattccaagtgacacgggcagcatgggaacacatgaagaaacagaagtatggaaggattattatgacttcatcagcttcaggaatatatggcaactttggccaggccaattatagtgctgcaaagttgggtcttctgggccttgcaaattctcttgcaattgaaggcaggaaaagcaacattcattgtaacaccattgctcctaatgcgggatcacggatgactcagacagttatgcctgaagatcttgtggaagccctgaagccagagtatgtggcacctcttgtcctttggctttgtcacgagagttgtgaggagaatggtggcttgtttgaggttggagcaggatggattggaaaattacgctgggagcggactcttggagctattgtaagacaaaagaatcacccaatgactcctgaggcagtcaaggctaactggaagaagatctgtgactttgagaatgccagcaagcctcagagtatccaagaatcaactggcagtataattgaagttctgagtaaaatagattcagaaggaggagtttcagcaaatcatactagtcgtgcaacgtctacagcaacatcaggatttgctggagctattggccagaaactccctccattttcttatgcttatacggaactggaagctattatgtatgcccttggagtgggagcgtcaatcaaggatccaaaagatttgaaatttatttatgaaggaagttctgatttctcctgtttgcccaccttcggagttatcataggtcagaaatctatgatgggtggaggattagcagaaattcctggactttcaatcaactttgcaaaggttcttcatggagagcagtacttagagttatataaaccacttcccagagcaggaaaattaaaatgtgaagcagttgttgctgatgtcctagataaaggatccggtgtagtgattattatggatgtctattcttattctgagaaggaacttatatgccacaatcagttctctctctttcttgttggctctggaggctttggtggaaaacggacatcagacaaagtcaaggtagctgtagccatacctaatagacctcctgatgctgtacttacagataccacctctcttaatcaggctgctttgtaccgcctcagtggagactggaatcccttacacattgatcctaactttgctagtctagcaggttttgacaagcccatattacatggattatgtacatttggattttctgccaggcgtgtgttacagcagtttgcagataatgatgtgtcaagattcaaggcaattaaggctcgttttgcaaaaccagtatatccaggacaaactctacaaactgagatgtggaaggaaggaaacagaattcattttcaaaccaaggtccaagaaactggagacattgtcatttcaaatgcatatgtggatcttgcaccaacatctggtacttcagctaagacaccctctgagggcgggaagcttcagagtacctttgtatttgaggaaataggacgccgcctaaaggatattgggcctgaggtggtgaagaaagtaaatgctgtatttgagtggcatataaccaaaggcggaaatattggggctaagtggactattgacctgaaaagtggttctggaaaagtgtaccaaggccctgcaaaaggtgctgctgatacaacaatcatactttcagatgaagatttcatggaggtggtcctgggcaagcttgaccctcagaaggcattctttagtggcaggctgaaggccagagggaacatcatgctgagccagaaacttcagatgattcttaaagactacgccaagctctgaagggcacactacactattaataaaaatggaatcattaaatactctcttcacccaaatatgcttgattattctgcaaaagtgattagaactaagatgcaggggaaattgcttaacattttcagatatcagataactgcagattttcattttctactaattttcatgtatcattatttttacaaggaactatatataagctagcacatgattatccttctgttcttagatctgtatcttcataataaaaaattttgcccaagtcctgtttccttagaatttgtgatagcattgataagttgaaaggaaaattaaatcaataaaggcctttgatacc

SEQ ID NO: 293 - DNA, 2276 bp, human
ctcattgaactcgcctgcagctcttgggttttttgtggcttccttcgttattggagccaggcctacaccccagcaaccatgtccaagggacctgcagttggtattgatcttggcaccacctactcttgtgtgggtgttttccagcacggaaaagtcgagataattgccaatgatcagggaaaccgaaccactccaagctatgtcgcctttacggacactgaacggttgatcggtgatgccgcaaagaatcaagttgcaatgaaccccaccaacacagtttttgatgccaaacgtctgattggacgcagatttgatgatgctgttgtccagtctgatatgaaacattggccctttatggtggtgaatgatgctggcaggcccaaggtccaagtagaatacaagggagagaccaaaagcttctatccagaggaggtgtcttctatggttctgacaaagatgaaggaaattgcagaagcctaccttgggaagactgttaccaatgctgtggtcacagtgccagcttactttaatgactctcagcgtcaggctaccaaagatgctggaactattgctggtctcaatgtacttagaattattaatgagccaactgctgctgctattgcttacggcttagacaaaaaggttggagcagaaagaaacgtgctcatctttgacctgggaggtggcacttttgatgtgtcaatcctcactattgaggatggaatctttgaggtcaagtctacagctggagacacccacttgggtggagaagattttgacaaccgaatggtcaaccattttattgctgagtttaagcgcaagcataagaaggacatcagtgagaacaagagagctgtaagacgcctccgtactgcttgtgaacgtgctaagcgtaccctctcttccagcacccaggccagtattgagatcgattctctctatgaaggaatcgacttctatacctccattacccgtgcccgatttgaagaactgaatgctgacctgttccgtggcaccctggacccagtagagaaagcccttcgagatgccaaactagacaagtcacagattcatgatattgtcctggttggtggttctactcgtatccccaagattcagaagcttctccaagacttcttcaatggaaaagaactgaataagagcatcaaccctgatgaagctgttgcttatggtgcagctgtccaggcagccatcttgtctggagacaagtctgagaatgttcaagatttgctgctcttggatgtcactcctctttcccttggtattgaaactgctggtggagtcatgactgtcctcatcaagcgtaataccaccattcctaccaagcagacacagaccttcactacctattctgacaaccagcctggtgtgcttattcaggtttatgaaggcgagcgtgccatgacaaaggataacaacctgcttggcaagtttgaactcacaggcatacctcctgcaccccgaggtgttcctcagattgaagtcacttttgacattgatgccaatggtatactcaatgtctctgctgtggacaagagtacgggaaaagagaacaagattactatcactaatgacaagggccgtttgagcaaggaagacattgaacgtatggtccaggaagctgagaagtacaaagctgaagatgagaagcagagggacaaggtgtcatccaagaattcacttgagtcctatgccttcaacatgaaagcaactgttgaagatgagaaacttcaaggcaagattaacgatgaggacaaacagaagattctggacaagtgtaatgaaattatcaactggcttgataagaatcagactgctgagaaggaagaatttgaacatcaacagaaagagctggagaaagtttgcaaccccatcatcaccaagctgtaccagagtgcaggaggcatgccaggaggaatgcctgggggatttcctggtggtggagctcctccctctggtggtgcttcctcagggcccaccattgaagaggttgattaagccaaccaagtgtagatgtagcattgttccacacatttaaaacatttgaaggacctaaattcgtagcaaattctgtggcagttttaaaaagttaagctgctatagtaagttactgggcattctcaatacttgaatatggaacatatgcacaggggaaggaaataacattgcactttataaacactgtattgtaagtggaaaatgcaatgtcttaaataaaactatttaaaattggcaccataaaaaaaaaaaaaaaa

SEQ ID NO: 294 - DNA, 2883 bp, human
tcaccccacgtggttggaggtttccagaagcgctgccgccaccgcatcgcgcagctctttgccgtcggagcgcttgtttgctgcctcgtactcctccatttatccgccatgataagtgccagccgagctgcagcagcccgtctcgtgggcgccgcagcctcccggggccctacggccgcccgccaccaggatagctggaatggccttagtcatgaggcttttagacttgtttcaaggcgggattatgcatcagaagcaatcaagggagcagttgttggtattgatttgggtactaccaactcctgcgtggcagttatggaaggtaaacaagcaaaggtgctggagaatgccgaaggtgccagaaccaccccttcagttgtggcctttacagcagatggtgagcgacttgttggaatgccggccaagcgacaggctgtcaccaacccaaacaatacattttatgctaccaagcgtctcattggccggcgatatgatgatcctgaagtacagaaagacattaaaaatgttccctttaaaattgtccgtgcctccaatggtgatgcctgggttgaggctcatgggaaattgtattctccgagtcagattggagcatttgtgttgatgaagatgaaagagactgcagaaaattacttggggcacacagcaaaaaatgctgtgatcacagtcccagcttatttcaatgactcgcagagacaggccactaaagatgctggccagatatctggactgaatgtgcttcgggtgattaatgagcccacagctgctgctcttgcctatggtctagacaaatcagaagacaaagtcattgctgtatatgatttaggtggtggaacttttgatatttctatcctggaaattcagaaaggagtatttgaggtgaaatccacaaatggggataccttcttaggtggggaagactttgaccaggccttgctacggcacattgtgaaggagttcaagagagagacaggggttgatttgactaaagacaacatggcacttcagagggtacgggaagctgctgaaaaggctaaatgtgaactctcctcatctgtgcagactgacatcaatttgccctatcttacaatggattcttctggacccaagcatttgaatatgaagttgacccgtgctcaatttgaagggattgtcactgatctaatcagaaggactatcgctccatgccaaaaagctatgcaagatgcagaagtcagcaagagtgacataggagaagtgattcttgtgggtggcatgactaggatgcccaaggttcagcagactgtacaggatctttttggcagagccccaagtaaagctgtcaatcctgatgaggctgtggccattggagctgccattcagggaggtgtgttggccggcgatgtcacggatgtgctgctccttgatgtcactcccctgtctctgggtattgaaactctaggaggtgtctttaccaaacttattaataggaataccactattccaaccaagaagagccaggtattctctactgccgctgatggtcaaacgcaagtggaaattaaagtgtgtcagggtgaaagagagatggctggagacaacaaactccttggacagtttactttgattggaattccaccagcccctcgtggagttcctcagattgaagttacatttgacattgatgccaatgggatagtacatgtttctgctaaagataaaggcacaggacgtgagcagcagattgtaatccagtcttctggtggattaagcaaagatgatattgaaaatatggttaaaaatgcagagaaatatgctgaagaagaccggcgaaagaaggaacgagttgaagcagttaatatggctgaaggaatcattcacgacacagaaaccaagatggaagaattcaaggaccaattacctgctgatgagtgcaacaagctgaaagaagagatttccaaaatgagggagctcctggctagaaaagacagcgaaacaggagaaaatattagacaggcagcatcctctcttcagcaggcatcactgaagctgttcgaaatggcatacaaaaagatggcatctgagcgagaaggctctggaagttctggcactggggaacaaaaggaagatcaaaaggaggaaaaacagtaataatagcagaaattttgaagccagaaggacaacatatgaagcttaggagtgaagagacttcctgagcagaaatgggcgaacttcagtctttttactgtgtttttgcagtattctatatataatttccttaatttgtaaatttagtgaccattagctagtgatcatttaatggacagtgattctaacagtataaagttcacaatattctatgtccctagcctgtcatttttcagctgcatgtaaaaggaggtaggatgaattgatcattataaagatttaactattttatgctgaagtgaccatattttcaaggggtgaaaccatctcgcacacagcaatgaaggtagtcatccatagacttgaaatgagaccacatatggggatgagatccttctagttagcctagtactgctgtactggcctgtatgtacatggggtccttcaactgaggccttgcaagtcaagctggctgtgccatgtttgtagatggggcagaggaatctagaacaatgggaaacttagctatttatattaggtacagctattaaaacaaggtaggaatgaggctagacctttaacttccctaaggcatacttttctagctaccttctgccctgtgtctggcacctacatccttgatgattgttctcttacccattctggaatttttttttttttaaataaatacagaaagcatcttgaaaaaaaaaaaaaaaaaaaaaaaaaaaaaaaaaa

SEQ ID NO: 295 - DNA, 2912 bp, human
cagttgcttcagcgtcccggtgtggctgtgccgttggtcctgtgcggtcacttagccaagatgcctgaggaaacccagacccaagaccaaccgatggaggaggaggaggttgagacgttcgcctttcaggcagaaattgcccagttgatgtcattgatcatcaatactttctactcgaacaaagagatctttctgagagagctcatttcaaattcatcagatgcattggacaaaatccggtatgaaactttgacagatcccagtaaattagactctgggaaagagctgcatattaaccttataccgaacaaacaagatcgaactctcactattgtggatactggaattggaatgaccaaggctgacttgatcaataaccttggtactatcgccaagtctgggaccaaagcgttcatggaagctttgcaggctggtgcagatatctctatgattggccagttcggtgttggtttttattctgcttatttggttgctgagaaagtaactgtgatcaccaaacataacgatgatgagcagtacgcttgggagtcctcagcagggggatcattcacagtgaggacagacacaggtgaacctatgggtcgtggaacaaaagttatcctacacctgaaagaagaccaaactgagtacttggaggaacgaagaataaaggagattgtgaagaaacattctcagtttattggatatcccattactctttttgtggagaaggaacgtgataaagaagtaagcgatgatgaggctgaagaaaaggaagacaaagaagaagaaaaagaaaaagaagagaaagagtcggaagacaaacctgaaattgaagatgttggttctgatgaggaagaagaaaagaaggatggtgacaagaagaagaagaagaagattaaggaaaagtacatcgatcaagaagagctcaacaaaacaaagcccatctggaccagaaatcccgacgatattactaatgaggagtacggagaattctataagagcttgaccaatgactgggaagatcacttggcagtgaagcatttttcagttgaaggacagttggaattcagagcccttctatttgtcccacgacgtgctccttttgatctgtttgaaaacagaaagaaaaagaacaatatcaaattgtatgtacgcagagttttcatcatggataactgtgaggagctaatccctgaatatctgaacttcattagaggggtggtagactcggaggatctccctctaaacatatcccgtgagatgttgcaacaaagcaaaattttgaaagttatcaggaagaatttggtcaaaaaatgcttagaactctttactgaactggcggaagataaagagaactacaagaaattctatgagcagttctctaaaaacataaagcttggaatacacgaagactctcaaaatcggaagaagctttcagagctgttaaggtactacacatctgcctctggtgatgagatggtttctctcaaggactactgcaccagaatgaaggagaaccagaaacatatctattatatcacaggtgagaccaaggaccaggtagctaactcagcctttgtggaacgtcttcggaaacatggcttagaagtgatctatatgattgagcccattgatgagtactgtgtccaacagctgaaggaatttgaggggaagactttagtgtcagtcaccaaagaaggcctggaacttccagaggatgaagaagagaaaaagaagcaggaagagaaaaaaacaaagtttgagaacctctgcaaaatcatgaaagacatattggagaaaaaagttgaaaaggtggttgtgtcaaaccgattggtgacatctccatgctgtattgtcacaagcacatatggctggacagcaaacatggagagaatcatgaaagctcaagccctaagagacaactcaacaatgggttacatggcagcaaagaaacacctggagataaaccctgaccattccattattgagaccttaaggcaaaaggcagaggctgataagaacgacaagtctgtgaaggatctggtcatcttgctttatgaaactgcgctcctgtcttctggcttcagtctggaagatccccagacacatgctaacaggatctacaggatgatcaaacttggtctgggtattgatgaagatgaccctactgctgatgataccagtgctgctgtaactgaagaaatgccaccccttgaaggagatgacgacacatcacgcatggaagaagtagactaatctctggctgagggatgacttacctgttcagtactctacaattcctctgataatatattttcaaggatgtttttctttatttttgttaatattaaaaagtctgtatggcatgacaactactttaaggggaagataagatttctgtctactaagtgatgctgtgataccttaggcactaaagcagagctagtaatgctttttgagtttcatgttggttctttcacagatggggtaacgtgcactgtaagacgtatgtaacatgatgttaactttgtgtggtctaaagtgtttagctgtcaagccggatgcctaagtagaccaaatcttgttattgaagtgttctgagctgtatcttgatgtttagaaaagtattcgttacatcttgtaggatctactttttgaacttttcattccctgtagttgacaattctgcatgtactagtcctctagaaataggttaaactgaagcaacttgatggaaggatctctccacagggcttgttttccaaagaaaagtattgtttggaggagcaaagttaaaagcctacctaagcatatcgtaaagctgttcaaatactcgagcccagtcttgtggatggaaatgtagtgctcgagtcacattctgcttaaagttgtaacaaatacagatgagt

SEQ ID NO: 296 - DNA, 2339 bp, human
acgcggtgccgcggggcgggagtagaggcggagggaggggacacgggctcattgcggtgtgcgccctgcactctgtccctcactcgccgccgacgacctgtctcgccgagcgcacgccttgccgccgccccgcagaaatgcttcggttacccacagtctttcgccagatgagaccggtgtccagggtactggctcctcatctcactcgggcttatgccaaagatgtaaaatttggtgcagatgcccgagccttaatgcttcaaggtgtagaccttttagccgatgctgtggccgttacaatggggccaaagggaagaacagtgattattgagcagagttggggaagtcccaaagtaacaaaagatggtgtgactgttgcaaagtcaattgacttaaaagataaatacaaaaacattggagctaaacttgttcaagatgttgccaataacacaaatgaagaagctggggatggcactaccactgctactgtactggcacgctctatagccaaggaaggcttcgagaagattagcaaaggtgctaatccagtggaaatcaggagaggtgtgatgttagctgttgatgctgtaattgctgaacttaaaaagcagtctaaacctgtgaccacccctgaagaaattgcacaggttgctacgatttctgcaaacggagacaaagaaattggcaatatcatctctgatgcaatgaaaaaagttggaagaaagggtgtcatcacagtaaaggatggaaaaacactgaatgatgaattagaaattattgaaggcatgaagtttgatcgaggctatatttctccatactttattaatacatcaaaaggtcagaaatgtgaattccaggatgcctatgttctgttgagtgaaaagaaaatttctagtatccagtccattgtacctgctcttgaaattgccaatgctcaccgtaagcctttggtcataatcgctgaagatgttgatggagaagctctaagtacactcgtcttgaataggctaaaggttggtcttcaggttgtggcagtcaaggctccagggtttggtgacaatagaaagaaccagcttaaagatatggctattgctactggtggtgcagtgtttggagaagagggattgaccctgaatcttgaagacgttcagcctcatgacttaggaaaagttggagaggtcattgtgaccaaagacgatgccatgctcttaaaaggaaaaggtgacaaggctcaaattgaaaaacgtattcaagaaatcattgagcagttagatgtcacaactagtgaatatgaaaaggaaaaactgaatgaacggcttgcaaaactttcagatggagtggctgtgctgaaggttggtgggacaagtgatgttgaagtgaatgaaaagaaagacagagttacagatgcccttaatgctacaagagctgctgttgaagaaggcattgttttgggagggggttgtgccctccttcgatgcattccagccttggactcattgactccagctaatgaagatcaaaaaattggtatagaaattattaaaagaacactcaaaattccagcaatgaccattgctaagaatgcaggtgttgaaggatctttgatagttgagaaaattatgcaaagttcctcagaagttggttatgatgctatggctggagattttgtgaatatggtggaaaaaggaatcattgacccaacaaaggttgtgagaactgctttattggatgctgctggtgtggcctctctgttaactacagcagaagttgtagtcacagaaattcctaaagaagagaaggaccctggaatgggtgcaatgggtggaatgggaggtggtatgggaggtggcatgttctaactcctagactagtgctttacctttattaatgaactgtgacaggaagcccaaggcagtgttcctcaccaataacttcagagaagtcagttggagaaaatgaagaaaaaggctggctgaaaatcactataaccatcagttactggtttcagttgacaaaatatataatggtttactgctgtcattgtccatgcctacagataatttattttgtatttttgaataaaaaacatttgtacattcctgatactgggtacaagagccatgtaccagtgtactgctttcaacttaaatcactgaggcatttttactactattctgttaaaatcaggattttagtgcttgccaccaccagatgagaagttaagcagcctttctgtggagagtgagaataattgtgtacaaagtagagaagtatccaattatgtgacaacctttgtgtaataaaaatttgtttaaagttaaaaaaaaaaaaaaaaaaaa

SEQ ID NO: 297 - DNA, 2339 bp, human; identical to SEQ ID NO: 296

SEQ ID NO: 298 - DNA, 2339 bp, human
cctgtggtcccgggtttctgcagagtctacttcagaagcggaggcactgggagtccggtttgggattgccaggctgtggttgtgagtctgagcttgtgagcggctgtggcgccccaactcttcgccagcatatcatcccggcaggcgataaactacattcagttgagtctgcaagactgggaggaactggggtgataagaaatctattcactgtcaaggtttattgaagtcaaaatgtccaaaaaaatcagtggcggttctgtggtagagatgcaaggagatgaaatgacacgaatcatttgggaattgattaaagagaaactcatttttccctacgtggaattggatctacatagctatgatttaggcatagagaatcgtgatgccaccaacgaccaagtcaccaaggatgctgcagaagctataaagaagcataatgttggcgtcaaatgtgccactatcactcctgatgagaagagggttgaggagttcaagttgaaacaaatgtggaaatcaccaaatggcaccatacgaaatattctgggtggcacggtcttcagagaagccattatctgcaaaaatatcccccggcttgtgagtggatgggtaaaacctatcatcataggtcgtcatgcttatggggatcaatacagagcaactgattttgttgttcctgggcctggaaaagtagagataacctacacaccaagtgacggaacccaaaaggtgacatacctggtacataactttgaagaaggtggtggtgttgccatggggatgtataatcaagataagtcaattgaagattttgcacacagttccttccaaatggctctgtctaagggttggcctttgtatctgagcaccaaaaacactattctgaagaaatatgatgggcgttttaaagacatctttcaggagatatatgacaagcagtacaagtcccagtttgaagctcaaaagatctggtatgagcataggctcatcgacgacatggtggcccaagctatgaaatcagagggaggcttcatctgggcctgtaaaaactatgatggtgacgtgcagtcggactctgtggcccaagggtatggctctctcggcatgatgaccagcgtgctggtttgtccagatggcaagacagtagaagcagaggctgcccacgggactgtaacccgtcactaccgcatgtaccagaaaggacaggagacgtccaccaatcccattgcttccatttttgcctggaccagagggttagcccacagagcaaagcttgataacaataaagagcttgccttctttgcaaatgctttggaagaagtctctattgagacaattgaggctggcttcatgaccaaggacttggctgcttgcattaaaggtttacccaatgtgcaacgttctgactacttgaatacatttgagttcatggataaacttggagaaaacttgaagatcaaactagctcaggccaaactttaagttcatacctgagctaagaaggataattgtcttttggtaactaggtctacaggtttacatttttctgtgttacactcaaggataaaggcaaaatcaattttgtaatttgtttagaagccagagtttatcttttctataagtttacagcctttttcttatatatacagttattgccacctttgtgaacatggcaagggacttttttacaatttttattttattttctagtaccagcctaggaattcggttagtactcatttgtattcactgtcactttttctcatgttctaattataaatgaccaaaatcaagattgctcaaaagggtaaatgatagccacagtattgctccctaaaatatgcataaagtagaaattcactgccttcccctcctgtccatgaccttgggcacagggaagttctggtgtcatagatatcccgttttgtgaggtagagctgtgcattaaacttgcacatgactggaacgaagtatgagtgcaactcaaatgtgttgaagatactgcagtcatttttgtaaagaccttgctgaatgtttccaatagactaaatactgtttaggccgcaggagagtttggaatccggaataaatactacctggaggtttgtcctctccatttttctctttctcctcctggcctggcctgaatattatactactctaaatagcatatttcatccaagtgcaataatgtaagctgaatcttttttggacttctgctggcctgttttatttcttttatataaatgtgatttctcagaaattgatattaaacactatcttatcttctcctgaactgttgattttaattaaaattaagtgctaattaccaaaaaaaaaaa

SEQ ID NO: 299 - DNA, 1208 bp, human
gcgggaaacatggcggcattgagcggagtccgctggctgacccgagcgctggtctccgccgggaaccctggggcatggagaggtctgagtacctcggccgcggcgcacgctgcatcgcggagccaggccgaggacgtgagggtggagggctcctttcccgtgaccatgcttccgggagacggtgtggggcctgagctgatgcacgccgtcaaggaggtgttcaaggctgccgctgtcccagtggagttccaggagcaccacctgagtgaggtgcagaatatggcatctgaggagaagctggagcaggtgctgagttccatgaaggagaacaaagtggccatcattggaaagattcataccccgatggagtataagggggagctagcctcctatgatatgcggctgaggcgtaagttggacttatttgccaacgtagtccatgtgaagtcacttcctgggtatatgactcggcacaacaatctagacctggtgatcattcgagagcagacagaaggggagtacagctctctggaacatgagagtgcaaggggtgtgattgagtgtttgaagattgtcacacgagccaagtctcagcggattgcaaagttcgcctttgactatgccaccaagaaggggcggggcaaggtcactgctgtccacaaggccaacatcatgaaacttggggatgggttgttcctgcagtgctgtgaggaagttgctgaactgtaccccaaaatcaaatttgagacaatgatcatagacaactgctgcatgcagctggtgcagaatccttaccagtttgatgtgcttgtgatgcccaatctctatgggaacattattgacaatctggctgctggcctggttgggggagctggtgtggtccctggtgagagctatagtgcagaatacgcagtctttgagacgggtgcccggcacccatttgcccaggcagtgggcaggaatatagccaatcccacggccatgctgctgtcggcttccaacatgctgcggcatcttaatcttgagtatcactccagcatgatcgcagatgcggtgaagaaggtgatcaaagttggcaaggttcgaacctctgacatgggtggctatgctacttgccatgacttcactgaggctgtcattgctgccttgccccacccataggccctgtccatacccatgtaaggtgttcaataaagaacatgaaccaa

SEQ ID NO: 300 - DNA, 2150 bp, human
ctcaggttcccggtgcttcgcgcgtctgccgttgtcacaggccagggaggtggcaccaccaggcgaagcttggcgagattgtgtcgtcaagcgcgtacgggcgccaattggccgggcgatgtggcgtggactggcgctggcgcgagcgattggctgcgcggcccgggggcggggccagtgggcggtgcgcgccgcagactgtgctcaaagcgggcgccatccgggaccggcggttgtctgtggccggaggctgatcagtgttctagaacagatcagacattttgtaatgatgcctgaaataaacactaaccacctcgacaagcaacaggttcaactcctggcagagatgtgtatccttattgatgaaaatgacaataaaattggagctgagaccaagaagaattgtcacctgaacgagaacattgagaaaggattattgcatcgagcttttagtgtcttcttattcaacaccgaaaataagcttctgctacagcaaagatcagatgctaagattacctttccaggttgttttacgaatacgtgttgtagtcatccattaagcaatccagccgagcttgaggaaagtgacgcccttggagtgaggcgagcagcacagagacggctgaaagctgagctaggaattcccttggaagaggttcctccagaagaaattaattatttaacacgaattcactacaaagctcagtctgatggtatctggggtgaacatgaaattgattacattttgttggtgaggaagaatgtaactttgaatccagatcccaatgagattaaaagctattgttatgtgtcaaaggaagaactaaaagaacttctgaaaaaagcagccagtggtgaaattaagataacgccatggtttaaaattattgcagcgacttttctctttaaatggtgggataacttaaatcatttgaatcagtttgttgaccatgagaaaatatacagaatgtgaatatgtaggtaaatgattacagaaaaatttatctgcttaacaaacttagaatgactttttccttttaaatttagttctatcattaatttatcattaaatttagttctatcatttggtactatcattaatgtattatatacactgatactttaaaacttgtgtggaaaaaactaacttataattttgtatcacacaccctggatatgtgttctgtttctaagcgacatttgtgagagattattgtaaaatgagagcgagcaaataaaacttaatttaatctttgcagatacatacttatgggaaatttgaacaaatgagtgaaactctgtttttagtaggctgtgataaacatttccggagcacttgcagaggacttgctatttgccaggtgctttatgtatcattaaatttttctcatagttcagaaaaatgtgcaaaggaaactattgtctcgctccttcaaaacagtcttaattaactttcatattagcagattaaactagcagagcaggttcaagggaaattaaatgatatggaccctaatttgtatcattctgagttgattgtgtggtttattcattctggaaacatgttgatacttacagtcagccactgcttttgataagtgatattgattaggttgaatcttcttgtaaatagtatttaccagttagcaaagtctgtgttttcagaattacagtgagcacagaggtgttcataaaatgggaattgagtcccactcggtaagagttgcttaaacttgacactgttgacatttgggctggataaaacccctgtggtggggtctgtgctgtgcattgcaggatggtgagcagcgtccctctcatgtgacacccacagttatgccggatgttgccagatgcccctaggggacagagtcaacccccaactgaggaccactgtcctacagagtcaggaaatattgtagggagaaaaaaataacaacaacaaaggcctgtgttaatgttaaatagatgagattatggaatgtgtatattaatgttaaaaattgtaccttgatcaatgtactttttataaacttgccatagatatctcagatttgaaacctcaagacagatttattattcttaaatgctgtatgataatgaagaaaaataaaaatttatttcttgcaaagttaaaaaaaaaaaaaaaa

SEQ ID NO: 301 - DNA, 1314 bp, human
cggctgtgttgcgcagtcttcatgggttcccgacgaggaggtctctgtggctgcggcggcggctgctaactgcgccacctgctgcagcctgtccccgccgctctgaagcggccgcgtcgaagccgaaatgccgccaccccggaccggccgaggccttctctggctgggtctggttctgagctccgtctgcgtcgccctcggatccgaaacgcaggccaactcgaccacagatgctctgaacgttcttctcatcatcgtggatgacctgcgcccctccctgggctgttatggggataagctggtgaggtccccaaatattgaccaactggcatcccacagcctcctcttccagaatgcctttgcgcagcaagcagtgtgcgccccgagccgcgtttctttcctcactggcaggagacctgacaccacccgcctgtacgacttcaactcctactggagggtgcacgctggaaacttctccaccatcccccagtacttcaaggagaatggctatgtgaccatgtcggtgggaaaagtctttcaccctgggatatcttctaaccataccgatgattctccgtatagctggtcttttccaccttatcatccttcctctgagaagtatgaaaacactaagacatgtcgagggccagatggagaactccatgccaacctgctttgccctgtggatgtgctggatgttcccgagggcaccttgcctgacaaacagagcactgagcaagccatacagttgttggaaaagatgaaaacgtcagccagtcctttcttcctggccgttgggtatcataagccacacatccccttcagataccccaaggaatttcagaagttgtatcccttggagaacatcaccctggcccccgatcccgaggtccctgatggcctaccccctgtggcctacaacccctggatggacatcaggcaacgggaagacgtccaagccttaaacatcagtgtgccgtatggtccaattcctgtggactttcagcggaaaatccgccagagctactttgcctctgtgtcatatttggatacacaggtcggccgcctcttgagtgctttggacgatcttcagctggccaacagcaccatcattgcatttacctcggatcatggtttcctcatgaggacaaatacctgattttgaataaagcagcattcagttgaaataaccctttctgtggtaattccaagtgaatatttttcttctaggtgatgagtttctacttcctctggtttttacaacaggaaatgaaatggtatctaaaataaacaagctgtggtatgatgataatt

SEQ ID NO: 302 - DNA, 2349 bp, human
agcccctctacctccggaagagacgagtgcggtaacaccgttcacagagctagccggacgtcctccgactcaagatatttgtcaaatattttcagaagatggctgatccttggcaggaatgcatggattatgcagtaactctagcaagacaagctggagaggtagtttgtgaagctataaaaaatgaaatgaatgttatgctgaaaagttctccagttgatttggtaactgctacggaccaaaaagttgaaaaaatgcttatctcttccataaaggaaaagtatccatctcacagtttcattggtgaagaatctgtggcagctggggaaaaaagtatcttaaccgacaaccccacatggatcattgaccctattgatggaacaactaactttgtacatagatttccttttgtagctgtttcaattggctttgctgtaaataaaaagatagaatttggagttgtgtacagttgtgtggaaggcaagatgtacactgccagaaaaggaaaaggtgccttttgtaatggtcaaaaactacaagtttcacaacaagaagatattaccaaatctctcttggtgactgagttgggctcttccagaacaccagagactgtgagaatggttctttctaatatggaaaagcttttttgcattcctgttcatgggatccggagtgttggaacagcagctgttaatatgtgccttgtggcaactggcggagcagatgcatattatgaaatgggaattcactgctgggatgttgcaggagctggcattattgttactgaagctggtggcgtgctaatggatgttacaggtggaccatttgatttgatgtcacgaagagtaattgctgcaaataatagaatattagcagaaaggatagctaaagaaattcaggttatacctttgcaacgagacgacgaagattaattaaggcagcctcatagtcaatcccagttgcttttccccagatttggtgactcatcaatggatatgtgttttggatgtatgatatgcttggtttaaattctctttgtccaggtcaaaaatttggaacttgtttcttattttactatgtctaggtttgcaagaattgacataatgtttgtttcactgatttaaaaaattttgcatgtaagaatgtactttaggaaacatacccaggaagtacagttgataaatataacatcaactgaaatagtcaattagcaattttgtgtttctaaatatctatggtcccctgaaattttgacttagtatataggtgcagagacacccacttagaaagttaactgtttggaaaaacatttctctttagtttcaaaaaccatatataattaaatttgtaaggatatactgagtaccctaggccaacttttttttctttgcagagaaccttttttgttttattcttcagtgttcatatagcacctggcccattacatatctaggcaactaaaaacaaacattgtaagaatgaatatttttaatgtagtaattcctagttacaatagatacataaagtaatgaactcagcattctgtacttttgcttcaggtttgaagtaaaaattatctagttaaattttttttatttcacgttaccatgccatttcacattaccataccatcagatagcatggcttattgtgggcatttctgcagtgaatacattttccaaaacagttaaattgtctgtttggatttgctttaaagtcttgtgtaagagagaagaaactatttctataataaaaagcactctcatcagatatctgacataattagatacaatataacattttactaagttcagtattcatgttttaaaggtgtttatactgatttgattgtgctggcaaatatactgtattgttaatattgaactgtttatttttctcttagtcttcttatttaattaacttcattgccgctggattctgttcagcctttaaaaatatttcttagtggtcattgctctgcagaactcaaaaagaaaattgtacttgttcatagacatttttaaagggttaatttattgttcagccttatcccttggcacgtaaacagactactagacttattgtaggttcgtttgagctttgtgttgtaaaattaaaaatgcttctataaagttttcaaggtagggagtgattttattattgtgtatatctaatatattaagtatgtgtgatactaaggtttgactgctataattatttgtactgttgatcacatgtacttaaaacatctgatactgtattctaagacaggttgtttttgcaattaaatttattttaataagacgatcatgaataaaacttaaaaaaaaaaaaaaaaaaaaaaaaaaa

SEQ ID NO: 303 - DNA, 1682 bp, human
cctgctgaggccaagctcggatccggtgccgagccaagcggggccgtgcgtcgccggccttcgctcgcgtgacctccgccgtcctccccaaccctcgtcctctgcgcctgcggccgcagccccagcgcccctcgcctaacctcccgccgggccgcgcctcctcctcctcctgctccccgccgcttccgtttctcgagggaaaggctgctgcctcctgctctgtcctcatccccggcttagctgacggcccagaggtgggtgccaattccaccagcagctgcaactgaaaagcaaggttcagaaatgtcagatatcctccgggagctgctctgtgtctctgagaaggctgctaacattgcccgggcgtgcagacagcaggaagccctcttccagctgctgatcgaagaaaagaaagagggagaaaagaacaagaagtttgcagttgacttcaagactctggctgatgtactggtacaggaagttataaaacagaatatggagaacaagtttccaggcttggaaaaaaatatttttggagaagaatccaatgagtttactaatgactggggggaaaagattaccttgaggttgtgttcaacagaggaagaaacagcagagcttcttagcaaagtcctcaatggtaacaaggtagcatctgaagcattagccagggttgttcatcaggatgttgcctttactgacccaactctggattccacagagatcaatgttccacaggacattttgggaatttgggtggaccccatagattcaacttatcagtatataaaaggttctgctgacattaaatccaaccagggaatcttcccctgtggacttcagtgtgtcaccattttaattggtgtctatgacatacagacaggggttcccctgatgggagtcatcaatcaaccttttgtgtcacgagatccaaacaccctcaggtggaaaggacagtgctattggggcctttcttacatggggaccaacatgcattcactacagctcaccatctctagaagaaacggcagtgaaacacacactggaaacaccggctctgaggcagcattctcccccagtttttcagccgtaattagtacaagtgaaaaggagactatcaaagctgcattgtcacgtgtgtgtggagatcgcatatttggggcagctggggctggttataagagcctatgtgttgtccaaggcctcgttgacatttacatcttttcagaagataccacattcaaatgggactcttgtgctgctcatgccatactgcgggccatgggtgggggaatagtagacttgaaagaatgcttagaaagaaatccagaaacagggcttgatttgccacagttggtgtaccacgtggaaaatgagggtgctgctggggtggatcggtgggccaacaagggaggactcattgcatacagatccaggaagcggctggagacattcctgagcctcctggtccaaaacctggcacctgcagagacgcatacctagaggaactctaaccccggtgtacctgtataaactgaactgtgaaactgtttcggttatctctgtcttttgaggatggctttgtcctgttgctggttaacattcaccttcctcttttgaggagtatttttccattatgtattcataataatgttaatttcaataaatgacattcatgcagc

SEQ ID NO: 304 - DNA, 3224 bp, human
cgaggaccagcacctgaggccgggccgcaggccgacttcacagccaggcgcgcgcgtcgctgctgctgctgcggggctctggcgcgccagccggcgggacagcgggggctggcgggggccggggagcgccagatgatggatttggacatgcttctatgaagaaatgccacatggtccgagagcaaacatgtccaggctactcactttagtgactagggctcggtgccagcacttcccgggtaatcagacgtggtctgaccgaggatcaagaagcacatcatcaccaatgacatcatgacagcaagagagcacagccctcgccatggtgccagggcccgtgcaatgcagcgggcttccaccatcgacgtggcggccgacatgctgggcctctctctggcaggaaatatacaagacccagatgagcccattttagaatttagcttagcttgcagtgagctgcatactccatcgctagatcgaaagccaaatagttttgttgcggtgagtgtcaccacccctcctcaggcattctggacgaagcatgcacagacggagatcattgagggaaccaacaatcctatatttctaagcagtattgccttctttcaagactctcttatcaatcagatgacacaagtcaaactctccgtgtatgatgtcaaagatagatctcagggaacaatgtatttactgggctctggaacgttcattgtcaaagatctgctccaggacaggcatcataggttgcatttaacactaaggtctgcagagagtgaccgtgtaggtaacatcaccgtgattggctggcagatggaggagaagtcagaccaacggccccctgtgacccggtctgtggacactgtcaatgggaggatggttcttcctgtcgatgagagcttgacggaggcgttaggaatccgatccaaatacgcttcattgcgaaaggacactttgctgaaatcggtgttcggtggtgccatctgccgcatgtaccggtttccaaccactgatggtaaccatttgcggatcctggagcagatggcagagagcgtgctctccctgcacgtgccccggcagttcgtgaagctcctactagaggaagatgcagccagagtgtgtgagctggaggagctgggagagctgtccccttgctgggagagcctccggcgccaaattgtcacccagtaccagaccatcatcctcacataccaggagaacctgaccgacctccatcagtacagagggccctcgtttaaagcaagcagtttgaaagcagataaaaagttagaatttgttcccacaaacttgcacatacaaaggatgagagttcaagacgatggaggatcagatcagaactacgacatcgtcaccattggggcgccagcagcacactgccaaggttttaagtcaggaggtctccgcaaaaagctgcacaaatttgaagagaccaagaaacattttgaggagtgttgtacatcatctggctgccagtccataatctacataccccaggatgttgtcagagccaaggagatcatcgcccagatcaacaccctgaaaacccaagtgagttactacgcagagcggctgtcaagggcagccaaggacaggtctgccactggccttgagaggacactcgccatcttggcagacaagacacggcagctggtcacggtctgcgactgcaagctcctggccaactccatccatgggctgaacgctgcacggcctgactacattgcctccaaggcctctcccacttcgactgaggaggagcaggtgatgcttagaaatgaccaggacaccctcatggcccggtggacagggagaaacagccgatcttccctgcaggtggactggcacgaggaggagtgggagaaagtgtggctgaacgtggacaagagcctagagtgcatcattcagcgtgtggacaagctgctgcagaaggagcggctgcatggcgagggctgtgaggatgtcttcccctgtgcaggcagctgcaccagcaagaaagattgcagtccccctcctgaagagtccagcccaggtgaatggagtgaggccctttacccgctgctgaccactctcaccgactgcgtggccatgatgagtgacaaggccaagaaggccatggtattcctgctcatgcaggacagcgcgcccaccatagccacctacctgagcctgcagtaccgccgtgacgtggtcttctgccagacgctgaccgccctcatctgcggcttcatcattaagctgaggaactgcctgcatgacgacggcttcctgcgccagctctacaccatcgggctgctggcccagttcgagagcctgctgagcacctacggggaggagctggcaatgctggaggacatgagccttgggatcatggacttgaggaacgtgaccttcaaagtcactcaggccacttccagcgcctccgcagacatgctgcccgtcatcacaggaaatcgcgacgggtttaacgtgcgggtccctctgccgggcccgctgtttgacgccttgccccgggagatccagagtggcatgctgctgcgagtgcagcccgtcctcttcaacgtgggcatcaatgagcagcagacactggccgagaggtttggcgatacgtctttacaagaagtcatcaacgtggagagtttggtgcggttaaattcctactttgagcagtttaaggaagttttgcctgaggattgcctgcctcggtctcgcagtcagacgtgcctgccagagctgctgcggtttctgggtcagaacgtgcatgcccggaagaataagaacgtcgacattctctggcaagctgctgagatctgccgccgccttaatggggtccggttcaccagctgcaagagcgctaaggaccgtacagccatgtcggtgacactggagcagtgcctgatcctgcaacacgagcatggcatggccccgcaggtcttcacccaggccctggagtgcatgcgcagcattggaacacgggaggtagtcacccagaaaaacttgagcggcctggtgcccatccgagacttaaggctagaccccagcctcctctgttccatccctttattagctctgagccccaatttactgattgtgtggctctttctgagcatagcatacctggtgaccaaattgcgttgcaaatgaatatcattatgaaaaattaataagtcacaagaaaaacaaaagtgccagaagatgtccagccaccg

SEQ ID NO: 305 - DNA, 3060 bp, human
ggtagtaacagattatgggcaacagtccttttaattaatctaccgtcatcatggctaatgaggactgtcccaaggctgctgatagtcctttttcatcagataaacatgcccaactcatcttggcccaaatcaataagatgagaaatggacagcatttctgtgatgtgcagctgcaagttggacaggaaagttttaaagctcatcggctggttttggctgccagcagtccttactttgcagctttgttcactggaggaatgaaagagtcctcaaaagatgttgtaccgattctaggaattgaagcaggaatctttcagatacttctagatttcatttacacaggtatagtgaacataggtgtgaataatgtccaggagttgattattgcagcagacatgctacagttgactgaagttgttcatctttgctgtgaatttctgaaaggacaaattgatccactgaactgcattggaatttttcagttctctgagcaaattgcctgccatgatctcttggaattctcagaaaactacattcatgtccatttcttggaggttcatagtggagaagagttcctggcacttacgaaagatcagctgatcaaaattttgcgaagtgaagagcttagcattgaggatgaataccaggtcttcttagctgcaatgcaatggattctgaaagatttgggaaaaagaagaaaacatgtggtggaagtgctagacccaattcgattccctttattacctcctcagagacttttaaagtatatagaaggagtatccgattttaatcttcgtgttgcattgcaaacacttctgaaagagtactgtgaagtatgcaaatctcccaaagagaacaagttttgtagttttctgcagacatctaaggttcgacctcggaagaaagcaagaaagtacctgtatgcagtaggtggatatactcggttgcaggggggtcgctggagtgatagcagagccctcagctgtgtagaacgttttgacacctttagccagtactggaccactgtgtcttcacttcatcaggctcgaagtgggctgggagtaacagttctgggagggatggtctacgctattggaggtgaaaaggattcaatgatttttgattgtactgaatgctatgatccagttactaaacagtggacaactgtagcttcgatgaatcatccccgctgcggcttaggagtgtgtgtgtgttatggggctatctatgctttgggtggatgggttggagctgagatagggaacaccattgaacgatttgatcctgatgaaaataaatgggaagtagttggtaacatggctgtgtcacgctactactttgggtgctgtgaaatgcaaggtttaatttatgtaattgggggcatcagcaatgaaggaatagaacttcgttcttttgaagtctatgatccactttctaagcgttggtctccacttcctccaatgggaaccaggagagcatatcttggtgtggctgcactcaatgactgcatctattctgttggaggatggaatgagacccaagatgctcttcatactgtagaaaaatattcctttgaagaggaaaagtgggttgaagttgcctcaatgaaagtgcctagagcaggcatgtgtgttgtggcagtcaatggtcttctgtatgtttctggaggtcgatcttccagccatgattttttggctccaggtaccttggactcagttgaagtttataaccctcattcagatacatggacagaaattggtaacatgatcaccagtcgttgtgaagggggcgttgctgtgctatgaaatataaagcataacagagcacaaggaacattttgaaaatgcaggacctgaccttttgcaaagcaaacatagatttggtgataagaccctctgattctgtgagttttccatgtatttggtagataaatgactaacgaggctgggcgcagtggcctcatgcctataatcccagcactttggaaggctgaggcagggggatcgcttgagcccaggaatttgaggttgtagtgagctacgatcatgccactgcactccactctgggcaacagaatgagatcctgtctcttaaagaaaaaaaataaactcaagaatgatttttctaaaaatatgagtgagaatggatatggaatatatcccaattaataaagagctcacacagatttgccaggtttactaataatagaaatgccatttatgctgtagaattctccagtttaagtgtagacaactcctattttacaaatttgtagaaattatttactagaagcttcctggcaaatagtccctttagctacttctccagtgcagtataaattgtaacataaaactttatgtgatataggaatagtgtcaatgacacagtttaaagacctctatattcacaattatatccagagcataattttccatggccatagtttgagccacagagaaagccaatgaaatagattcctacttttatttaatgccaagagttttcactagccccaaactttttattggcagcagatatcctaggaggggtgtttgggaaatatctagctattttaatagatagatacctttttgcttgatgataagtttttgcttgctcatattttttgtcttgatcctgagaatgcaagtaaggaattaataggaggttcttagtgaccagatgttgtaatgggctatacagtccagcaggcagtatgcacctagaaatttctcccttttttaggctgggcatggtggctcacgcctgtagtcccagcactttgagaggccgaggtgagacgggaagatggcttgaactcgggagttcgagactagcctgggcaacgtgatgagactccgtctctaccaaaaaatatataaaaattagccgggcgttgtggcttgtacctgtggtcccatctgcttgggaggctgaggttgcaggatcgcttgagcccaggaggtcagggctgcagtgagccgagattgtgccactgcacaccggcctgggtgacagcatgagaacctgtctcaaaaaaaaaaaaaaaaaaaaaaaaaa

SEQ ID NO: 306 - DNA, 3583 bp, human
cgcggacccggccggcccaggcccgcgcccgccgcggccctgagaggccccggcaggtcccggcccggcggcggcagccatggccggggggccgggcccgggggagcccgcagcccccggcgcccagcacttcttgtacgaggtgccgccctgggtcatgtgccgcttctacaaagtgatggacgccctggagcccgccgactggtgccagttcgccgccctgatcgtgcgcgaccagaccgagctgcggctgtgcgagcgctccgggcagcgcacggccagcgtcctgtggccctggatcaaccgcaacgcccgtgtggccgacctcgtgcacatcctcacgcacctgcagctgctccgtgcgcgggacatcatcacagcctggcaccctcccgccccgcttccgtccccaggcaccactgccccgaggcccagcagcatccctgcacccgccgaggccgaggcctggagcccccggaagttgccatcctcagcctccaccttcctctccccagcttttccaggctcccagacccattcagggcctgagctcggcctggttccaagccctgcttccctgtggcctccaccgccatctccagccccttcttctaccaagccaggcccagagagctcagtgtccctcctgcagggagcccgcccctctccgttttgctggcccctctgtgagatttcccggggcacccacaacttctcggaggagctcaagatcggggagggtggctttgggtgcgtgtaccgggcggtgatgaggaacacggtgtatgctgtgaagaggctgaaggagaacgctgacctggagtggactgcagtgaagcagagcttcctgaccgaggtggagcagctgtccaggtttcgtcacccaaacattgtggactttgctggctactgtgctcagaacggcttctactgcctggtgtacggcttcctgcccaacggctccctggaggaccgtctccactgccagacccaggcctgcccacctctctcctggcctcagcgactggacatccttctgggtacagcccgggcaattcagtttctacatcaggacagccccagcctcatccatggagacatcaagagttccaacgtccttctggatgagaggctgacacccaagctgggagactttggcctggcccggttcagccgctttgccgggtccagccccagccagagcagcatggtggcccggacacagacagtgcggggcaccctggcctacctgcccgaggagtacatcaagacgggaaggctggctgtggacacggacaccttcagctttggggtggtagtgctagagaccttggctggtcagagggctgtgaagacgcacggtgccaggaccaagtatctgaaagacctggtggaagaggaggctgaggaggctggagtggctttgagaagcacccagagcacactgcaagcaggtctggctgcagatgcctgggctgctcccatcgccatgcagatctacaagaagcacctggaccccaggcccgggccctgcccacctgagctgggcctgggcctgggccagctggcctgctgctgcctgcaccgccgggccaaaaggaggcctcctatgacccaggtgtacgagaggctagagaagctgcaggcagtggtggcgggggtgcccgggcatttggaggccgccagctgcatccccccttccccgcaggagaactcctacgtgtccagcactggcagagcccacagtggggctgctccatggcagcccctggcagcgccatcaggagccagtgcccaggcagcagagcagctgcagagaggccccaaccagcccgtggagagtgacgagagcctaggcggcctctctgctgccctgcgctcctggcacttgactccaagctgccctctggacccagcacccctcagggaggccggctgtcctcagggggacacggcaggagaatcgagctgggggagtggcccaggatcccggcccacagccgtggaaggactggcccttggcagctctgcatcatcgtcgtcagagccaccgcagattatcatcaaccctgcccgacagaagatggtccagaagctggccctgtacgaggatggggccctggacagcctgcagctgctgtcgtccagctccctcccaggcttgggcctggaacaggacaggcaggggcccgaagaaagtgatgaatttcagagctgatgtgttcacctgggcagatcccccaaatccggaagtcaaagttctcatggtcagaagttctcatggtgcacgagtcctcagcactctgccggcagtgggggtgggggcccatgcccgcgggggagagaaggaggtggccctgctgttctaggctctgtgggcataggcaggcagagtggaaccctgcctccatgccagcatctgggggcaaggaaggctggcatcatccagtgaggaggctggcgcatgttgggaggctgctggctgcacagacccgtgaggggaggagaggggctgctgtgcaggggtgtggagtagggagctggctcccctgagagccatgcagggcgtctgcagcccaggcctctggcagcagctctttgcccatctctttggacagtggccaccctgcacaatggggccgacgaggcctagggccctcctacctgcttacaatttggaaaagtgtggccgggtgcggtggctcacgcctgtaatcccagcactttgggaggccaaggcaggaggatcgctggagcccagtaggtcaagaccagccagggcaacatgatgagaccctgtctctgccaaaaaattttttaaactattagcctggcgtggtagcgcacgcctgtggtcccagctgctggggaggctgaagtaggaggatcatttatgcttgggaggtcgaggctgcagtgagtcatgattgtatgactgcactccagcctgggtgacagagcaagaccctgtttcaaaaagaaaaaccctgggaaaagtgaagtatggctgtaagtctcatggttcagtcctagcaagaagcgagaattctgagatcctccagaaagtcgagcagcacccacctccaacctcgggccagtgtcttcaggctttactggggacctgcgagctggcctaatgtggtggcctgcaagccaggccatccctgggcgccacagacgagctccgagccaggtcaggcttcggaggccacaagctcagcctcaggcccaggcactgattgtggcagaggggccactacccaaggtctagctaggcccaagacctagttacccagacagtgagaagcccctggaaggcagaaaagttgggagcatggcagacagggaagggaaacattttcagggaaaagacatgtatcacatgtcttcagaagcaagtcaggtttcatgtaaccgagtgtcctcttgcgtgtccaaaagtagcccagggctgtagcacaggcttcacagtgattttgtgttcagccgtgagtcacactacatgcccccgtgaagctgggcattggtgacgtccaggttgtccttgagtaataaaaacgtatgttccctaaaaaaaaaaaaa

SEQ ID NO: 307 - DNA, 1155 bp, human
tacgcgccttggggtccgggtcggctttccccgggacccctggccggaaactgagccgttcacttccgccaccagccggaagttttctgtcactggacgccaaggagttttcggtggctcagctgggtaaccggggatcaccatggcggcctcattggtcgttcagattctaggagataagtttccatgcactttggtggcacagaaaattgacctgccggagtaccagggggagccggatgagatttccatacagaaatgtcaggaggcagttcgccaggtacaggggcccgtgctggttgaggacacttgtctgtgcttcaatgcccttggagggctccccggcccctacataaagtggtttctggagaagttaaagcctgaaggtctccaccagctcctggccgggttcgaggacaagtcagcctatgcgctctgcacgtttgcactcagcaccggggacccaagccagcccgtgcgcctgttcaggggccggacctcgggccggatcgtggcacccagaggctgccaggactttggctgggacccctgctttcagcctgatggatatgagcagacgtacgcagagatgcctaaggcggagaagaacgctgtctcccatcgcttccgggccctgctggagctgcaggagtactttggcagtttggcagcttgacttctgcagctggaggaggcccctcaggccggggatctggggagggctagcccaaaacctcccgcatcgggcaggcaccccctgaagtacttccttcagggtttcccctttgtgagggtgtcgagtagcctcaccggcctgtctggaggagcagctggctctgctctgagaaactctggcaagtggacgccattctcttgcccttaggattcactgctctctcctacagccgccaggcctggggtcctgaaaggaccttgggtggtaaagctgtacttggtgggagtgagggcgtggggaggaaccatgcaaatcgccttccatggtttttaaatgcagtaaataacatttctggatgagacttgtttccaaaataaaccagctatatctgttttgaaaaaaaaaaaaaaaaaaaaaaaaaaaaaaaaaaaaaaaaaaaaaaaaaaaaaaaaaaaaaaaaaaaaaaaaaaaaaaaaaaa

SEQ ID NO: 308 - DNA, 1891 bp, human
ccgaggctataagagggcgcacaagtggcgcggcgcaggagccgccgccagtggagggccgggcgctgcggccgcggccggggcgggcgcagggccgagcggacgggggggcgcgggccccccgggaggccgcggccactcccccccgggccggcgcggcgggggaggcggaggatggaaacacccttctacggcgatgaggcgctgagcggcctgggcggcggcgccagtggcagcggcggcacgttcgcgtccccgggccgcttgttccccggggcgcccccgacggccgcggccggcagcatgatgaagaaggacgcgctgacgctgagcctgagtgagcaggtggcggcagcgctcaagcctgcgcccgcgcccgcctcctacccccctgccgccgacggcgcccccagcgcggcaccccccgacggcctgctcgcctctcccgacctggggctgctgaagctggcctcccccgagctcgagcgcctcatcatccagtccaacgggctggtcaccaccacgccgacgagctcacagttcctctaccccaaggtggcggccagcgaggagcaggagttcgccgagggcttcgtcaaggccctggaggatttacacaagcagaaccagctcggcgcgggccgggccgctgccgccgccgccgccgccgccggggggccctcgggcacggccacgggctccgcgccccccggcgagctggccccggcggcggccgcgcccgaagcgcctgtctacgcgaacctgagcagctacgcgggcggcgccgggggcgcggggggcgccgcgacggtcgccttcgctgccgaacctgtgcccttcccgccgccgccacccccaggcgcgttggggccgccgcgcctggctgcgctcaaggacgagccacagacggtgcccgacgtgccgagcttcggcgagagcccgccgttgtcgcccatcgacatggacacgcaggagcgcatcaaggcggagcgcaagcggctgcgcaaccgcatcgccgcctccaagtgccgcaagcgcaagctggagcgcatctcgcgcctggaagagaaagtgaagaccctcaagagtcagaacacggagctggcgtccacggcgagcctgctgcgcgagcaggtggcgcagctcaagcagaaagtcctcagccacgtcaacagcggctgccagctgctgccccagcaccaggtcccggcgtactgagtcgggcatggcggccacctccaaggggcgggctcgcgggggggtgtcgtgggcgccccggacttggagagggtgcggccctccacccccccctccccgagtgtgcccaggaactcagagaggcgcggccccggggattcccccccgaggtgcccaggactcggaaggggcgccccggactcgacaagctggaccccctgctcccgggggcgagcgcatgacccccccgccctcgcgctgcctctttcccccgcgcggccgccccgtgttgcacaaacccgcgcgtctcggctgcccctttgtacaccgcgccgcaagggggctccgagggggcgcacgtcaaaccctgcctttcctttacttttactttttttttttctttggaagagagaagaacagagtgttcgattctgccctatttatgtttctactcggggaacaaacgttggttgtgtgtgtgtgtgttttcttgtgttggttttttaaagaaatgggaagaagaaaaaaaaattctccgcccctttcctcgatctcgctcccccttcggtctttcgaccgtccccccctcccctttttttgttctgttttgttttgttttgctacgagtccacattcctgtttgtaatccttggttcgcccggttttctgttttcagtaaagtctcgttacgcca

SEQ ID NO: 309 - DNA, 3756 bp, human
gtcgggatggaggtgagaagacggccgtgacgcgcgcccgcggggccccctgcacccccagcagcccacagcgctccctgcccccctcccccgcagcagcgggccttgccgtcgagtgacagcggcctgggggggcagggggggcgggggcggccggatcagcgatgccggcgggcatgacgaagcatggctcccgctccaccagctcgctgccgcccgagcccatggagatcgtgcgcagcaaggcgtgctctcggcgggtccgcctcaacgtcggggggctggcgcacgaggtactctggcgtaccctggaccgcctgccccgcacgcggctgggcaagctccgcgactgcaacacgcacgactcgctgctcgaggtgtgcgatgactacagcctcgacgacaacgagtacttctttgaccgccacccgggcgccttcacctccatcctcaacttctaccgcactgggcgactgcacatgatggaggagatgtgcgcgctcagcttcagccaagagctcgactactggggcatcgacgagatctacctggagtcctgctgccaggcccgctaccaccagaagaaagagcagatgaacgaggagctcaagcgtgaggccgagaccctacgggagcgggaaggcgaggagttcgataacacgtgctgcgcagagaagaggaaaaaactctgggacctactggagaagcccaattcctctgtggctgccaagatccttgccataatttccatcatgttcatcgtcctctccaccattgccctgtccctcaacacgctgcctgagctacagagcctcgatgagttcggccagtccacagacaacccccagctggcccacgtggaggccgtgtgcatcgcatggttcaccatggagtacctgctgaggttcctctcctcgcccaagaagtggaagttcttcaagggcccactcaatgccattgacttgttggccattctgccatactatgtcaccattttcctcaccgaatccaacaagagcgtgctgcaattccagaatgtccgccgcgtggtccagatcttccgcatcatgcgaattctccgcatccttaagcttgcacgccactccactggcctccagtctctgggcttcactttgcggaggagctacaatgagttgggcttgctcatcctcttccttgccatgggcattatgatcttctccagccttgtcttctttgctgagaaggatgaggacgacaccaagttcaaaagcatcccagcctctttctggtgggccaccatcaccatgactactgttgggtatggagacatctaccccaagactctcctggggaaaattgttgggggactctgctgcattgcaggagtcctggtgattgctcttcccatccccatcatcgtcaataacttctctgagttctataaggagcagaagagacaggagaaagcaatcaaacggcgagaggctctggagagagccaagaggaatggcagcatcgtatccatgaacatgaaggatgcttttgcccggagcattgagatgatggacattgtggttgagaaaaatggggagaatatgggtaagaaagacaaagtacaagataaccacttgtctcctaacaaatggaaatggacaaagaggacactgtctgaaaccagctcaagtaagtcctttgaaaccaaggaacagggatcccctgaaaaagccagatcgtcttctagtcctcagcacctgaacgttcagcagttggaagacatgtacaataagatggccaagacccaatcccaacccatcctcaataccaaggagtcagcagcacagagcaaaccaaaggaagaacttgaaatggagagtatccccagccccgtagcccctctgcccactcgcacagaaggggtcattgacatgcgaagtatgtcaagcattgatagtttcattagctgtgccacagacttccctgaggccaccagattctcccacagccctttgacatcactccccagcaagactgggggcagcacagccccagaagtgggctggcggggagctctgggtgccagtggtggtaggtttgtggaggccaaccccagccctgatgccagccagcactctagtttcttcatcgagagccccaagagttccatgaaaactaacaaccctttgaagctccgagcacttaaagtcaacttcatggagggtgaccccagtccactcctccccgttctagggatgtaccatgaccctctcaggaaccgggggagtgctgcggctgctgtcgctggactggagtgtgccacgcttttggacaaggctgtgctgagcccagagtcctccatctacaccacagcaagtgctaagacacccccccggtctcctgagaaacacacagcaatagcgttcaactttgaggcgggtgtccaccagtacattgacgcagacacagatgatgagggacagctgctctacagtgtggactccagcccccccaaaagcctccctgggagcaccagtccgaagttcagcacggggacaagatcggagaaaaaccactttgaaagctcccctttacccacctcccctaagttcttaaggcagaactgtatttactccacagaagcattgactggaaaaggccccagtggtcaggaaaagtgcaaacttgagaaccacatctcccctgacgtccgtgtgttgccagggggaggagcccatggaagcacacgagatcagagcatctgaactgccctgccttggaggagagacttttgggtgaggtccaaagaggagagctgttcagcttacctgccacagagcttttctgcatgaactctggaacagaaaggccctgtaaagccctcagagagaagagagactccagagaaggctccctaagaccttgagagccatgacaggtccatcagcatgaagttggccaagccatagggcacagcacctccttgtaacaactctatagccctctttgggagatgacatgagtggaactcacagccaccactaccaccactttagacaggaccgaggccacatactccccattctctcgtggctttccatctcagcctcggagggcaacattgacagtcctcctggcttcagctagagaaggatgctggaacaagcggctggtgttgaaagagtgggttgaccaatttggtattgaatgttgcccagccacccctaggaacacctgtccatcacctcctggatggattccactgttagacagctacagggaatgattggtcatggggaagtctctgcgccataagccacgatcccagcgcaaaacccttactcaaatgtcttcattgacttcggtatttcatagtacctgagattttattttgagataccatcagggtgagttgcaccacttgtactcaattctaattgccccctggcaatctgggaagggttcagaaggtgggcacccagccaacagcatgaactcagagcattgttttagggttggaggaggaacacgctttctttacatcactagtgtagactcaaaagatatgcaagtgtcaaatatgcaaaagaaatagtttattcaaagagactgtgtgttactgaagaacagcataaaaatatgatttttttacttgcaaaaatgaaaggaaaaaaataccacgcattgaaatgcccagttcagactgaataattcctgctgcagcaaggaaagtacctactataatagaaattctgttttgttttctgtggttttcaagtt

SEQ ID NO: 310 - DNA, 5977 bp, human
gtggttccggggagaagcctttccaggacccatgtgtaggcacaactgttttccctgatcaggatacttgcggcactcaacagaggaaagaaattcctaagggaacactgctcagaaagtactgcagcatgtcttcaaatgcctgaggatcaagttggaaaactagaagcaacagaaaacacaataagcgcaatggcggcggccgcggcggagcagcaacagttctacctgctcctgggaaacctgctcagccccgacaatgtggtccggaaacaggcagaggaaacctatgagaatatcccaggccagtcaaagatcacattcctcttacaagccatcagaaatacaacagctgctgaagaggctagacaaatggccgccgttctcctaagacgtctcttgtcctctgcatttgatgaagtctatccagcacttccctctgatgttcagactgccatcaagagtgagctactcatgattattcagatggaaacacaatctagcatgaggaaaaaagtttgtgatattgcggcagaactggccaggaatttaatagatgaggatggcaataaccagtggcccgaaggtttgaagttcctttttgattcagtcagctctcaaaatgtgggactgcgggaagctgcccttcacattttctggaactttcctggaatttttgggaaccagcaacaacactatttagatgtcatcaaacgaatgttagttcagtgtatgcaagatcaggaacacccgtcgatcaggacgttatctgctagagctacagctgcatttatacttgcaaatgagcataatgttgctctgttcaaacattttgcagacttgctaccgggattcctacaggcggtaaatgactcgtgctaccagaatgatgattctgtcctaaaatccctcgttgagattgcagatactgttccaaagtatttgcgtcctcacttggaagcaactctacagctaagtctaaagttgtgtggagacactagcctcaacaatatgcaacgccagcttgcccttgaagtgatcgtcaccctctctgagactgcagctgctatgttaagaaaacataccaatattgttgcacagactattcctcagatgttagcaatgatggttgatttggaagaagatgaggactgggcaaatgcagatgaactagaagatgatgattttgacagcaatgcagttgcaggcgagagtgctctagatcgaatggcttgcggacttggtggaaagctcgttctgccgatgatcaaggaacacattatgcaaatgcttcaaaatcctgactggaaataccggcatgcaggattgatggccttatctgccattggtgaagggtgccaccagcaaatggaaggaattctaaatgagatcgtaaattttgttttactttttctccaggatcctcatccaagagtaaggtatgcagcctgtaatgccgtgggacagatggctacagattttgcacctggtttccaaaagaaatttcatgagaaggtgattgcagctctgctgcagaccatggaagaccaaggcaatcaacgtgtgcaggcccatgcagctgctgccctcattaactttactgaagactgtcccaagtcactacttattccatacttggataatttggtgaaacatctgcattccattatggtactgaagcttcaagagctgattcagaaaggcaccaagttagttttggaacaagttgtgacatccattgcatcagttgccgatactgcagaagaaaaatttgtcccctactatgatttatttatgccatcactgaagcacatcgttgagaatgcggttcaaaaagaactgagacttctgagaggaaaaactattgaatgcattagcctcattggtctggctgttgggaaggaaaaattcatgcaggatgcatcagatgtgatgcagcttttgttaaagacccagacagacttcaatgatatggaagatgatgatcctcagatctcttacatgatctcagcatgggccagaatgtgcaaaatccttggaaaagaatttcagcaataccttccagtggttatggggcctttaatgaagacggcttcaattaagcccgaagtagcccttttagatacccaagacatggagaatatgagtgatgatgatggttgggaatttgtgaaccttggagatcagcaaagctttggtattaaaactgcaggactagaagaaaaatcaactgcttgccagatgttggtttgctatgctaaggagttaaaggaaggctttgtggagtacaccgaacaggttgtcaaactgatggtccctttactgaaattttatttccacgatggtgttcgagtggcagcagcggaatccatgcctcttctcctggagtgtgcaagagtccgtggtcctgagtatctcacacagatgtggcattttatgtgtgatgctctaattaaggccattggtacagaaccagattcagacgtcctctcagaaataatgcattcttttgcaaagtgcattgaagtaatgggagatggatgccttaataatgaacactttgaagaactgggaggtatattgaaagcaaagcttgaagaacattttaaaaatcaagaattacgacaagttaaaagacaagatgaagactatgatgaacaggtcgaagagtcactacaagatgaggatgataatgatgtttatattctgaccaaagtgtcagatattttacactcaatattcagtagctacaaagaaaaggtgttaccatggtttgaacagctgcttccattaattgtcaacctcatttgtccacatagaccatggccagacagacaatggggattatgcatctttgatgatgtcatagaacactgtagtccagcctcatttaaatacgcagaatatttcttaagaccaatgctccaatatgtatgtgacaacagcccagaagtcaggcaagcagctgcatatggcctgggagtcatggcacagtacggtggagataattatcgccctttttgtacagaagcacttcccctgctggtaagagttattcagtctgcggattctaagaccaaagaaaatgtcaatgctacagagaactgcatctcagcagtagggaaaatcatgaagttcaagcctgactgtgtaaacgttgaagaggtccttccacactggttgtcttggcttccactacatgaagataaagaagaagctgttcagactttcaattatctgtgtgacctgattgaaagtaatcatccaattgttcttggcccaaacaataccaatctgcccaaaatatttagtataattgcggaaggagaaatgcacgaggcaattaaacatgaagatccttgtgccaaacgtctggccaatgtcgttcgccaagtacagacttctggaggactgtggactgagtgcatagcacagctcagtcctgagcagcaggccgccattcaggagctcctgaactctgcgtgaagggccttaatgtcacccaccagaaaactaactccaaataaacgcttaccctttcctttaggtttctttgttttgtttttgagcaaaagagatcggtagtgttgtgtgtaggccattcttctggagagccacaagcaggaagagcagcgctgtgttgcagaatggagtttccatggatttctaccagaccactgaaggagttcctggaagccctgcggtagctagcactgaagactatttttctattggtataacccgcccacctgaaggggaaagggaaatcaaattaatttttctcgttagacataaggaaatttaaggaaaaacagctttaagaacagttactcagcgtagatgtgtgttcacacaaattgctctgcattcagtgttcattgtgaattgggagtgtgagtctttctgtagggtagaaagaagcctcctacccagcaaaccagtagacccaaaagttgaaaaaaactgatgacagacaacaagcatgaagatggcatatttgatgtcactttggttctttttcccagaaggcttatacagtgactcagtcgggaagctttccagcttccagcccttgaatgtgaagtgtcattggcatgtctggcagtagtctctcattcactcctcaataaacaacattgaatacaaaagaggcttgtgtaaaaactcagtactgtctggcttggattcatttcatgtttttaatataagaatgatctaatatttttttaaagtaatagctatcagtaatagctgagtgttttttcccctaatattttccttgtgcaattcagacttaagcatcgagtttttaccatcttccactttaagctaagttatgatacctattccattcacaattggtgttctttttaaggtttgcaaatttcagccaattttgtagctaagattgttctgatcagctcaaaaagatttggcttagtgttttcattgcaaattataattgctgtagagccacacacaacttttgaacttttaattataagtgttatggctaaagttatttactgaaaatttcagtaaaatgtgtgaatgtttctttatgtattaacctcatagcagtaaatgacttgctgttgtttaatttttctaaggcatcttaatagacttctgttgaaaacttcagtgttaacatttttatagtttgtactaaatttaaccgtgatataaaaatgaattttatgcatagatcagaattttaaattaaaggttttttctttaaatgatttgtattactttattaaaactaaatctgaaatggaatagaaaatagaatggattacatacagatggtttccttgttagcagatgcccttcaaatatattttacgtttgcagcacaacaccattgcccggaggcttccgaatctagcaaagcagcatattaaatgactccacctgcgcagtccttgtgttcagtggatgaatacctgtgggctcttgtaatgtgtggtaatatttggagctttatagcctgtattccttgggagaaaaaaatgggaattggagtaaaaagtgtgtcaagacaacccctttctgctttcttatgtagcatctgcaaagccgattcatgtactgatgccaatcagctagagcaatgtaggctttttttaatttaaattattactacactttattactacacttgcagaaaagaaacatgttaaaatcatggcacacctgcagaatttcagatgacagtgtggtcagaagatgttttttgggagaacctagtgtttgctgggcactatgctaagcactttgggagcaagaacctcctaccttccagtttaaacactagtggtattgtcagatgccgttagtatctgagatgtacttacagcagggttctaagagctctgaaagaagcgctctgttagatgcagactggcagcatcctccttgataaaagcagaaaagcaaagaggtaattggagttgaatcaagttaatagggaaggttggtagtaaatgctgttagtgtgacatgattctgaaacccagagctcagaactaactgtgagatgtaccatgaactaacaattctttgaaaggacctgcagaagcatttttaatacctcattctgtctatgcaagatgaaaatccatggagttttttcttggcttttgtaccaaatttaggggtcttgcatgtcagcaagtgatatatattgtttataaatgcaagctatttctggaggggaaaaatgtgtgtggctcttacgttttctgggaattttgtaacaagttacacgcacaagtgttagaaactttggcataactcaatttggagtattttttaaatgctgtatctttaaagaaaagtaaaattgtcttaaatctaattgacacttctgtaatgagaggcaaccttataactctggagttgtagtttgacagaaccatcagtaaagacataagcaaataaatggtcttggtgcaaaaaaaaaaaaaaaaaa

SEQ ID NO: 311 - DNA, 5312 bp, human
ggccgcggcggcggaggcagcagcggcggcggcagtggcggcggcgaaggtggcggcggctcggccagtactcccggcccccgccatttcggactgggagcgagcgcggcgcaggcactgaaggcggcggcggggccagaggctcagcggctcccaggtgcgggagagaggcctgctgaaaatgactgaatataaacttgtggtagttggagctggtggcgtaggcaagagtgccttgacgatacagctaattcagaatcattttgtggacgaatatgatccaacaatagaggattcctacaggaagcaagtagtaattgatggagaaacctgtctcttggatattctcgacacagcaggtcaagaggagtacagtgcaatgagggaccagtacatgaggactggggagggctttctttgtgtatttgccataaataatactaaatcatttgaagatattcaccattatagagaacaaattaaaagagttaaggactctgaagatgtacctatggtcctagtaggaaataaatgtgatttgccttctagaacagtagacacaaaacaggctcaggacttagcaagaagttatggaattccttttattgaaacatcagcaaagacaagacagggtgttgatgatgccttctatacattagttcgagaaattcgaaaacataaagaaaagatgagcaaagatggtaaaaagaagaaaaagaagtcaaagacaaagtgtgtaattatgtaaatacaatttgtacttttttcttaaggcatactagtacaagtggtaatttttgtacattacactaaattattagcatttgttttagcattacctaatttttttcctgctccatgcagactgttagcttttaccttaaatgcttattttaaaatgacagtggaagtttttttttcctctaagtgccagtattcccagagttttggtttttgaactagcaatgcctgtgaaaaagaaactgaatacctaagatttctgtcttggggtttttggtgcatgcagttgattacttcttatttttcttaccaattgtgaatgttggtgtgaaacaaattaatgaagcttttgaatcatccctattctgtgttttatctagtcacataaatggattaattactaatttcagttgagaccttctaattggtttttactgaaacattgagggaacacaaatttatgggcttcctgatgatgattcttctaggcatcatgtcctatagtttgtcatccctgatgaatgtaaagttacactgttcacaaaggttttgtctcctttccactgctattagtcatggtcactctccccaaaatattatattttttctataaaaagaaaaaaatggaaaaaaattacaaggcaatggaaactattataaggccatttccttttcacattagataaattactataaagactcctaatagcttttcctgttaaggcagacccagtatgaaatggggattattatagcaaccattttggggctatatttacatgctactaaatttttataataattgaaaagattttaacaagtataaaaaattctcataggaattaaatgtagtctccctgtgtcagactgctctttcatagtataactttaaatcttttcttcaacttgagtctttgaagatagttttaattctgcttgtgacattaaaagattatttgggccagttatagcttattaggtgttgaagagaccaaggttgcaaggccaggccctgtgtgaacctttgagctttcatagagagtttcacagcatggactgtgtccccacggtcatccagtgttgtcatgcattggttagtcaaaatggggagggactagggcagtttggatagctcaacaagatacaatctcactctgtggtggtcctgctgacaaatcaagagcattgcttttgtttcttaagaaaacaaactcttttttaaaaattacttttaaatattaactcaaaagttgagattttggggtggtggtgtgccaagacattaattttttttttaaacaatgaagtgaaaaagttttacaatctctaggtttggctagttctcttaacactggttaaattaacattgcataaacacttttcaagtctgatccatatttaataatgctttaaaataaaaataaaaacaatccttttgataaatttaaaatgttacttattttaaaataaatgaagtgagatggcatggtgaggtgaaagtatcactggactaggaagaaggtgacttaggttctagataggtgtcttttaggactctgattttgaggacatcacttactatccatttcttcatgttaaaagaagtcatctcaaactcttagttttttttttttacaactatgtaatttatattccatttacataaggatacacttatttgtcaagctcagcacaatctgtaaatttttaacctatgttacaccatcttcagtgccagtcttgggcaaaattgtgcaagaggtgaagtttatatttgaatatccattctcgttttaggactcttcttccatattagtgtcatcttgcctccctaccttccacatgccccatgacttgatgcagttttaatacttgtaattcccctaaccataagatttactgctgctgtggatatctccatgaagttttcccactgagtcacatcagaaatgccctacatcttatttcctcagggctcaagagaatctgacagataccataaagggatttgacctaatcactaattttcaggtggtggctgatgctttgaacatctctttgctgcccaatccattagcgacagtaggatttttcaaacctggtatgaatagacagaaccctatccagtggaaggagaatttaataaagatagtgctgaaagaattccttaggtaatctataactaggactactcctggtaacagtaatacattccattgttttagtaaccagaaatcttcatgcaatgaaaaatactttaattcatgaagcttactttttttttttggtgtcagagtctcgctcttgtcacccaggctggaatgcagtggcgccatctcagctcactgcaacctccatctcccaggttcaagcgattctcgtgcctcggcctcctgagtagctgggattacaggcgtgtgccactacactcaactaatttttgtatttttaggagagacggggtttcaccctgttggccaggctggtctcgaactcctgacctcaagtgattcacccaccttggcctcataaacctgttttgcagaactcatttattcagcaaatatttattgagtgcctaccagatgccagtcaccgcacaaggcactgggtatatggtatccccaaacaagagacataatcccggtccttaggtagtgctagtgtggtctgtaatatcttactaaggcctttggtatacgacccagagataacacgatgcgtattttagttttgcaaagaaggggtttggtctctgtgccagctctataattgttttgctacgattccactgaaactcttcgatcaagctactttatgtaaatcacttcattgttttaaaggaataaacttgattatattgtttttttatttggcataactgtgattcttttaggacaattactgtacacattaaggtgtatgtcagatattcatattgacccaaatgtgtaatattccagttttctctgcataagtaattaaaatatacttaaaaattaatagttttatctgggtacaaataaacaggtgcctgaactagttcacagacaaggaaacttctatgtaaaaatcactatgatttctgaattgctatgtgaaactacagatctttggaacactgtttaggtagggtgttaagacttacacagtacctcgtttctacacagagaaagaaatggccatacttcaggaactgcagtgcttatgaggggatatttaggcctcttgaatttttgatgtagatgggcatttttttaaggtagtggttaattacctttatgtgaactttgaatggtttaacaaaagatttgtttttgtagagattttaaagggggagaattctagaaataaatgttacctaattattacagccttaaagacaaaaatccttgttgaagtttttttaaaaaaagctaaattacatagacttaggcattaacatgtttgtggaagaatatagcagacgtatattgtatcatttgagtgaatgttcccaagtaggcattctaggctctatttaactgagtcacactgcataggaatttagaacctaacttttataggttatcaaaactgttgtcaccattgcacaattttgtcctaatatatacatagaaactttgtggggcatgttaagttacagtttgcacaagttcatctcatttgtattccattgattttttttttcttctaaacattttttcttcaaacagtatataactttttttaggggatttttttttagacagcaaaaactatctgaagatttccatttgtcaaaaagtaatgatttcttgataattgtgtagtaatgttttttagaacccagcagttaccttaaagctgaatttatatttagtaacttctgtgttaatactggatagcatgaattctgcattgagaaactgaatagctgtcataaaatgaaactttctttctaaagaaagatactcacatgagttcttgaagaatagtcataactagattaagatctgtgttttagtttaatagtttgaagtgcctgtttgggataatgataggtaatttagatgaatttaggggaaaaaaaagttatctgcagatatgttgagggcccatctctccccccacacccccacagagctaactgggttacagtgttttatccgaaagtttccaattccactgtcttgtgttttcatgttgaaaatacttttgcatttttcctttgagtgccaatttcttactagtactatttcttaatgtaacatgtttacctggaatgtattttaactatttttgtatagtgtaaactgaaacatgcacattttgtacattgtgctttcttttgtgggacatatgcagtgtgatccagttgttttccatcatttggttgcgctgacctaggaatgttggtcatatcaaacattaaaaatgaccactcttttaattgaaattaacttttaaatgtttataggagtatgtgctgtgaagtgatctaaaatttgtaatatttttgtcatgaactgtactactcctaattattgtaatgtaataaaaatagttacagtgacaaaaaaaaaaaaaaa

SEQ ID NO: 312 - DNA, 11426 bp, human
agacccgccgggctcccgccgcgcgcgctgtccctggagctcggggacgcggcccggagccgggaagatggcgaagcggctctgcgcggggagcgcactgtgtgttcgcggcccccggggccccgcgccgctgctgctggtcgggctggcgctgctgggcgcggcgcgggcgcgggaggaggcgggcggcggcttcagcctgcacccgccctacttcaacctggccgagggcgcccgcatcgccgcctccgcgacctgcggagaggaggccccggcgcgcggctccccgcgccccaccgaggacctttactgcaagctggtagggggccccgtggccggcggcgaccccaaccagaccatccggggccagtactgtgacatctgcacggctgccaacagcaacaaggcacaccccgcgagcaatgccatcgatggcacggagcgctggtggcagagtccaccgctgtcccgcggcctggagtacaacgaggtcaacgtcaccctggacctgggccaggtcttccacgtggcctacgtcctcatcaagtttgccaactcaccccggccggacctctgggtgctggagcggtccatggacttcggccgcacctaccagccctggcagttctttgcctcctccaagagggactgtctggagcggttcgggccacagacgctggagcgcatcacacgggacgacgcggccatctgcaccaccgagtactcacgcatcgtgcccctggagaacggagagatcgtggtgtccctggtgaacggacgtccgggcgccatgaatttctcctactcgccgctgctacgtgagttcaccaaggccaccaacgtccgcctgcgcttcctgcgtaccaacacgctgctgggccatctcatggggaaggcgctgcgggaccccacggtcacccgccggtattattacagcatcaaggatatcagcatcggaggccgctgtgtctgccacggccacgcggatgcctgcgatgccaaagaccccacggacccgttcaggctgcagtgcacctgccagcacaacacctgcgggggcacctgcgaccgctgctgccccggcttcaatcagcagccgtggaagcctgcgactgccaacagtgccaacgagtgccagtcctgtaactgctacggccatgccaccgactgttactacgaccctgaggtggaccggcgccgcgccagccagagcctggatggcacctatcagggtgggggtgtctgtatcgactgccagcaccacaccaccggcgtcaactgtgagcgctgcctgcccggcttctaccgctctcccaaccaccctctcgactcgccccacgtctgccgccgctgcaactgcgagtccgacttcacggatggcacctgcgaggacctgacgggtcgatgctactgccggcccaacttctctggggagcggtgtgacgtgtgtgccgagggcttcacgggcttcccaagctgctacccgacgccctcgtcctccaatgacaccagggagcaggtgctgccagccggccagattgtgaattgtgactgcagcgcggcagggacccagggcaacgcctgccggaaggacccaagggtgggacgctgtctgtgcaaacccaacttccaaggcacccattgtgagctctgcgcgccagggttctacggccccggctgccagccctgccagtgttccagccctggagtggccgatgaccgctgtgaccctgacacaggccagtgcaggtgccgagtgggcttcgagggggccacatgtgatcgctgtgcccccggctactttcacttccctctctgccagttgtgtggctgcagccctgcaggaaccttgcccgagggctgcgatgaggccggccgctgcctatgccagcctgagtttgctggacctcattgtgaccggtgccgccctggctaccatggtttccccaactgccaagcatgcacctgcgaccctcggggagccctggaccagctctgtggggcgggaggtttgtgccgctgccgccccggctacacaggcactgcctgccaggaatgcagccccggctttcacggcttccccagctgtgtcccctgccactgctctgctgaaggctccctgcacgcagcctgtgacccccggagtgggcagtgcagctgccggccccgtgtgacggggctgcggtgtgacacatgtgtgcccggtgcctacaacttcccctactgcgaagctggctcttgccaccctgccggtctggccccagtggatcctgcccttcctgaggcacaggttccctgtatgtgccgggctcacgtggaggggccgagctgtgaccgctgcaaacctgggttctggggactgagccccagcaaccccgagggctgtacccgctgcagctgcgacctcaggggcacactgggtggagttgctgagtgccagccgggcaccggccagtgcttctgcaagccccacgtgtgcggccaggcctgcgcgtcctgcaaggatggcttctttggactggatcaggctgactattttggctgccgcagctgccggtgtgacattggcggtgcactgggccagagctgtgaaccgaggacgggcgtctgccggtgccgccccaacacccagggccccacctgcagcgagcctgcgagggaccactacctcccggacctgcaccacctgcgcctggagctggaggaggctgccacacctgagggtcacgccgtgcgctttggcttcaaccccctcgagttcgagaacttcagctggaggggctacgcgcagatggcacctgtccagcccaggatcgtggccaggctgaacctgacctcccctgaccttttctggctcgtcttccgatacgtcaaccggggggccatgagtgtgagcgggcgggtctctgtgcgagaggagggcaggtcggccacctgcgccaactgcacagcacagagtcagcccgtggccttcccacccagcacggagcctgccttcatcaccgtgccccagaggggcttcggagagccctttgtgctgaaccctggcacctgggccctgcgtgtggaggccgaaggggtgctcctggactacgtggttctgctgcctagcgcatactacgaggcggcgctcctgcagctgcgggtgactgaggcctgcacataccgtccctctgcccagcagtctggcgacaactgcctcctctacacacacctccccctggatggcttcccctcggccgccgggctggaggccctgtgtcgccaggacaacagcctgccccggccctgccccacggagcagctcagcccgtcgcacccgccactgatcacctgcacgggcagtgatgtggacgtccagcttcaagtggcagtgccacagccaggccgctatgccctagtggtggagtacgccaatgaggatgcccgccaggaggtgggcgtggccgtgcacaccccacagcgggccccccagcaggggctgctctccctgcacccctgcctgtacagcaccctgtgccggggcactgcccgggatacccaggaccacctggctgtcttccacctggactcggaggccagcgtgaggctcacagccgaacaggcacgcttcttcctgcacggggtcactctggtgcccattgaggagttcagcccggagttcgtggagccccgggtcagctgcatcagcagccacggcgcctttggccccaacagtgccgcctgtctgccctcgcgcttcccaaagccgccccagcccatcatcctcagggactgccaggtgatcccgctgccgcccggcctcccgctgacccacgcgcaggatctcactccagccatgtccccagctggaccccgacctcggccccccaccgctgtggaccctgatgcagagcccaccctgctgcgtgagccccaggccaccgtggtcttcaccacccatgtgcccacgctgggccgctatgccttcctgctgcacggctaccagccagcccaccccaccttccccgtggaagtcctcatcaacgccggccgcgtgtggcagggccacgccaacgccagcttctgtccacatggctacggctgccgcaccctggtggtgtgtgagggccaggccctgctggacgtgacccacagcgagctcactgtgaccgtgcgtgtgcccaagggccggtggctctggctggattatgtactcgtggtccctgagaacgtctacagctttggctacctccgggaggagcccctggataaatcctatgacttcatcagccactgcgcagcccagggctaccacatcagccccagcagctcatccctgttctgccgaaacgctgctgcttccctctccctcttctataacaacggagcccgtccatgtggctgccacgaagtaggtgctacaggccccacgtgtgagcccttcgggggccagtgtccctgccatgcccatgtcattggccgtgactgctcccgctgtgccaccggatactggggcttccccaactgcaggccctgtgactgcggtgcccgcctctgtgacgagctcacgggccagtgcatctgcccgccacgcaccatcccgcccgactgcctgctgtgccagccccagacctttggctgccaccccctggtcggctgtgaggagtgtaactgctcagggcccggcatccaggagctcacagaccctacctgtgacacagacagcggccagtgcaagtgcagacccaacgtgactgggcgccgctgtgatacctgctctccgggcttccatggctacccccgctgccgcccctgtgactgtcacgaggcgggcactgcgcctggcgtgtgtgaccccctcacagggcagtgctactgtaaggagaacgtgcagggccccaaatgtgaccagtgcagccttgggaccttctcactggatgctgccaaccccaaaggttgcacccgctgcttctgctttggggccacggagcgctgccggagctcgtcctacacccgccaggagttcgtggatatggagggatgggtgctgctgagcactgaccggcaggtggtgccccacgagcggcagccagggacggagatgctccgtgcagacctgcggcacgtgcctgaggctgtgcccgaggctttccccgagctgtactggcaggccccaccctcctacctgggggaccgggtgtcatcctacggtgggaccctccgttatgaactgcactcagagacccagcggggagatgtctttgtccccatggagagcaggccggatgtggtgctgcagggcaaccagatgagcatcacattcctggagccggcataccccacgcctggccacgttcaccgtgggcagctgcagctggtggaggggaacttccggcatacggagacgcgcaacactgtgtcccgcgaggagctcatgatggtgctggccagcctggagcagctgcagatccgtgccctcttctcacagatctcctcggctgtcttcctgcgcagggtggcactggaggtggccagcccagcaggccagggggccctggccagcaatgtggagctgtgcctgtgccccgccagctaccggggggactcatgccaggaatgtgcccccggcttctatcgggacgtcaaaggtctcttcctgggccgatgtgtcccttgtcagtgccatggacactcagaccgctgcctccctggctctggcgtctgtgtggactgccagcacaacaccgaaggggcccactgtgagcgctgccaggctggcttcgtgagcagcagggacgaccccagcgccccctgtgtcagctgcccctgccccctctcagtgccttccaacaacttcgccgagggctgtgtcctgcgaggcggccgcacccagtgcctctgcaaacctggttatgcaggtgcctcctgcgagcggtgtgcgcccggattctttgggaacccactggtgctgggcagctcctgccagccatgcgactgcagcggcaacggtgaccccaacttgctcttcagcgactgcgaccccctgacgggcgcctgccgtggctgcctgcgccacaccactgggccccgctgcgagatctgtgcccccggcttctacggcaacgccctgctgcccggcaactgcacccggtgcgactgtaccccatgtgggacagaggcctgcgacccccacagcgggcactgcctgtgcaaggcgggcgtgactgggcggcgctgtgaccgctgccaggagggacattttggtttcgatggctgcgggggctgccgcccgtgtgcttgtggaccggccgccgagggctccgagtgccacccccagagcggacagtgccactgccgaccagggaccatgggaccccagtgccgcgagtgtgcccctggctactgggggctccctgagcagggctgcaggcgctgccagtgccctgggggccgctgtgaccctcacacgggccgctgcaactgccccccggggctcagcggggagcgctgcgacacctgcagccagcagcatcaggtgcctgttccaggcgggcctgtgggccacagcatccactgtgaagtgtgtgaccactgtgtggtcctgctcctggatgacctggaacgggccggcgccctcctccccgccattcacgagcaactgcgtggcatcaatgccagctccatggcctgggcccgtctgcacaggctgaacgcctccatcgctgacctgcagagccagctccggagccccctgggcccccgccatgagacggcacagcagctggaggtgctggagcagcagagcacaagcctcgggcaggacgcacggcggctaggcggccaggccgtggggacccgagaccaggcgagccaattgctggccggcaccgaggccacactgggccatgcgaagacgctgttggcggccatccgggctgtggaccgcaccctgagcgagctcatgtcccagacgggccacctggggctggccaatgcctcggctccatcaggtgagcagctgctccggacactggccgaggtggagcggctgctctgggagatgcgggcccgggacctgggggccccgcaggcagcagctgaggctgagttggctgcagcacagagattgctggcccgggtgcaggagcagctgagcagcctctgggaggagaaccaggcactggccacacaaacccgcgaccggctggcccagcacgaggccggcctcatggacctgcgagaggctttgaaccgggcagtggacgccacacgggaggcccaggagctcaacagccgcaaccaggagcgcctggaggaagccctgcaaaggaagcaggagctgtcccgggacaatgccaccctgcaggccactctgcatgcggctagggacaccctggccagcgtcttcagattgctgcacagcctggaccaggctaaggaggagctggagcgcctcgccgccagcctggatggggctcggaccccactgctgcagaggatgcagaccttctccccggcgggcagcaagctgcgtctagtggaggccgccgaggcccacgcacagcagctgggccagctggcactcaatctgtccagcatcatcctggacgtcaaccaggaccgcctcacccagagggccatcgaggcctccaacgcctacagccgcatcctgcaggccgtgcaggctgccgaggatgctgctggccaggccctgcagcaggcggaccacacgtgggcgacggtggtgcggcagggcctggtggaccgagcccagcagctcctggccaacagcactgcactagaagaggccatgctccaggaacagcagaggctgggccttgtgtgggctgccctccagggtgccaggacccagctccgagatgtccgggccaagaaggaccagctggaggcgcacatccaggcggcgcaggccatgcttgccatggacacagacgagacaagcaagaagatcgcacatgccaaggctgtggctgctgaagcccaggacaccgccacccgtgtgcagtcccagctgcaggccatgcaggagaatgtggagcggtggcagggccagtacgagggcctgcggggccaggacctgggccaggcagtgcttgacgcaggccactcagtgtccaccctggagaagacgctgccccagctgctggccaagctgagcatcctggagaaccgtggggtgcacaacgccagcctggccctgtccgccagcattggccgcgtgcgagagctcattgcccaggcccggggggctgccagtaaggtcaaggtgcccatgaagttcaacgggcgctcaggggtgcagctgcgcaccccacgggatcttgccgaccttgctgcctacactgccctcaagttctacctgcagggcccagagcctgagcctgggcagggtaccgaggatcgctttgtgatgtacatgggcagccgccaggccactggggactacatgggtgtgtctctgcgtgacaagaaggtgcactgggtgtatcagctgggtgaggcgggccctgcagtcctaagcatcgatgaggacattggggagcagttcgcagctgtcagcctggacaggactctccagtttggccacatgtccgtcacagtggagagacagatgatccaggaaaccaagggtgacacggtggcccctggggcagaggggctgctcaacctgcggccagacgacttcgtcttctacgtcggggggtaccccagtaccttcacgccccctcccctgcttcgcttccccggctaccggggctgcatcgagatggacacgctgaatgaggaggtggtcagcctctacaacttcgagaggaccttccagctggacacggctgtggacaggccttgtgcccgctccaagtcgaccggggacccgtggctcacggacggctcctacctggacggcaccggcttcgcccgcatcagcttcgacagtcagatcagcaccaccaagcgcttcgagcaggagctgcggctcgtgtcctacagcggggtgctcttcttcctgaagcagcagagccagttcctgtgcttggccgtgcaagaaggcagcctcgtgctgttgtatgactttggggctggcctgaaaaaggccgtcccactgcagcccccaccgcccctgacctcggccagcaaggcgatccaggtgttcctgctggggggcagccgcaagcgtgtgctggtgcgtgtggagcgggccacggtgtacagcgtggagcaggacaatgatctggagctggccgacgcctactacctggggggcgtgccgcccgaccagctgcccccgagcctgcgacggctcttccccaccggaggctcagtccgtggctgcgtcaaaggcatcaaggccctgggcaagtatgtggacctcaagcggctgaacacgacaggcgtgagcgccggctgcaccgccgacctgctggtggggcgcgccatgactttccatggccacggcttccttcgcctggcgctctcgaacgtggcaccgctcactggcaacgtctactccggcttcggcttccacagcgcccaggacagtgccctgctctactaccgggcgtccccggatgggctatgccaggtgtccctgcagcagggccgtgtgagcctacagctcctgaggactgaagtgaaaactcaagcgggcttcgccgatggtgccccccattacgtcgccttctacagcaatgccacgggagtctggctgtatgtcgatgaccagctccagcagatgaagccccaccggggaccaccccccgagctccagccgcagcctgaggggcccccgaggctcctcctgggaggcctgcctgagtctggcaccatttacaacttcagtggctgcatcagcaacgtcttcgtgcagcggctcctgggcccacagcgcgtatttgatctgcagcagaacctgggcagcgtcaatgtgagcacgggctgtgcacccgccctgcaagcccagaccccgggcctggggcctagaggactgcaggccaccgcccggaaggcctcccgccgcagccgtcagcccgcccggcatcctgcctgcatgctgcccccacacctcaggaccacccgagactcctaccagtttgggggttccctgtccagtcacctggagtttgtgggcatcctggcccgacataggaactggcccagtctctccatgcacgtcctcccgcgaagctcccgaggcctcctcctcttcactgcccgtctgaggcccggcagcccctccctggcgctcttcctgagcaatggccacttcgttgcacagatggaaggcctcgggactcggctccgcgcccagagccgccagcgctcccggcctggccgctggcacaaggtctccgtgcgctgggagaagaaccggatcctgctggtgacggacggggcccgggcctggagccaggaggggccgcaccggcagcaccagggggcagagcacccccagccccacaccctctttgtgggcggcctcccggccagcagccacagctccaaacttccggtgaccgtcgggttcagcggctgtgtgaagagactgaggctgcacgggaggcccctgggggcccccacacggatggcaggggtcacaccctgcatcttgggccccctggaggcgggcctgttcttcccaggcagcgggggagttatcactttagacctcccaggagctacactgcctgatgtgggcctggaactggaggtgcggcccctggcagtcaccggactgatcttccacttgggccaggcccggacgcccccctacttgcagttgcaggtgaccgagaagcaagtcctgctgcgggcggatgacggagcaggggagttctccacgtcagtgacccgcccctcagtgctgtgtgatggccagtggcaccggctagcggtgatgaaaagcgggaatgtgctccggctggaggtggacgcgcagagcaaccacaccgtgggccccttgctggcggctgcagctggtgccccagcccctctgtacctcgggggcctgcctgagcccatggccgtgcagccctggccccccgcctactgcggctgcatgaggaggctggcggtgaaccggtcccccgtcgccatgactcgctctgtggaggtccacggggcagtgggggccagtggctgcccagccgcctaggacacagccaaccccggcccctggtcaggcccctgcagctgcctcacaccgccccttgtgctcgcctcataggtgtctatttggactctaagctctacgggtgacagatcttgtttctgaagatggtttaagttatagcttcttaaacgaaagaataaaatactgcaaaatgtttttatatttggcccttccacccatttttaattgtgagagatttgtcaccaatcatcactggttcctccttaaaaattaaaaagtaacttctgtgtaa

SEQ ID NO: 313 - DNA, 1039 bp, human
tgcctgtcttttccgtgctacctgcagaggggtccatacggcgttgttctggattcccgtcgtaacttaaagggaaactttcacaatgtccggagcccttgatgtcctgcaaatgaaggaggaggatgtccttaagttccttgcagcaggaacccacttaggtggcaccaatcttgacttccagatggaacagtacatctataaaaggaaaagtgatggcatctatatcataaatctcaagaggacctgggagaagcttctgctggcagctcgtgcaattgttgccattgaaaaccctgctgatgtcagtgttatatcctccaggaatactggccagagggctgtgctgaagtttgctgctgccactggagccactccaattgctggccgcttcactcctggaaccttcactaaccagatccaggcagccttccgggagccacggcttcttgtggttactgaccccagggctgaccaccagcctctcacggaggcatcttatgttaacctacctaccattgcgctgtgtaacacagattctcctctgcgctatgtggacattgccatcccatgcaacaacaagggagctcactcagtgggtttaatgtggtggatgctggctcgggaagttctgcgcatgcgtggcaccatttcccgtgaacacccatgggaggtcatgcctgatctgtacttctacagagatcctgaagagattgaaaaagaagagcaggctgctgctgagaaggcagtgaccaaggaggaatttcagggtgaatggactgctcccgctcctgagttcactgctactcagcctgaggttgcagactggtctgaaggtgtacaggtgccctctgtgcctattcagcaattccctactgaagactggagcgctcagcctgccacggaagactggtctgcagctcccactgctcaggccactgaatgggtaggagcaaccactgactggtcttaagctgttcttgcataggctcttaagcagcatggaaaaatggttgatggaaaataaacatcagtttct

SEQ ID NO: 314 - DNA, 6274 bp, human
gttcctagaaaatggagctgtcttggcatgtagtctttattgccctgctaagtttttcatgctgggggtcagactgggagtctgatagaaatttcatttccaccgctggtcctctaaccaatgacttgctgcacaacctgagtggtctcctgggagaccagagttctaactttgtagcaggggacaaagacatgtatgtttgtcaccagccactgcccactttcctgccagaatacttcagcagtctccatgccagtcagatcacccattataaggtatttctgtcatgggcacagctcctcccagcaggaagcacccagaatccagacgagaaaacagtgcagtgctaccggcgactcctcaaggccctcaagactgcacggcttcagcccatggtcatcctgcaccaccagaccctccctgccagcaccctccggagaaccgaagcctttgctgacctcttcgccgactatgccacattcgccttccactccttcggggacctagttgggatctggttcaccttcagtgacttggaggaagtgatcaaggagcttccccaccaggaatcaagagcgtcacaactccagaccctcagtgatgcccacagaaaagcctatgagatttaccacgaaagctatgcttttcagggcggaaaactctctgttgtcctgcgagctgaagatatcccggagctcctgctagaaccacccatatctgcgcttgcccaggacacggtcgatttcctctctcttgatttgtcttatgaatgccaaaatgaggcaagtctgcggcagaagctgagtaaattgcagaccattgagccaaaagtgaaagttttcatcttcaacctaaaactcccagactgcccctccaccatgaagaacccagccagtctgctcttcagcctttttgaagccataaataaagaccaagtgctcaccattgggtttgatattaatgagtttctgagttgttcatcaagttccaagaaaagcatgtcttgttctctgactggcagcctggcccttcagcctgaccagcagcaggaccacgagaccacggactcctctcctgcctctgcctatcagagaatctgggaagcatttgccaatcagtccagggcggaaagggatgccttcctgcaggatactttccctgaaggcttcctctggggtgcctccacaggagcctttaacgtggaaggaggctgggccgagggtgggagaggggtgagcatctgggatccacgcaggcccctgaacaccactgagggccaagcgacgctggaggtggccagcgacagttaccacaaggtagcctctgacgtcgccctgctttgcggcctccgggctcaggtgtacaagttctccatctcctggtcccggatcttccccatggggcacgggagcagccccagcctcccaggcgttgcctactacaacaagctgattgacaggctacaggatgcgggcatcgagcccatggccacgctgttccactgggacctgcctcaggccctgcaggatcatggtggatggcagaatgagagcgtggtggatgccttcctggactatgcggccttctgcttctccacatttggggaccgtgtgaagctgtgggtgaccttccatgagccgtgggtgatgagctacgcaggctatggcaccggccagcaccctcccggcatctctgacccaggagtggcctcttttaaggtggctcacttggtcctcaaggctcatgccagaacttggcaccactacaacagccatcatcgcccacagcagcaggggcacgtgggcattgtgctgaactcagactgggcagaacccctgtctccagagaggcctgaggacctgagagcctctgagcgcttcttgcacttcatgctgggctggtttgcacaccccgtctttgtggatggagactacccagccaccctgaggacccagatccaacagatgaacagacagtgctcccatcctgtggctcaactccccgagttcacagaggcagagaagcagctcctgaaaggctctgctgattttctgggtctgtcgcattacacctcccgcctcatcagcaacgccccacaaaacacctgcatccctagctatgataccattggaggcttctcccaacacgtgaaccatgtgtggccccagacctcatcctcttggattcgtgtggtgccctgggggataaggaggctgttgcagtttgtatccctggaatacacaagaggaaaagttccaatataccttgccgggaatggcatgcccataggggaaagtgaaaatctctttgatgattccttaagagtagactacttcaatcaatatatcaatgaggtgctcaaggctatcaaggaagactctgtggatgttcgttcctacattgctcgttccctcattgatggcttcgaaggcccttctggttacagccagcggtttggcctgcaccacgtcaacttcagcgacagcagcaagtcaaggactcccaggaaatctgcctactttttcactagcatcatagaaaagaacggtttcctcaccaagggggcaaaaagactgctaccacctaatacagtaaacctcccctccaaagtcagagccttcacttttccatctgaggtgccctccaaggctaaagtcgtttgggaaaagttctccagccaacccaagttcgaaagagatttgttctaccacgggacgtttcgggatgactttctgtggggcgtgtcctcttccgcttatcagattgaaggcgcgtgggatgccgatggcaaaggccccagcatctgggataactttacccacacaccagggagcaatgtgaaagacaatgccactggagacatcgcctgtgacagctatcaccagctggatgccgatctgaatatgctccgagctttgaaggtgaaggcctaccgcttctctatctcctggtctcggattttcccaactgggagaaacagctctatcaacagtcatggggttgattattacaacaggctgatcaatggcttggtggcaagcaacatctttcccatggtgacattgttccattgggacctgccccaggccctccaggatatcggaggctgggagaatcctgccttgattgacttgtttgacagctacgcagacttttgtttccagacctttggtgatagagtcaagttttggatgacttttaatgagcccatgtacctggcatggctaggttatggctcaggggaatttcccccaggggtgaaggacccaggctgggcaccatataggatagcccacgccgtcatcaaagcccatgccagagtctatcacacgtacgatgagaaatacaggcaggagcagaagggggtcatctcgctgagcctcagtacacactgggcagagcccaagtcaccaggggtccccagagatgtggaagccgctgaccgaatgctgcagttctccctgggctggtttgctcaccccatttttagaaacggagactatcctgacaccatgaagtggaaagtggggaacaggagtgaactgcagcacttagccacctcccgcctgccaagcttcactgaggaagagaagaggttcatcagggcgacggccgacgtcttctgcctcaacacgtactactccagaatcgtgcagcacaaaacacccaggctaaacccaccctcctacgaagacgaccaggagatggctgaggaggaggacccttcgtggccttccacggcaatgaacagagctgcgccctgggggacgcgaaggctgctgaactggatcaaggaagagtatggtgacatccccatttacatcaccgaaaacggagtggggctgaccaatccgaacacggaggatactgataggatattttaccacaaaacctacatcaatgaggctttgaaagcctacaggctcgatggtatagaccttcgagggtatgtcgcctggtctctgatggacaactttgagtggctaaatggctacacggtcaagtttggactgtaccatgttgatttcaacaacacgaacaggcctcgcacagcaagagcctccgccaggtactacacagaggtcattaccaacaacggcatgccactggccagggaggatgagtttctgtacggacggtttcctgagggcttcatctggagtgcagcttctgctgcatatcagattgaaggtgcgtggagagcagatggcaaaggactcagcatttgggacacgttttctcacacaccactgagggttgagaacgatgccattggagacgtggcctgtgacagttatcacaagattgctgaggatctggtcaccctgcagaacctgggcgtgtcccactaccgtttttccatctcctggtctcgcatcctccctgatggaaccaccaggtacatcaatgaagcgggcctgaactactacgtgaggctcatcgatacactgctggccgccagcatccagccccaggtgaccatttaccactgggacctaccacagacgctccaagatgtaggaggctgggagaatgagaccatcgtgcagcggtttaaggagtatgcagatgtgctcttccagaggctgggagacaaggtgaagttttggatcacgctgaatgagccctttgtcattgcttaccagggctatggctacggaacagcagctccaggagtctccaataggcctggcactgccccctacattgttggccacaatctaataaaggctcatgctgaggcctggcatctgtacaacgatgtgtaccgcgccagtcaaggtggcgtgatttccatcaccatcagcagtgactgggctgaacccagagatccctctaaccaggaggatgtggaggcagccaggagatatgttcagttcatgggaggctggtttgcacatcctattttcaagaatggagattacaatgaggtgatgaagacgcggatccgtgacaggagcttggctgcaggcctcaacaagtctcggctgccagaatttacagagagtgagaagaggaggatcaacggcacctatgacttttttgggttcaatcactacaccactgtcctcgcctacaacctcaactatgccactgccatctcttcttttgatgcagacagaggagttgcttccatcgcagatcgctcgtggccagactctggctccttctggctgaagatgacgccttttggcttcaggaggatcctgaactggttaaaggaggaatacaatgaccctccaatttatgtcacagagaatggagtgtcccagcgggaagaaacagacctcaatgacactgcaaggatctactaccttcggacttacatcaatgaggccctcaaagctgtgcaggacaaggtggaccttcgaggatacacagtttggagtgcgatggacaattttgagtgggccacaggcttttcagagagatttggtctgcattttgtgaactacagtgacccttctctgccaaggatccccaaagcatcagcgaagttctacgcctctgtggtccgatgcaatggcttccctgaccccgctacagggcctcacgcttgtctccaccagccagatgctggacccaccatcagccccgtgagacaggaggaggtgcagttcctggggctaatgctcggcaccacagaagcacagacagctttgtacgttctcttttctcttgtgcttcttggagtctgtggcttggcatttctgtcatacaagtactgcaagcgctctaagcaagggaaaacacaacgaagccaacaggaattgagcccggtgtcttcattctgatgagttaccacctcaagttctatgaagcaggcctagtttcttcatctatgtttaccggccaccaaacaccttagggtcttagactctgctgatactggacttctccataaagtcctgctgcaccgttagagatgactttaatcttgaatgatttcgacttgctgagtaaaatggaaatatctccatcttgctccagtatcagagttcatttgggcatttgagaagcaagtagctcttgcggaaacgtgtagatactggtctagtgggtctgtgaaccacttaattgaacttaacagggctgttttaagtttcagagttgttaagggttgttaagggagcaaaaaccgtaaaaatccttcctataagaagaaatcaactccattgcatagactgcaatatcatctcctgcccttctgcaagctctccctagcttcacatcttgtgttttccagaaaataaaaacagcagactgtcctttc

SEQ ID NO: 315 - DNA, 1117 bp, human
atctcccactcctgcagctcttctcacaggaccagccactagcgcagcctcgagcgatggcctatgtccccgcaccgggctaccagcccacctacaacccgacgctgccttactaccagcccatcccgggcgggctcaacgtgggaatgtctgtttacatccaaggagtggccagcgagcacatgaagcggttcttcgtgaactttgtggttgggcaggatccgggctcagacgtcgccttccacttcaatccgcggtttgacggctgggacaaggtggtcttcaacacgttgcagggcgggaagtggggcagcgaggagaggaagaggagcatgcccttcaaaaagggtgccgcctttgagctggtcttcatagtcctggctgagcactacaaggtggtggtaaatggaaatcccttctatgagtacgggcaccggcttcccctacagatggtcacccacctgcaagtggatggggatctgcaacttcaatcaatcaacttcatcggaggccagcccctccggccccagggacccccgatgatgccaccttaccctggtcccggacattgccatcaacagctgaacagcctgcccaccatggaaggacccccaaccttcaacccgcctgtgccatatttcgggaggctgcaaggagggctcacagctcgaagaaccatcatcatcaagggctatgtgcctcccacaggcaagagctttgctatcaacttcaaggtgggctcctcaggggacatagctctgcacattaatccccgcatgggcaacggtaccgtggtccggaacagccttctgaatggctcgtggggatccgaggagaagaagatcacccacaacccatttggtcccggacagttctttgatctgtccattcgctgtggcttggatcgcttcaaggtttacgccaatggccagcacctctttgactttgcccatcgcctctcggccttccagagggtggacacattggaaatccagggtgatgtcaccttgtcctatgtccagatctaatctattcctggggccataactcatgggaaaacagaattatcccctaggactcctttctaagcccctaataaaatgtctgagggtgtctc

SEQ ID NO: 316 - DNA, 2493 bp, human
actgcgactcgagacagcggcccggcaggacagctccagaatgaaaatgcggttcttggggttggtggtctgtttggttctctggcccctgcattctgaggggtctggagggaaactgacagctgtggatcctgaaacaaacatgaatgtgagtgaaattatctcttactggggattccctagtgaggaatacctagttgagacagaagatggatatattctgtgccttaaccgaattcctcatgggaggaagaaccattctgacaaaggtcccaaaccagttgtcttcctgcaacatggcttgctggcagattctagtaactgggtcacaaaccttgccaacagcagcctgggcttcattcttgctgatgctggttttgacgtgtggatgggcaacagcagaggaaatacctggtctcggaaacataagacactctcagtttctcaggatgaattctgggctttcagttatgatgagatggcaaaatatgacctaccagcttccattaacttcattctgaataaaactggccaagaacaagtgtattatgtgggtcattctcaaggcaccactataggttttatagcattttcacagatccctgagctggctaaaaggattaaaatgttttttgccctgggtcctgtggcttccgtcgccttctgtactagccctatggccaaattaggacgattaccagatcatctcattaaggacttatttggagacaaagaatttcttccccagagtgcgtttttgaagtggctgggtacccacgtttgcactcatgtcatactgaaggagctctgtggaaatctctgttttcttctgtgtggatttaatgagagaaatttaaatatgtctagagtggatgtatatacaacacattctcctgctggaacttctgtgcaaaacatgttacactggagccaggctgttaaattccaaaagtttcaagcctttgactggggaagcagtgccaagaattattttcattacaaccagagttatcctcccacatacaatgtgaaggacatgcttgtgccgactgcagtctggagcgggggtcacgactggcttgcagatgtctacgacgtcaatatcttactgactcagatcaccaacttggtgttccatgagagcattccggaatgggagcatcttgacttcatttggggcctggatgccccttggaggctttataataaaattattaatctaatgaggaaatatcagtgaaagctggacttgagctgtgtaccaccaagtcaatgattatgtcatgtgaaaatgtgtttgcttcatttctgtaaaacacttgtttttctttcccaggtcttttgtttttttatatccaagaaaatgataactttgaagatgcccagttcactctagtttcaattagaaacatactagctattttttctttaattagggctggaataggaagccagtgtctcaaccatagtattgtctctttaagtcttttaaatatcactgatgtgtaaaaaggtcattatatccattctgtttttaaaatttaaaatatattgactttttgcccttcataggacaaagtaatatatgtgttggaattttaaaattgtgttgtcattggtaaatctgtcactgacttaagcgaggtataaaagtacgcagttttcatgtccttgccttaaagagctctctagtctaacggtcttgtagttagagatctaaatgacattttatcatgttttcctgcagcaggtgcatagtcaaatccagaaatatcacagctgtgccagtaataaggatgctaacaattaattttatcaaacctaactgtgacagctgtgatttgacacgttttaattgctcaggttaaatgaaatagttttccggcgtcttcaaaaacaaattgcactgataaaacaaaaacaaaagtatgttttaaatgctttgaagactgatacactcaaccatctatattcatgagctctcaatttcatggcaggccatagttctacttatctgagaagcaaatccctgtggagactataccactattttttctgagattaatgtactcttggagcccgctactgtcgttattgatcacatctgtgtgaagccaaagccccgtggttgcccatgagaagtgtccttgttcattttcacccaaatgaagtgtgaacgtgatgttttcggatgcaaactcagctcagggattcattttgtgtcttagttttatatgcatccttatttttaatacacctgcttcacgtccctatgttgggaagtccatatttgtctgcttttcttgcagcatcatttccttacaatactgtccggtggacaaaatgacaattgatatgtttttctgatataattactttagctgcactaacagtacaatgcttgttaatggttaatataggcagggcgaatactactttgtaacttttaaagtcttaaacttttcaataaaattgagtgagacttataggccc

SEQ ID NO: 317 - DNA, 3806 bp, human
cttcttgtaagagagtgctaggcacatagtcccctcctattcctaatcctcccaccaaagaaagaggcacagagttcattacttagtgggggccagctgtgatcggccaactgccagctgccttaaaaaggaagaccagtgatgctaggatggagtgaaacccaagaggaagtgccatcatgaggaatcaatgagagatctgtgaagagagagggctgggtgggagcccagaaggatagaacctggaagatcaatatctcccgtgagggaaataacaatggagccaggttctaagtcagtgtctaggtcagactggcaacctgaaccacaccagaggcctataaccccgctagagcctgggccagaaaagacacccatagcccagccagaatcgaagactctgcagggatccaatacccaacagaagcctgcttcaaaccaaagacccctcacccagcaggagacccctgcacaacatgatgctgaatcccagaaggaacctagagcccaacaaaaatctgcttcacaagaggaatttcttgccccacagaagcccgcaccacagcaatcaccttacatccaaagggtgctgctcactcaacaggaagctgcctcccagcagggacctgggctaggaaaagaatctataactcaacaggagccagcattgagacaaagacatgtagcccagccagggcctgggccaggagagccacctccagctcaacaagaagctgaatcaacacctgcggcccaggctaaacctggagccaaaagggagccatctgccccgactgaatctacgtcccaagagacacctgaacagtcagacaagcaaacaacgccagtccagggagccaaatccaagcagggatctttgacagagctgggatttctaacaaaacttcaggaactatccatacagcgatcagccctagagtggaaggcactttctgagtgggtcacagattctgagtcagaatcagatgtgggatcatcttcagacacagattctccagccacgatgggtggaatggtggcccagggagtgaagctaggcttcaaaggaaaatctggttataaagtgatgtcaggatacagtgggacgtcgccacatgagaaaaccagtgctcggaatcacagacactaccaggatacagcctcaaggctcatccacaacatggacctgcgcacaatgacacagtcgctggtgactctggcggaggacaacatagccttcttctcgagccagggtcctggggaaacggcccagcggctgtcaggcgtttttgccggtgtacgggagcaggcgctggggctggagccggccctgggccgcctgctgggtgtggcgcacctctttgacctggacccagagacaccggccaacgggtaccgcagcctagtgcacacagcccgctgctgcctggcgcacctcctgcacaaatcccgctatgtggcctccaaccgccgcagcatcttcttccgcaccagccacaacctggccgagctggaggcctacctggctgccctcacccagctccgcgctctggtctactacgcccagcgcctgctggttaccaatcggccgggggtactcttctttgagggcgacgaggggctcaccgccgacttcctccgggagtatgtcacgctgcataagggatgcttctatggccgctgcctgggcttccagttcacgcctgccatccggccattcctgcagaccatctccattgggctggtgtccttcggggagcactacaaacgcaacgagacaggcctcagtgtggccgccagctctctcttcaccagcggccgctttgccatcgaccccgagctgcgtggggctgagtttgagcggatcacacagaacctggacgtgcacttctggaaagccttctggaacatcaccgagatggaagtgctatcgtctctggccaacatggcatcggccaccgtgagggtaagccgcctgctcagcctgccacccgaagcctttgagatgccactgactgccgaccccacgctcacggtcaccatctcacccccactggcccacacaggccctgggcccgtcctcgtcaggctcatctcctatgacctgcgtgaaggacaggacagtgaggagctcagcagcctgataaagtccaacggccaacggagcctggagctgtggccgcgcccccagcaggcaccccgctcgcggtccctgatagtgcacttccacggcggtggctttgtggcccagacctccagatcccacgagccctacctcaagagctgggcccaggagctgggcgcccccatcatctccatcgactactccctggcccctgaggcccccttcccccgtgcgctggaggagtgcttcttcgcctactgctgggccatcaagcactgcgccctccttggctcaacaggggaacgaatctgccttgcgggggacagtgcaggcgggaacctctgcttcaccgtggctcttcgggcagcagcctacggggtgcgggtgccagatggcatcatggcagcctacccggccacaatgctgcagcctgccgcctctccctcccgcctgctgagcctcatggaccccttgctgcccctcagtgtgctctccaagtgtgtcagcgcctatgctggtgcaaagacggaggaccactccaactcagaccagaaagccctcggcatgatggggctggtgcggcgggacacagccctgctcctccgagacttccgcctgggtgcctcctcatggctcaactccttcctggagttaagtgggcgcaagtcccagaagatgtcggagcccatagcagagccgatgcgccgcagtgtgtctgaagcagcactggcccagccccagggcccactgggcacggattccctcaagaacctgaccctgagggacttgagcctgaggggaaactccgagacgtcgtcggacacccccgagatgtcgctgtcagctgagacacttagcccctccacaccctccgatgtcaacttcttattaccacctgaggatgcaggggaagaggctgaggccaaaaatgagctgagccccatggacagaggcctgggcgtccgtgccgccttccccgagggtttccacccccgacgctccagccagggtgccacacagatgcccctctactcctcacccatagtcaagaaccccttcatgtcgccgctgctggcacccgacagcatgctcaagagcctgccacctgtgcacatcgtggcgtgcgcgctggaccccatgctggacgactcggtcatgctcgcgcggcgactgcgcaacctgggccagccggtgacgctgcgcgtggtggaggacctgccgcacggcttcctgaccctagcggcgctgtgccgcgagacgcgccaggccgcagagctgtgcgtggagcgcatccgcctcgtcctcactcctcccgccggagccgggccgagcggggagacgggggctgcgggggtagacgggggctgcggggggcgacactaaaagcctgttgttcccatctgcgccggcctccgtcatgaatgccttccgggccgggcggaaggggacgcgggctgtgccttacttaagtcgggggtggcaagggggcggggcgggggcccgaaagctgagaccctcgccacggggagggggacgcgcacacacaccggtcaccgagacggctggacctgcacgccaccgctgccttttgctgctgctgctgcggcgaccgccgcagggacggggactggccctcccttgcaggtcggtttggtttgttgtaaataaaagtatttaatta

SEQ ID NO: 318 - DNA, 2764 bp, human
ctctaaagcttagagccaagatggcgggatccaggcaaaggggtctccgggccagagttcggccgctgttctgcgccttgctgctgtcactcggtcgcttcgtccggggcgacggcgtgggaggagaccccgcggtcgcgttgccacatcgccgtttcgagtacaaatacagcttcaaggggccgcacctggtgcagagcgacgggaccgtgcccttctgggcccacgcggggaatgctattccaagttcagatcaaattcgagtagcaccatctttaaaaagccaaagaggctcagtgtggacaaagacaaaagcggcctttgagaactgggaagttgaggtgacatttcgagtgactggaagaggtcgaattggagctgatggcctagcaatttggtatgcagaaaatcaaggcttggagggccctgtgtttggatcagctgatctgtggaatggtgttggaatattttttgattcttttgacaatgatggaaagaaaaataatcctgctatagtaattataggcaacaatggacaaatccattatgaccatcaaaatgacggggctagtcaagctttggcaagttgccagagggacttccgcaacaaaccctatcctgtccgagcaaagattacctattaccagaacacactgacagtaatgatcaataatggctttacaccagataaaaatgattatgaattttgtgccaaagtggaaaatatgattatccctgcacaagggcattttggaatatctgctgcaactggaggtcttgcagatgaccatgatgtcctttcttttctgactttccagttgactgaacctggaaaagagccgcccacaccagataaagaaatttcggaaaaggaaaaagaaaagtatcaggaggaatttgagcactttcaacaagaattggataaaaaaaaagaggaattccagaagggccaccccgacctccaagggcagcctgcggaggaaatatttgagagtgtaggagatcgagagctaagacaagtctttgaaggacagaatcgtattcatcttgaaatcaagcagctgaaccggcagttagatatgattcttgatgaacagagaagatatgtctcttccttaacagaggaaatctctaaaagaggagcaggaatgcctgggcagcatgggcagattactcaacaagaactggatactgttgtgaaaactcagcatgagattctgagacaagtaaatgaaatgaaaaattccatgagtgaaaccgtcagactggtcagtggaatgcagcaccctggctctgctggaggcgtctatgagacaacacagcacttcattgacatcaaagagcacctgcacatagtaaagagggacatagataacttagtgcagcgaaatatgccatcaaatgaaaagccgaaatgcccagaactaccaccatttccatcatgtttgtctacggtccacttcattatatttgttgtggtgcaaactgtattattcattggttatatcatgtataggtctcagcaagaagcagctgccaaaaaattcttttgactaccattttcctgtgtacttcatctatttgtgtacaaaatgatgtcgttttgagggaatttaagtatttaaattgcttcatagtctaaattattaattttcttaataaaataactgtttaaacattgatttgcagttaagaataaaccttaaagcaaagacaaccacattttaatttgttcacagtatgtaaatctgtctaaatttcagtgaatttctggtcagtatgatgcagcctctgagcagatattgaccagtaagagggtaaataaagtgggggcaacccctggatatgaatgttaccccctaagtctccaatattgcaggtttccctgtataacgtaaacacacttgccctcatgcctcccagaatatgaggtctaattaagaagtcccatcaggtttattttgtaaccaaagtcttttttagaggtcagacttcctaatcaaaggcctgggcctgcagtcctttcatcttaatgcaacttcctttgaaatcaaagaatattttgtctgagagctttaaggatctggtaatagacttcaaaatgttaagtgaaattttttttcctctatttatcaatgatatatttcacttttaaaggaaattttggaggaaaatatagctgctttttgcctaaaaaaccttgtgggtggaaatattcctctgagaatggcttttataggtattttgcctggtaatgtattcattcatgattgcccatattcttgaatgtttcttcattccaatggggtcaggtcaatattatgaaaataatttttatatttatatttgtaactaagaatttatttctccctttactacacgatgtaaattcacgtcaaattcgatgatctgaggatttaaattcacaaaacctgccactacattctggtttacattagttacttcatgctggctggggttagtgaccatttgcatactcttttaaatcaaggaggctgtagtagaggcagttttaagattcttgaaggcaaaatttgaaaaacagtgaatacttctaattgtttccttttagtgccagaactaagacattgtgaagcacttgttagtaaacttaaccttgaaatgtcagactggaaggagtttttatgtctttgtgcatacttctgggtattacagaaacagtctgtaaataacattttaagatgcaaatttaattctgttcacagctgatttatactgattt

SEQ ID NO: 319 - DNA, 2882 bp, human
gtgcagcctgagaggaaacaaagtgctgcgagcaggagacggcggcggcgcgaaccctgctgggcctccagtcaccctcgtcttgcattttcccgcgtgcgtgtgtgagtgggtgtgtgtgttttcttacaaagggtatttcgcgatcgatcgattgattcgtagttcccccccgcgcgcctttgccctttgtgctgtaatcgagctcccgccatcccaggtgcttctccgttcctctaaacgccagcgtctggacgtgagcgcaggtcgccggtttgtgccttcggtccccgcttcgccccctgccgtcccctccttatcacggtcccgctcgcggcctcgccgccccgctgtctccgccgcccgccatggcgactgcgacccccgtgccgccgcggatgggcagccgcgctggcggccccaccacgccgctgagccccacgcgcctgtcgcggctccaggagaaggaggagctgcgcgagctcaatgaccggctggcggtgtacatcgacaaggtgcgcagcctggagacggagaacagcgcgctgcagctgcaggtgacggagcgcgaggaggtgcgcggccgtgagctcaccggcctcaaggcgctctacgagaccgagctggccgacgcgcgacgcgcgctcgacgacacggcccgcgagcgcgccaagctgcagatcgagctgggcaagtgcaaggcggaacacgaccagctgctcctcaactatgctaagaaggaatctgatcttaatggcgcccagatcaagcttcgagaatatgaagcagcactgaattcgaaagatgcagctcttgctactgcacttggtgacaaaaaaagtttagagggagatttggaggatctgaaggatcagattgcccagttggaagcctccttagctgcagccaaaaaacagttagcagatgaaactttacttaaagtagatttggagaatcgttgtcagagccttactgaggacttggagtttcgcaaaagcatgtatgaagaggagattaacgagaccagaaggaagcatgaaacgcgcttggtagaggtggattctgggcgtcaaattgagtatgagtacaagctggcgcaagcccttcatgagatgagagagcaacatgatgcccaagtgaggctgtataaggaggagctggagcagacttaccatgccaaacttgagaatgccagactgtcatcagagatgaatacttctactgtcaacagtgccagggaagaactgatggaaagccgcatgagaattgagagcctttcatcccagctttctaatctacagaaagagtctagagcatgtttggaaaggattcaagaattagaggacttgcttgctaaagaaaaagacaactctcgtcgcatgctgacagacaaagagagagagatggcggaaataagggatcaaatgcagcaacagctgaatgactatgaacagcttcttgatgtaaagttagccctggacatggaaatcagtgcttacaggaaactcttagaaggcgaagaagagaggttgaagctgtctccaagcccttcttcccgtgtgacagtatcccgagcatcctcaagtcgtagtgtacgtacaactagaggaaagcggaagagggttgatgtggaagaatcagaggcgagtagtagtgttagcatctctcattccgcctcagccactggaaatgtttgcatcgaagaaattgatgttgatgggaaatttatccgcttgaagaacacttctgaacaggatcaaccaatgggaggctgggagatgatcagaaaaattggagacacatcagtcagttataaatatacctcaagatatgtgctgaaggcaggccagactgttacaatttgggctgcaaacgctggtgtcacagccagccccccaactgacctcatctggaagaaccagaactcgtggggcactggcgaagatgtgaaggttatattgaaaaattctcagggagaggaggttgctcaaagaagtacagtctttaaaacaaccatacctgaagaagaggaggaggaggaagaagcagctggagtggttgttgaggaagaacttttccaccagcagggaaccccaagagcatccaatagaagctgtgcaattatgtaaaattttcaactgtcttcctcaaaataaagaagtatggtaatccttacctgtatacagtgcagagccttctcagaagcacagaatatttttatatttcctttatgtgaatttttaagctgcaaatctgatggccttaatttcctttttgacactgaaagttttgtaaaagaaatcatgtccatacactttgttgcaagatgtgaattattgacactgaacttaataactgtgtactgttcggaaggggttcctcaaattttttgactttttttgtatgtgtgttttttctttttttttaagttcttatgaggaggggagggtaaataaaccactgtgcgtcttggtgtaatttgaagattgccccatctagactagcaatctcttcattattctctgctatatataaaacggtgctgtgagggaggggaaaagcatttttcaatatattgaacttttgtactgaatttttttgtaataagcaatcaaggttataattttttttaaaatagaaattttgtaagaaggcaatattaacctaatcaccatgtaagcactctggatgatggattccacaaaacttggttttatggttacttcttctcttagattcttaattcatgaggagggtgggggagggaggtggagggagggaagggtttctctattaaaatgcattcgttgtgttttttaagatagtgtaacttgcttaaatttcttatgtgacattaacaaataaaaaagctcttttaatat

SEQ ID NO: 320 - DNA, 1990 bp, human
gaattccgggggtattggcagctgaggagtggaggctgggcagctccgactccctgacgccagcgcgaccagatcaatccaggctccaggagaaagcaggcgggcgggcggagaaaggagaggccgagcggctcaacccgggccgaggctcggggagcggagagtggcgcaccgcccggccgtccggacccgggccgcgagaccccgctcgcccggccactcgtgctcccgcacggacgggcgcgccgccaacccggtgctgactgggttacttttttaaacactaggaatggtaatttctactcttctggacttcaaactaagaagttaaagagacttctctgtaaataaacaaatctcttctgctgtccttttgcatttggagacagctttatttcaccatatccaaggagtataactagtgctgtcattatgaatgtgacaagtttattttcctttacaagtccagctgtgaagagacttcttgggtggaaacagggcgatgaagaagaaaaatgggcagagaaagctgttgatgctttggtgaaaaaactgaagaaaaagaaaggtgccatggaggaactggaaaaggccttgagctgcccagggcaaccgagtaactgtgtcaccattccccgctctctggatggcaggctgcaagtctcccaccggaagggactgcctcatgtcatttactgccgtgtgtggcgctggcccgatcttcagagccaccatgaactaaaaccactggaatgctgtgagtttccttttggttccaagcagaaggaggtctgcatcaatccctaccactataagagagtagaaagccctgtacttcctcctgtgctggttccaagacacagcgaatataatcctcagcacagcctcttagctcagttccgtaacttaggacaaaatgagcctcacatgccactcaacgccacttttccagattctttccagcaacccaacagccacccgtttcctcactctcccaatagcagttacccaaactctcctgggagcagcagcagcacctaccctcactctcccaccagctcagacccaggaagccctttccagatgccagctgatacgcccccacctgcttacctgcctcctgaagaccccatgacccaggatggctctcagccgatggacacaaacatgatggcgcctcccctgccctcagaaatcaacagaggagatgttcaggcggttgcttatgaggaaccaaaacactggtgctctattgtctactatgagctcaacaatcgtgtgggtgaagcgttccatgcctcctccacaagtgtgttggtggatggtttcactgatccttccaacaataagaaccgtttctgccttgggctgctctccaatgttaaccggaattccactattgaaaacaccaggcggcatattggaaaaggagttcatctttattatgttggaggggaggtgtatgccgaatgccttagtgacagtagcatctttgtgcaaagtcggaactgcaactaccatcatggatttcatcctactactgtttgcaagatccctagtgggtgtagtctgaaaatttttaacaaccaagaatttgctcagttattggcacagtctgtgaaccatggatttgagacagtctatgagcttacaaaaatgtgtactatacgtatgagctttgtgaagggctggggagcagaataccaccgccaggatgttactagcaccccctgctggattgagatacatctgcacggccccctccagtggctggataaagttcttactcaaatgggttcacctcataatcctatttcatctgtatcttaaatggccccagcatctgcctctggaaaactattgagccttgcatgtacttgaaggatggatgagtcagacacgattgagaactgacaaaggagccttgataatacttgacctctgtgaccaactgttggattcagaaatttaaacaaaaaaaaaaaaaaaa

SEQ ID NO: 321 - DNA, 2485 bp, human
gccgtgggagccgctccgggcgcagggccgcgcgccgagccccgcaggctgcagcgccgcggcccggcccggcgccccggcaacttcgccgagagttgaggcgaagtttgggcgaccgcggcaggccccggccgagctcccctctgcgcccccggcgtcccgtcgagcccagccccgccgggggcgctcctcgccgcccgcgcgccctccccagccatgtcgtccatcctgcctttcactcccccgatcgtgaagcgcctgctgggctggaagaagggcgagcagaacgggcaggaggagaaatggtgcgagaaggcggtcaagagcctggtcaagaaactcaagaagacggggcagctggacgagctggagaaggccatcaccacgcagaacgtcaacaccaagtgcatcaccatccccaggtccctggatggccggttgcaggtgtcccatcggaaggggctccctcatgtcatctactgccgcctgtggcgatggccagacctgcacagccaccacgagctgcgggccatggagctgtgtgagttcgccttcaatatgaagaaggacgaggtctgcgtgaatccctaccactaccagagagtagagacaccagttctacctcctgtgttggtgccacgccacacagagatcccggccgagttccccccactggacgactacagccattccatccccgaaaacactaacttccccgcaggcatcgagccccagagcaatattccagagaccccaccccctggctacctgagtgaagatggagaaaccagtgaccaccagatgaaccacagcatggacgcaggttctccaaacctatccccgaatccgatgtccccagcacataataacttggacctgcagccagttacctactgcgagccggccttctggtgctccatctcctactacgagctgaaccagcgcgtcggggagacattccacgcctcgcagccatccatgactgtggatggcttcaccgacccctccaattcggagcgcttctgcctagggctgctctccaatgtcaacaggaatgcagcagtggagctgacacggagacacatcggaagaggcgtgcggctctactacatcggaggggaggtcttcgcagagtgcctcagtgacagcgctatttttgtccagtctcccaactgtaaccagcgctatggctggcacccggccaccgtctgcaagatcccaccaggatgcaacctgaagatcttcaacaaccaggagttcgctgccctcctggcccagtcggtcaaccagggctttgaggctgtctaccagttgacccgaatgtgcaccatccgcatgagcttcgtcaaaggctggggagcggagtacaggagacagactgtgaccagtaccccctgctggattgagctgcacctgaatgggcctttgcagtggcttgacaaggtcctcacccagatgggctccccaagcatccgctgttccagtgtgtcttagagacatcaagtatggtaggggagggcaggcttggggaaaatggccatgcaggaggtggagaaaattggaactctactcaacccattgttgtcaaggaagaagaaatctttctccctcaactgaaggggtgcacccacctgttttctgaaacacacgagcaaacccagaggtggatgttatgaacagctgtgtctgccaaacacatttaccctttggccccactttgaagggcaagaaatggcgtctgctctggtggcttaagtgagcagaacaggtagtattacaccaccggccccctccccccagactctttttttgagtgacagctttctgggatgtcacagtccaaccagaaacacccctctgtctaggactgcagtgtggagttcaccttggaagggcgttctaggtaggaagagcccgcagggccatgcagacctcatgcccagctctctgacgcttgtgacagtgcctcttccagtgaacattcccagcccagccccgccccgccccgccccaccactccagcagaccttgccccttgtgagctggatagacttgggatggggagggagggagttttgtctgtctccctcccctctcagaacatactgattgggaggtgcgtgttcagcagaacctgcacacaggacagcgggaaaaatcgatgagcgccacctctttaaaaactcacttacgtttgtcctttttcactttgaaaagttggaaggatctgctgaggcccagtgcatatgcaatgtatagtgtctattatcacattaatctcaaagagattcgaatgacggtaagtgttctcatgaagcaggaggcccttgtcgtgggatggcatttggtctcaggcagcaccacactgggtgcgtctccagtcatctgtaagagcttgctccagattctgatgcatacggctatattggtttatgtagtcagttgcattcattaaatcaactttatcataaaaaaaaaaaaaaaa

SEQ ID NO: 322 - DNA, 3830 bp, human
ggtgtttataagaatggaagtgttgtttccttgcccgattccttcatgctatatctcatgaacctctgtaatcttgggggagagactatatttaatgatgacaaacctgtcaccagtgtagcaacaacagtgtgaggacaaaagcaaataaaaattaagaagcgttcaaatttatattcaacaaggaagtcatttcaatcaacaacttctgctgcattatttttccaagatgaaccgatacacaaccatgagacagttgggggacggcacgtatgggagtgtgcttatgggcaagagtaatgaatccggggagctggtggccatcaaaaggatgaagagaaagttctattcttgggatgaatgcatgaacttgagagaagttaagtctctgaagaaacttaatcatgccaatgttattaaattgaaagaagttatcagagaaaatgaccatctttattttatatttgaatatatgaaagaaaacctctatcaattaatgaaagacagaaacaagttgttccctgaatcagtcatcagaaatattatgtatcaaatattgcaagggctggcttttatccataaacatggcttttttcatagggacatgaaaccagaaaacttgctttgtatgggtccagagcttgtgaaaattgctgattttggacttgcaagagaattaaggtcacagccaccatacactgattatgtatctaccagatggtatcgtgcccctgaagttttactgagatcttcagtttatagttctcccattgatgtgtgggctgttggaagtatcatggctgaactctatatgttaaggccacttttcccagggacaagtgaggtcgatgaaatctttaaaatttgccaagttttagggactcccaaaaaaagtgactggccagaaggataccagctggcatcctctatgaacttccgttttccccagtgtgttcctataaacttaaaaactcttattcccaatgccagtaatgaagctattcagctcatgaccgaaatgttgaattgggatccaaagaaacgaccgacagcaagccaggcattgaaacacccatattttcaagttggtcaggtattaggcccttcgtcaaatcatctggaatcaaaacagtctttaaataagcagctgcaaccattagaatcaaagccatctttagttgaggtagagcctaagcctctgccggatataatcgatcaggttgttggacaaccccagccaaaaactagccagcagccactgcagcccattcagccgccacagaacctgagcgtccagcaacctccaaagcaacagagtcaggagaaaccgccacaaacgctattcccgagcatcgtcaaaaacatgccaactaagccaaatggcacactgagtcataaaagtggtaggaggcgttggggtcagactatcttcaagtctggagatagctgggaagagttggaggactatgatttcggagcctcccattccaagaagccaagcatgggtgtttttaaagaaaaaaggaaaaaagattctccatttcggcttccagagccagtaccctcaggctccaaccactcgacaggggaaaacaagagcttacctgctgttacttccctaaaatctgattccgaattgtcaactgctccaacctctaaacagtactacttgaaacaatcaagatatcttccaggtgtgaatcccaagaaggtgtccttgatagccagtggaaaggaaataaacccccacacttggagcaaccagttattccccaagtcactgggacccgttggggcagaacttgctttcaaaaggagcaatgcaggaaatcttggaagttatgctacttacaatcagtcaggatatattccttcctttctcaaaaaagaagtgcagtcagctggccagaggatccacttagcacctctcaatgcaacggcttcagaatatacctggaacacaaaaactggtcgggggcagttttcaggacgtacttataatcctacagcaaaaaacctaaatattgtgaaccgtgcacagcccattccctcagtgcatgggaggacagactgggtggccaagtatggaggccaccggtaggagtctatggtgtgaaaccctacagcattgctccgtagagtacgtgcaagttccttgaccctgggaaatgtctacaaatgtctatttctactgagttctggaagaaatatgcaaaagtgggtacttggaagggcaaaaatcatcccctattttacttatttccaagaaatgcattttcttagcatcattgcccacagtgttgatatatgggtaggatgttacaaagtattgaataaactatttgccaaagtatgaagtatttgatctacaatttaataaatagtaaatccaataagaacccttaaaaaaaaacaacttccagaaaatgtttagagtgttttagttttcatttgttgtatgtgcccaaatggtttagtagttcttcactttgctgtggttggcttaagaggtttgtcttttgtttttgtacagcagttgggccaacctttgctggctgtcagctgtggttcttatttgactaaggctctgcgctgccattttgtcaatgacagaaagattgcaattatttgtttttctactttgaagctatgggagcgatggtaatttcaatcttgagcaggatatctttttttttttttttgaggcgatgtttcactcttgtgtccaggctggagtgcagtggcactatcttggcttactgcaacctccacctcctgggttcaagtgattctcctgcctcagcctcccgagtagctgggattagaggcgtgtgccaccatgcctggctaatttttgtagtattagtagagacagggtttcaccatgttggtcaggctcaggctggtctcaaactcctgacctcaggtgatccacctgcctcggcctcccaaagtgcagggcttacaggtgtgagccacagtgcccagctttttttttttttttttagaaataaatttatctttaacatagagaatatcaaagttatgccacttgattttagtggacggcttgtgttttgatcttgaccagtacagttcccatgaattcaaggtgacaatcaagcccaatggcttgatgacttcaatagtaaccaagtcaaggttctcttggctggacatcattaagaaagttctggaaactgtgtttgtttgatgctggttcattggacttttcaaattgttttgtttctgtgtccctaccagacacaaagatgaagtgtgccagctggttcccccaagccagctcatgctgctgaccactgactcagctctgaccttcacatttgctctgaagcaagtgcgttcagctgctggggcagtgatatcacatagtacatatattatttccttagtttatttccaaactggtattttaaatagacacttcgaactttgggctactctgtttaaatctgccactttctggactggaccttagtactgtaaattctttttaaagaataataatgttaccaactgctgagatttttatgtattttgtgactttgtaacaactgctattgtaataagtgtcatcttgtgggcattatacaaaggcatattataaaataataatgatatttttgtatagaagagtcaactgttcagatgtaagatgttgaaaaatgttaaaatctaaagagtaatttatcctagtggtaatggttatatgtatttgtacagtttaaattaatgtctcaaagctgtgcagtcttttgttactgggacacttttaaactctgaataggcattaaaaaaaatatggctaa

SEQ ID NO: 323 - DNA, 3443 bp, human
ggaaaagcacttctgctctaccggcattaagaggcattccgtcttggaattccggcattaagaggcattccgtcttcatagcccgtgagacgccagtgtcacctttagcccaaccagtgccctgagggtggcattttcctaccttcctgtaacgacccccgggattgcccagggctacagcctctctcccgtgagcctccagaccgcccctggccccgccccccaccccgataggcccggccgggtctgggggcggggcgtttgcggcctttccagggccggggaaccccaggaggaagctgctgagccatgggctacgcgcgggcttcgggggtctgcgctcgcggctgcctggactcagcaggcccctggaccatgtcccgcgccctgcggccaccgctcccgcctctctgctttttccttttgttgctggcggctgccggtgctcgggccgggggatacgagacatgccccacagtgcagccgaacatgctgaacgtgcacctgctgcctcacacacatgatgacgtgggctggctcaaaaccgtggaccagtacttttatggaatcaagaatgacatccagcacgccggtgtgcagtacatcctggactcggtcatctctgccttgctggcagatcccacccgtcgcttcatttacgtggagattgccttcttctcccgttggtggcaccagcagacaaatgccacacaggaagtcgtgcgagaccttgtgcgccaggggcgcctggagttcgccaatggtggctgggtgatgaacgatgaggcagccacccactacggtgccatcgtggaccagatgacacttgggctgcgctttctggaggacacatttggcaatgatgggcgaccccgtgtggcctggcacattgaccccttcggccactctcgggagcaggcctcgctgtttgcgcagatgggcttcgacggcttcttctttgggcgccttgattatcaagataagtgggtacggatgcagaagctggagatggagcaggtgtggcgggccagcaccagcctgaagcccccgaccgcggacctcttcactggtgtgcttcccaatggttacaacccgccaaggaatctgtgctgggatgtgctgtgtgtcgatcagccgctggtggaggaccctcgcagccccgagtacaacgccaaggagctggtcgattacttcctaaatgtggccactgcccagggccggtattaccgcaccaaccacactgtgatgaccatgggctcggacttccaatatgagaatgccaacatgtggttcaagaaccttgacaagctcatccggctggtaaatgcgcagcaggcaaaaggaagcagtgtccatgttctctactccacccccgcttgttacctctgggagctgaacaaggccaacctcacctggtcagtgaaacatgacgacttcttcccttacgcggatggcccccaccagttctggaccggttacttttccagtcggccggccctcaaacgctacgagcgcctcagctacaacttcctgcaggtgtgcaaccagctggaggcgctggtgggcctggcggccaacgtgggaccctatggctccggagacagtgcacccctcaatgaggcgatggctgtgctccagcatcacgacgccgtcagcggcacctcccgccagcacgtggccaacgactacgcgcgccagcttgcggcaggctgggggccttgcgaggttcttctgagcaacgcgctggcgcggctcagaggcttcaaagatcacttcaccttttgccaacagctaaacatcagcatctgcccgctcagccagacggcggcgcgcttccaggtcatcgtttataatcccctggggcggaaggtgaattggatggtacggctgccggtcagcgaaggcgttttcgttgtgaaggaccccaatggcaggacagtgcccagcgatgtggtaatatttcccagctcagacagccaggcgcaccctccggagctgctgttctcagcctcactgcccgccctgggcttcagcacctattcagtagcccaggtgcctcgctggaagccccaggcccgcgcaccacagcccatccccagaagatcctggtcccctgctttaaccatcgaaaatgagcacatccgggcaacgtttgatcctgacacagggctgttgatggagattatgaacatgaatcagcaactcctgctgcctgttcgccagaccttcttctggtacaacgccagtataggtgacaacgaaagtgaccaggcctcaggtgcctacatcttcagacccaaccaacagaaaccgctgcctgtgagccgctgggctcagatccacctggtgaagacacccttggtgcaggaggtgcaccagaacttctcagcttggtgttcccaggtggttcgcctgtacccaggacagcggcacctggagctagagtggtcggtggggccgatacctgtgggcgacacctgggggaaggaggtcatcagccgttttgacacaccgctggagacaaagggacgcttctacacagacagcaatggccgggagatcctggagaggaggcgggattatcgacccacctggaaactgaaccagacggagcccgtggcaggaaactactatccagtcaacacccggatttacatcacggatggaaacatgcagctgactgtgctgactgaccgctcccaggggggcagcagcctgagagatggctcgctggagctcatggtgcaccgaaggctgctgaaggacgatggacgcggagtatcggagccactaatggagaacgggtcgggggcgtgggtgcgagggcgccacctggtgctgctggacacagcccaggctgcagccgccggacaccggctcctggcggagcaggaggtcctggcccctcaggtggtgctggccccgggtggcggcgccgcctacaatctcggggctcctccgcgcacgcagttctcagggctgcgcagggacctgccgccctcggtgcacctgctcacgctggccagctggggccccgaaatggtgctgctgcgcttggagcaccagtttgccgtaggagaggattccggacgtaacctgagcgcccccgttaccttgaacttgagggacctgttctccaccttcaccatcacccgcctgcaggagaccacgctggtggccaaccagctccgcgaggcagcctccaggctcaagtggacaacaaacacaggccccacaccccaccaaactccgtaccagctggacccggccaacatcacgctggaacccatggaaatccgcactttcctggcctcagttcaatggaaggaggtggatggttaggtctgctgggatgggccctccaagcccaagcctcctgctccgggggcagaccagactctgactctcctcttggggctgctgcattaaaacgtactactaag

SEQ ID NO: 324 - DNA, 3453 bp, human
acttttcgcgcgaaacctggttgttgctgtagtggcggagaggatcgtggtactgctatggcggaatcatcggaatccttcaccatggcatccagcccggcccagcgtcggcgaggcaatgatcctctcacctccagccctggccgaagctcccggcgtactgatgccctcacctccagccctggccgtgaccttccaccatttgaggatgagtccgaggggctcctaggcacagaggggcccctggaggaagaagaggatggagaggagctcattggagatggcatggaaagggactaccgcgccatcccagagctggacgcctatgaggccgagggactggctctggatgatgaggacgtagaggagctgacggccagtcagagggaggcagcagagcgggccatgcggcagcgtgaccgggaggctggccggggcctgggccgcatgcgccgtgggctcctgtatgacagcgatgaggaggacgaggagcgccctgcccgcaagcgccgccaggtggagcgggccacggaggacggcgaggaggacgaggagatgatcgagagcatcgagaacctggaggatctcaaaggccactctgtgcgcgagtgggtgagcatggcgggcccccggctggagatccaccaccgcttcaagaacttcctgcgcactcacgtcgacagccacggccacaacgtcttcaaggagcgcatcagcgacatgtgcaaagagaaccgtgagagcctggtggtgaactatgaggacttggcagccagggagcacgtgctggcctacttcctgcctgaggcaccggcggagctgctgcagatctttgatgaggctgccctggaggtggtactggccatgtaccccaagtacgaccgcatcaccaaccacatccatgtccgcatctcccacctgcctctggtggaggagctgcgctcgctgaggcagctgcatctgaaccagctgatccgcaccagtggggtggtgaccagctgcactggcgtcctgccccagctcagcatggtcaagtacaactgcaacaagtgcaatttcgtcctgggtcctttctgccagtcccagaaccaggaggtgaaaccaggctcctgtcctgagtgccagtcggccggcccctttgaggtcaacatggaggagaccatctatcagaactaccagcgtatccgaatccaggagagtccaggcaaagtggcggctggccggctgccccgctccaaggacgccattctcctcgcagatctggtggacagctgcaagccaggagacgagatagagctgactggcatctatcacaacaactatgatggctccctcaacactgccaatggcttccctgtctttgccactgtcatcctagccaaccacgtggccaagaaggacaacaaggttgctgtaggggaactgaccgatgaagatgtgaagatgatcactagcctctccaaggatcagcagatcggagagaagatctttgccagcattgctccttccatctatggtcatgaagacatcaagagaggcctggctctggccctgttcggaggggagcccaaaaacccaggtggcaagcacaaggtacgtggtgatatcaacgtgctcttgtgcggagaccctggcacagcgaagtcgcagtttctcaagtatattgagaaagtgtccagccgagccatcttcaccactggccagggggcgtcggctgtgggcctcacggcgtatgtccagcggcaccctgtcagcagggagtggaccttggaggctggggccctggttctggctgaccgaggagtgtgtctcattgatgaatttgacaagatgaatgaccaggacagaaccagcatccatgaggccatggagcaacagagcatctccatctcgaaggctggcatcgtcacctccctgcaggctcgctgcacggtcattgctgccgccaaccccataggagggcgctacgacccctcgctgactttctctgagaacgtggacctcacagagcccatcatctcacgctttgacatcctgtgtgtggtgagggacaccgtggacccagtccaggacgagatgctggcccgcttcgtggtgggcagccacgtcagacaccaccccagcaacaaggaggaggaggggctggccaatggcagcgctgctgagcccgccatgcccaacacgtatggcgtggagcccctgccccaggaggtcctgaagaagtacatcatctacgccaaggagagggtccacccgaagctcaaccagatggaccaggacaaggtggccaagatgtacagtgacctgaggaaagaatctatggcgacaggcagcatccccattacggtgcggcacatcgagtccatgatccgcatggcggaggcccacgcgcgcatccatctgcgggactatgtgatcgaagacgacgtcaacatggccatccgcgtgatgctggagagcttcatagacacacagaagttcagcgtcatgcgcagcatgcgcaagacttttgcccgctacctttcattccggcgtgacaacaatgagctgttgctcttcatactgaagcagttagtggcagagcaggtgacatatcagcgcaaccgctttggggcccagcaggacactattgaggtccctgagaaggacttggtggataaggctcgtcagatcaacatccacaacctctctgcattttatgacagtgagctcttcaggatgaacaagttcagccacgacctgaaaaggaaaatgatcctgcagcagttctgaggccctatgccatccataaggattccttgggattctggtttggggtggtcagtgccctctgtgctttatggacacaaaaccagagcacttgatgaactcggggtactagggtcagggcttatagcaggatgtctggctgcacctggcatgactgtttgtttctccaagcctgctttgtgcttctcacctttgggtgggatgccttgccagtgtgtcttacttggttgctgaacatcttgccacctccgagtgctttgtctccactcagtaccttggatcagagctgctgagttcaggatgcctgcgtgtggtttaggtgttagccttcttacatggatgtcaggagagctgctgccctcttggcgtgagttgcgtattcaggctgcttttgctgcctttggccagagagctggttgaagatgtttgtaatcgttttcagtctcctgcaggtttctgtgcccctgtggtggaagagggcacgacagtgccagcgcagcgttctgggctcctcagtcgcaggggtgggatgtgagtcatgcggattatccactcgccacagttatcagctgccattgctccctgtctgtttccccactctcttatttgtgcattcggtttggtttctgtagttttaatttttaataaagttgaataaaatataaaaaaaaaaaaaaaaaaaaa

SEQ ID NO: 325 - DNA, 1321 bp, human
ggcgctgggcagtgtggaggtcgttggagtcacttccgcgtcaccagctcctgtgcctgccagtcggtgcccctcccgctccagccatgctctccgccctcgcccggcctgccagcgctgctctccgccgcagcttcagcacctcggcccagaacaatgctaaagtagctgtgctaggggcctctggaggcatcgggcagccactttcacttctcctgaagaacagccccttggtgagccgcctgaccctctatgatatcgcgcacacacccggagtggccgcagatctgagccacatcgagaccaaagccgctgtgaaaggctacctcggacctgaacagctgcctgactgcctgaaaggttgtgatgtggtagttattccggctggagtccccagaaagccaggcatgacccgggacgacctgttcaacaccaatgccacgattgtggccaccctgaccgctgcctgtgcccagcactgcccggaagccatgatctgcgtcattgccaatccggttaattccaccatccccatcacagcagaagttttcaagaagcatggagtgtacaaccccaacaaaatcttcggcgtgacgaccctggacatcgtcagagccaacacctttgttgcagagctgaagggtttggatccagctcgagtcaacgtccctgtcattggtggccatgctgggaagaccatcatccccctgatctctcagtgcacccccaaggtggactttccccaggaccagctgacagcactcactgggcggatccaggaggccggcacggaggtggtcaaggctaaagccggagcaggctctgccaccctctccatggcgtatgccggcgcccgctttgtcttctcccttgtggatgcaatgaatggaaaggaaggtgttgtggaatgttccttcgttaagtcacaggaaacggaatgtacctacttctccacaccgctgctgcttgggaaaaagggcatcgagaagaacctgggcatcggcaaagtctcctcttttgaggagaagatgatctcggatgccatccccgagctgaaggcctccatcaagaagggggaagatttcgtgaagaccctgaagtgagccgctgtgacgggtggccagtttccttaatttatgaaggcatcatgtcactgcaaagccgttgcagataaactttgtattttaatttgctttggtgatgattactgtattgacatcatcatgccttccaaattgtgggtggctctgtgggcgcatcaataaaagccgtccttgattttatttttcaaggtcccttctgtaaaaaaaaaaaaaaaaaa

SEQ ID NO: 326 - DNA, 2212 bp, human
ccgccgccacagctgcagtcagcaccgtcaccccagcagcatccgccgcctgcaccgcgcgtgcggcccgccccggcctgaccccgccgccgaacccggcgccagccatggagcccgaagccccccgtcgccgccacacccatcagcgcggctacctgctgacacggaaccctcacctcaacaaggacttggcctttaccctggaagagagacagcaattgaacattcatggattgttgccaccttccttcaacagtcaggagatccaggttcttagagtagtaaaaaatttcgagcatctgaactctgactttgacaggtatcttctcttaatggatctccaagatagaaatgaaaaactcttttatagagtgctgacatctgacattgagaaattcatgcctattgtttatactcccactgtgggtctggcttgccaacaatatagtttggtgtttcggaagccaagaggtctctttattactatccacgatcgagggcatattgcttcagttctcaatgcatggccagaagatgtcatcaaggccattgtggtgactgatggagagcgtattcttggcttgggagaccttggctgtaatggaatgggcatccctgtgggtaaattggctctatatacagcttgcggagggatgaatcctcaagaatgtctgcctgtcattctggatgtgggaaccgaaaatgaggagttacttaaagatccactctacattggactacggcagagaagagtaagaggttctgaatatgatgattttttggacgaattcatggaggcagtttcttccaagtatggcatgaattgccttattcagtttgaagattttgccaatgtgaatgcatttcgtctcctgaacaagtatcgaaaccagtattgcacattcaatgatgatattcaaggaacagcatctgttgcagttgcaggtctccttgcagctcttcgaataaccaagaacaaactgtctgatcaaacaatactattccaaggagctggagaggctgccctagggattgcacacctgattgtgatggccttggaaaaagaaggtttaccaaaagagaaagccatcaaaaagatatggctggttgattcaaaaggattaatagttaagggacgtgcttccttaacacaagagaaagagaagtttgcccatgaacatgaagaaatgaagaacctagaagccattgttcaagaaataaaaccaactgccctcataggagttgctgcaattggtggtgcattctcagaacaaattctcaaagatatggctgccttcaatgaacggcctattatttttgctttgagtaatccaactagcaaagcagaatgttctgcagagcagtgctacaaaataaccaagggacgtgcaatttttgccagtggcagtccttttgatccagtcactcttccaaatggacagaccctatatcctggccaaggcaacaattcctacgtgttccctggagttgctcttggtgttgtggcgtgtggattgaggcagatcacagataatattttcctcactactgctgaggttatagctcagcaagtgtcagataaacacttggaagagggtcggctttatcctcctttgaataccattagagatgtttctctgaaaattgcagaaaagattgtgaaagatgcataccaagaaaagacagccacagtttatcctgaaccgcaaaacaaagaagcatttgtccgctcccagatgtatagtactgattatgaccagattctacctgattgttattcttggcctgaagaggtgcagaaaatacagaccaaagttgaccagtaggataatagcaaacatttctaactctattaatgaggtctttaaacctttcataatttttaaaggttggaatcttttataatgattcataagacacttagattaagattttactttaacagtctaaaaattgatagaagaatatcgatataaattgggataaacatcacatgagacaattttgcttcactttgccttctggttatttatggtttctgtctgaattattctgcctacgttctctttaaaagctgttgtacgtactacggagaaactcatcatttttatacaggacactaatgggaagaccaaaattactaataaattgaaataaccaacattaaaactcataattattttgttgaccattttgttaaaatctacttttc

SEQ ID NO: 327 - DNA, 3110 bp, human
ttggctacatcggacccagatgactgcctcctcacttcctccctcccgattccgccgcggcccccaaagactctcggggtggccccttgtccgcaccgcttggagggagtgtgctctgagttaagctggtctcttctggtcctggaaaaaaatgagtattgacaaggttgctggatctgcgcagaaaagaaagtgccacttaataaaaaatttagcccggcagtggtaccgtctgcagagcttgctgcccttggacgttagcaggaagccttcggggtgctgtaatcggcgggcagaggagagggaggccgcggaattaaaaggaacaaaagctagagcgccatgccaaacgtccccggcaagacccagttaggcaggagccgggagtgatgggaaaatgaactagaatacgatgagctgccccattacggcgggatggacggagtaggggttcccgcttccatgtacggagaccctcacgcgccgcggccgatccccccggttcaccacctgaaccacgggccgccgctccacgccacacagcactacggcgcgcacgccccgcaccccaatgtcatgccggccagtatgggatccgctgtcaacgacgccttgaagcgggacaaggacgcgatctatgggcacccgttgtttcctctgttagctctggtctttgagaagtgcgagctggcgacctgcactccccgggaacctggagtggctggcggagacgtctgctcctccgactccttcaacgaggacatcgcggtcttcgccaagcaggttcgcgccgaaaagccacttttttcctcaaatccagagctggacaatttgatgatacaagcaatacaagtactaaggtttcatcttttggagttagaaaaggtccacgaactgtgcgataacttctgccaccgatacattagctgtttgaaggggaaaatgcccatcgacctcgtcattgatgaaagagacggcagctccaagtcagatcatgaagaactttcaggctcctccacaaatctcgctgaccataacccttcttcttggcgagaccacgatgatgcaacctcaacccactcagcaggcaccccagggccctccagtgggggccatgcttcccagagcggagacaacagcagtgagcaaggggatggtttagacaacagtgtagcttcacctggtacaggtgacgatgatgatccggataaggacaaaaaacgccagaagaaaagaggcattttccccaaagtagcaacaaatatcatgagagcatggctcttccagcatctcacacatccgtacccttccgaagagcagaagaaacagttagcgcaagacacaggacttacaattctccaagtaaacaactggtttattaatgccagaagaagaatagtacagcccatgattgaccagtcaaatcgagcagtgagccaaggagcagcatatagtccagagggtcagcccatggggagctttgtgttggatggtcagcaacacatggggatccggcctgcaggacctatgagtggaatgggcatgaatatgggcatggatgggcaatggcactacatgtaaccttcatcatgtaaagcaatcgcaaagcaagggggaagtttgcagagcatgccaggggactacgtttctcagggtggtcctatgggaatgagtatggcacagccaagttacactcctccccagatgaccccacaccctactcaattaagacatggacccccaatgcattcatatttgccaagccatccccaccacccagccatgatgatgcacggaggaccccctacccaccctggaatgactatgtcagcacagagccccacaatgttaaattctgtagatcccaatgttggcggacaggttatggacattcatgcccaatagtataagggaactcaagggaaaaggaaacacacgcaaaaactattttaagactttctgaactttgaccagatgttgacacttaatatgaaattccagacagctgtgattattttttacttttgtcatttttcatcaagcaacagaggaccaatgcaacaagaacacaaatgtgaaatcatgggctgactgagacaattctgtccatgtaaagatcctctggaaaaagactccgagagttataactactgtagtataaatataggaactaagttaaacttgtacatttctgttgatcacgccgttatgttgcctcaaatagttttagaagagaaaaaaaaatatatccttgttttccacactatgtgtgttgttcccaaaagaatgactgttttggttcatcagtgaattcaccatccaggagagactgtggtatatattttaaacctgttgggccaatgagaaaagaaccacactggagatcatgatgaacttttggctgaacctcatcactcgaactccagcttcaagaatgtgttttcatgcccggcctttgttcctccataaatgtgtcctttagtttcaaacagatctttatagttcgtgcttcataagccaattcttattattatttttgggggactcttcttcaaagagcttgccaatgaagatttaaagacagagcaggagcttcttccaggagttctgagccttggttgtggacaaaacaatcttaagttgggcagctttcctcaacacaaaaaaaagttattaatggtcattgaaccataactaggactttatcagaaactcaaagcttgggggataaaaaggagcaagagaatactgtaacaaacttcgtacagagttcggtctattaattgtttcatgttagatattctatgtgtttacctcaattgaaaaaaaaaagaatgtttttgctagtatcagatctgctgtggaattggtattgtatgtccatgaattcttcttttctcagcacgtgttcctcactagaagaaaatgctgttacctttaagctttgtcaaatttacattaaaatacttgtatgaggactgtgacgttatgttaaaaaaaaaaaggtgttaagtcacaaaaagcggtaataaatatttcatttttgaaaaaaaaaaaaaaaaaaaaaaaaaaaaaaaaaaaaaaaaaaaaaaaaaaaaaaaaaaaaaaaa

SEQ ID NO: 328 - DNA, 5215 bp, human
cgagcgcggcgcccttgagctgcaccgcggcgcaggtttgcgagccgacttgtcagccggccaagaaaaggaagctccgtcccttcccgctcacccggcttccccaccccttgtactctaaactctgcagagggcgagcggcgcggccacggaggcgccgaggaggagcgagccgccgccgggcagcggcgtgccctcgggggagagggcgccggagaggaggcggcggcgcggcggcgagggcgcggcgcgcgatggcagctgcttagcccggcgggcgcggagcagccccgagctgtggctggccaggcggtgcggctgggcgggggacgccgccgccgttgctgcccggcccggagagatgagcacggaggcggacgagggcatcactttctctgtgccacccttcgccccctcgggcttctgcaccatccccgagggcggcatctgcaggaggggaggagcggcggcggtgggcgagggcgaggagcaccagctgccaccgccgccgccgggcagcttctggaacgtggagagcgccgctgcccctggcatcggttgtccggcggccacctcctcgagcagtgccacccgaggccggggcagctctgttggcgggggcagccgacggaccacggtggcatatgtgatcaacgaagcgagccaagggcaactggtggtggccgagagcgaggccctgcagagcttgcgggaggcgtgcgagacagtgggcgccaccctggaaaccctgcattttgggaaactcgactttggagaaaccaccgtgctggaccgcttttacaatgcagatattgcggtggtggagatgagcgatgccttccggcagccgtccttgttttaccaccttggggtgagagaaagtttcagcatggccaacaacatcatcctctactgtgatactaactcggactctctgcagtcactgaaggaaataatttgccagaagaatactatgtgcactgggaactacacctttgttccttacatgataactccacataacaaagtctactgctgtgacagcagcttcatgaaggggttgacagagctcatgcaaccgaacttcgagctgcttcttggacccatctgcttacctcttgtggatcgttttattcaacttttgaaggtggcacaagcaagttctagccagtacttccgggaatctatactcaatgacatcaggaaagctcgtaatttatacactggtaaagaattggcagctgagttggcaagaattcggcagcgagtagataatatcgaagtcttgacagcagatattgtcataaatctgttactttcctacagagatatccaggactatgattctattgtgaagctggtagagactttagaaaaactgccaacctttgatttggcctcccatcaccatgtgaagtttcattatgcatttgcactgaataggagaaatctccctggtgacagagcaaaagctcttgatattatgattcccatggtgcaaagcgaaggacaagttgcttcagatatgtattgcctagttggtcgaatctacaaagatatgtttttggactctaatttcacggacactgaaagcagagaccatggagcttcttggttcaaaaaggcatttgaatctgagccaacactacagtcaggaattaattatgcggtcctcctcctggcagctggacaccagtttgaatcttcctttgagctccggaaagttggggtgaagctaagtagtcttcttggtaaaaagggaaacttggaaaaactccagagctactgggaagttggattttttctgggggccagcgtcctagccaatgaccacatgagagtcattcaagcatctgaaaagctttttaaactgaagacaccagcatggtacctcaagtctattgtagagacaattttaatatataagcattttgtgaaactgaccacagaacagcctgtggccaagcaagaacttgtggacttttggatggatttcctggtcgaggccacaaagacagatgttactgtggttaggtttccagtattaatattagaaccaaccaaaatctatcaaccttcttatttgtctatcaacaatgaagttgaggaaaagacaatctctatttggcacgtgcttcctgatgacaagaaaggtatacatgagtggaattttagtgcctcttctgtcaggggagtgagtatttctaaatttgaagaaagatgctgctttctttatgtgcttcacaattctgatgatttccaaatctatttctgtacagaacttcattgtaaaaagttttttgagatggtgaacaccattaccgaagagaaggggagaagcacagaggaaggagactgtgaaagtgacttgctggagtatgactatgaatatgatgaaaatggtgacagagtcgttttaggaaaaggcacttatgggatagtctacgcaggtcgggacttgagcaaccaagtcagaattgctattaaggaaatcccagagagagacagcagatactctcagcccctgcatgaagaaatagcattgcataaacacctgaagcacaaaaatattgtccagtatctgggctctttcagtgagaatggtttcattaaaatcttcatggagcaggtccctggaggaagtctttctgctctccttcgttccaaatggggtccattaaaagacaatgagcaaacaattggcttttatacaaagcaaatactggaaggattaaaatatctccatgacaatcagatagttcaccgggacataaagggtgacaatgtgttgattaatacctacagtggtgttctcaagatctctgacttcggaacatcaaagaggcttgctggcataaacccctgtactgaaacttttactggtaccctccagtatatggcaccagaaataatagataaaggaccaagaggctacggaaaagcagcagacatctggtctctgggctgtacaatcattgaaatggccacaggaaaacccccattttatgaactgggagaaccacaagcagctatgttcaaggtgggaatgtttaaagtccaccctgagatcccagagtccatgtctgcagaggccaaggcattcatactgaaatgttttgaaccagatcctgacaagagagcctgtgctaacgacttgcttgttgatgagtttttaaaagtttcaagcaaaaagaaaaagacacaacctaagctttcagctctttcagctggatcaaatgaatatctcaggagtatatccttgccggtacctgtgctggtggaggacaccagcagcagcagtgagtacggctcagtttcacccgacacggagttgaaagtggaccccttctctttcaaaacaagagccaagtcctgcggagaaagagatgtcaagggaattcggacactctttttgggcattccagatgagaattttgaagatcacagtgctcctccttcccctgaagaaaaagattctggattcttcatgctgaggaaggacagtgagaggcgagctacccttcacaggatcctgacggaagaccaagacaaaattgtgagaaacctaatggaatctttagctcagggggctgaagaaccgaaactaaaatgggaacacatcacaaccctcattgcaagcctcagagaatttgtgagatccactgaccgaaaaatcatagccaccacactgtcaaagctgaaactggagctggacttcgacagccatggcattagccaagtccaggtggtactctttggttttcaagatgctgtcaataaagttcttcggaatcataacatcaagccgcactggatgtttgccttagacagtatcattcggaaggcggtacagacagccattaccatcctggttccagaactaaggccacatttcagccttgcatctgagagtgatactgctgatcaagaagacttggatgtagaagatgaccatgaggaacagccttcaaatcaaactgtccgaagacctcaggctgtcattgaagatgctgtggctacctcaggcgtgagcacgctcagttctactgtgtctcatgattcccagagtgctcaccggtcactgaatgtacagcttggaaggatgaaaatagaaaccaatagattactggaagaattggttcggaaagagaaagaattacaagcactccttcatcgagctattgaagaaaaagaccaagaaattaaacacctgaagcttaagtcccaacccatagaaattcctgaattgcctgtatttcatctaaattcttctggcacaaatactgaagattctgaacttaccgactggctgagagtgaatggagctgatgaagacactataagccggtttttggctgaagattatacactattggatgttctctactatgttacacgtgatgacttaaaatgcttgagactaaggggagggatgctgtgcacactgtggaaggctatcattgactttcgaaacaaacagacttgactgttgctcaatctaatcttcgatggaaattctaaaaattaatacagagctgatcttcttgggggtgggaaaatcgaagggagaggagaaaggcgctgcactttaaatccagtatttgtttactcatgttaaaaaaaaaaaaaacagacaaaacacactgaaatttcctaactacatctatttctataatttttaaggactcttcataaggactcttaaaataatcctgaacattagaaccctaatgttcaggaagattttaatctaagcatttttatggaaatatttttaatgcagcagctattgcacttcagccaaatgtttatttcacacaaaacggatgtaacatttcatgtgatcgtgcaccactggaacaaaaccaaaatgtgaccataactgtttaggcttctgtgtgtttgtaatatgctctaataatctgagtagaaatgcgtaatttcaattactgtataaagtttatgtttttttaagtgtgcagaatctgagagcaatggtttttacttctctgtgttaattgtaatattgactctattttgtaacttaagtttctgacctgtcgtacatttgtttgagtcgtttatgtactactgaactgtaccagttgcacatgcttgaactgtagtaatgttagcttgttctaaagctatccattgtgtcatatttactctaaaaattaaagagactctcaacaaaaaaaaaaaaaaaaaaaaa

SEQ ID NO: 329 - DNA, 2937 bp, human
gggttgcgccagggagccggaaagccgactcccgaagttggggtcctgggaaaacttgggtcctgggttgactgagaagcggcggggaaaggaggcgggccaggaggagggggcctggcggacgccggccggggggcggggcgcggcggggctgtcggtcacgcccctcagtccgccccgccccgccccgcctgccggggaagggccacgttgcccggcccggccgtccggccccggcgcgccgcagaaagggctggcgagtcgaaaggcgaggcggccgcggcagcgcttgggacgcgcctgggcaccgggctcgctccctgcgccccggagcaggccaagttcggggccaggacgtcgggaggacctggtgcatggctgcctcctaatcccatagtccagaggaggcatccctaggactgcgggcaagggagccgggcaagcccagggcagccttgaaccgtcccctggcctgccctccccggtgggggccaggatgctgaagaagcagtctgcagggcttgtgctgtggggcgctatcctctttgtggcctggaatgccctgctgctcctcttcttctggacgcgcccagcacctggcaggccaccctcagtcagcgctctcgatggcgaccccgccagcctcacccgggaagtgattcgcctggcccaagacgccgaggtggagctggagcggcagcgtgggctgctgcagcagatcggggatgccctgtcgagccagcgggggagggtgcccaccgcggcccctcccgcccagccgcgtgtgcctgtgacccccgcgccggcggtgattcccatcctggtcatcgcctgtgaccgcagcactgttcggcgctgcctggacaagctgctgcattatcggccctcggctgagctcttccccatcatcgttagccaggactgcgggcacgaggagacggcccaggccatcgcctcctacggcagcgcggtcacgcacatccggcagcccgacctgagcagcattgcggtgccgccggaccaccgcaagttccagggctactacaagatcgcgcgccactaccgctgggcgctgggccaggtcttccggcagtttcgcttccccgcggccgtggtggtggaggatgacctggaggtggccccggacttcttcgagtactttcgggccacctatccgctgctgaaggccgacccctccctgtggtgcgtctcggcctggaatgacaacggcaaggagcagatggtggacgccagcaggcctgagctgctctaccgcaccgactttttccctggcctgggctggctgctgttggccgagctctgggctgagctggagcccaagtggccaaaggccttctgggacgactggatgcggcggccggagcagcggcaggggcgggcctgcatacgccctgagatctcaagaacgatgacctttggccgcaagggtgtgagccacgggcagttctttgaccagcacctcaagtttatcaagctgaaccagcagtttgtgcacttcacccagctggacctgtcttacctgcagcgggaggcctatgaccgagatttcctcgcccgcgtctacggtgctccccagctgcaggtggagaaagtgaggaccaatgaccggaaggagctgggggaggtgcgggtgcagtatacgggcagggacagcttcaaggctttcgccaaggctctgggtgtcatggatgaccttaagtcgggggttccgagagctggctaccggggtattgtcaccttccagttccggggccgccgtgtccacctggcgcccccaccgacgtgggagggctatgatcctagctggaattagcacctgcctgtccttcctgggcccctccttgccacatcatgagctgaggtgggaccacagtccccaggctgcatcggcctgcctgtgtttccctcttaggtgcatttatctttttgatttttccgagtggcatttaagtgcacaaatgataacaagaggattattctcccgttctcaagggagtcagatcaggggaactattctagggtatgttgcggggtattaagcaggaaaccactgtgtggtggggggcactgggcttgttggggccagaaatgtccacgtcctgagctttctcctggagcatgtgcagagagtttggcaacgttcgctctcttgaccagaccccttctccctgacctggctcttccagccagggcacgagccctccttctatacctgctccccttcccccagtggggactgagttatgggagaaggggacatatttgtggccaaaatgatactaaccaaaggggcttccttgtcagggcctggtggagttggtgggtcatcggggctcactgcctcctgcccttctctcctgtctgacccccacttagcccttctctccttgcagcctagcagtttatagttctgagatggaaagttgaagggggcaagcaagacctctcctcagcccatgcccagctgtcaggagagaggtgcagggaggaaggccttgtgctgggacaacctctctcttgccttacctcagagagggactatgccctgacccctcctttctgaaaatcagtgccctccctgttgctctaggaggctcctgctggcttggtagaagacagaattcgatctgcctgtccctttttcccctggggtttgacacacaggctcctctcagcatgaggtggagcagtgaccaggtggagcagtgaccaggacgcctctggcccagtgctgcccagcctccccgcccgctcccaggcgccccatgtcctcacaggccaggacgccatggcaggatggagaggacttggtggatttttgtttcttgcctgacctcagtttcatgaaagaaagtggaagctacagaattattttctaaaataaaggctgaattgtctgaaaaaaaaaaaaaaaaa

SEQ ID NO: 330 - DNA, 953 bp, human
agtccctgcattgcgcgcgacccggcggcgggacaggcttgctgcttcctcctcctcggcctcaccattccagaccaaaattgaaaaaatggttgacctcacccaggtaatggatgatgaagtattcatggcttttgcatcctatgcaacaattattctttcaaaaatgatgcttatgagtactgcaactgcattctatagattgacaagaaaggtttttgccaatccagaagactgtgtagcatttggcaaaggagaaaatgccaagaagtatcttcgaacagatgacagagtagaacgtgtacgcagagcccacctgaatgaccttgaaaatattattccatttcttggaattggcctcctgtattccttgagtggtcccgacccctctacagccatcctgcacttcagactatttgtcggagcacggatctaccacaccattgcatatttgacaccccttccccagccaaatagagctttgagtttttttgttggatatggagttactctttccatggcttacaggttgctgaaaagtaaattgtacctgtaaagaaaatcatacaactcagcatccagttggctttttaagaattctgtacttccaatttataatgaatactttcttagattttaggtaggaggggagcagaggaattatgaactggggtaaacccattttgaatattagcattgccaatatcctgtattcttgttttacatttggattagaaatttaacatagtaattcttaagtcttttgtctgatttttaaagtactttcttataaatttggatcatgttatgatttgtaacattcacacaacacctcacttttgaatctataaaagaattgcacgtatgagaaacctatatttcaatactgctgaaacagacatgaaataaagaatttaaagaatcaaaaaaaaaaaaaaaaaaaaaaaaaaaaa

SEQ ID NO: 331 - DNA, 2392 bp, human
gcggagcgcgcgctcccagcgaaagcagcagggcagggatctgcgttggaggaagggactgctctggtgctagaatgctgtgcgtcggaaggctgggcggcttgggagccagagcagcagctctgccgccccgccgggcgggccggggaagcctcgaagccgggatccgggcccgaagggtcagcaccagctggtctcccgtgggcgccgccttcaatgtcaagccccagggcagccgcttggacctgttcggcgagcgggcgcgtctttttggagttcctgagctgagtgccccagaaggatttcatattgcacaagaaaaagccttgagaaagacagaattgcttgtggaccgtgcatgttccaccccacctgggccccagaccgtgctgatcttcgatgagctctcggattccttatgcagagtggccgacttggctgattttgtgaaaatcgctcaccctgagccagcattcagagaagctgcggaagaagcttgtagaagtattggcaccatggtagagaagttgaacacaaatgtggatttatatcaaagtttgcaaaaattactagctgataaaaaacttgtggattcccttgatccagaaacaaggcgagtggctgaactgtttatgtttgattttgaaattagtggaatccatctagacaaacaaaagcgtaaaagagcagtggacctcaatgttaaaatcttggatttgagtagtacatttcttatgggaaccaattttcccaacaagattgagaagcatctcttaccagaacacattcgtcgtaactttacatctgctggggatcatatcataattgatggtctccacgcagaatcaccagatgacttggtgcgagaagctgcttataaaatttttctttatcccaatgctggtcaattgaaatgtttagaagaattgctcagcagcagagatcttctggcaaagttggtggggtattccacgttttctcacagggctctccaaggaacgatagctaaaaatccagagactgtcatgcagttccttgaaaaactatctgacaaactttctgaaagaactctgaaagattttgagatgatacgagggatgaaaatgaaactgaatgctcaaaattccgaagtaatgccctgggaccccccttactacagtggtgtgattcgtgcagaaaggtataatattgagcccagcctatattgcccgtttttctctcttggagcatgcatggaaggcctgaatattttgcttaacagactgttggggatttcattatatgcagagcagcctgcaaaaggagaggtgtggagcgaagatgtccgaaaactggctgttgttcatgaatctgaaggattgttggggtacatttactgtgatttttttcagcgagcagacaaaccacatcaggattgccatttcactatccgtggaggcagactaaaggaagatggagactatcaactcccacttgtagttcttatgctgaatcttccccgttcctcaaggagttctccaactttgctaactcctggcatgatggaaaatcttttccatgaaatgggacatgccatgcattcaatgctaggacgtactcgttaccaacacgtcactgggaccaggtgccctactgattttgctgaggttccttctattctgatggagtactttgcaaatgattatcgagtagttaaccaatttgccagacattatcagactggacagccactgccaaaaaatatggtgtctcgtctttgtgaatctaaaaaggtttgtgctgcagctgatatgcaacttcaggtcttttatgccactctggatcaaatctaccatgggaagcatcccctgaggaattcaaccacagacattctcaaggaaacacaagagaaattctatggcctaccatatgttccaaatactgcctggcagctgcgattcagccacctcgtggggtatggtgctagatattactcttacctcatgtccagagcggtcgcctccatggtttggaaggagtgttttctacaggatcctttcaacagggctgccggggagcgctatcgcagggagatgctggcccacggtggaggcagggagcccatgctcatggttgaaggtatgcttcagaagtgtccttctgttgatgacttcgtaagtgccctcgtttccgacttggatctggacttcgaaactttcctcatggattctgaataaaagaaacactctacacctctaatcaaggtcatgtagtaatgactttgttataaatgctacagctgtgagagcttgtttctgattgtttcattgttcgcttctgtaattctgaaaaactttaaactggtagaacttggaataaataatttgttttaattaaaaaaaaaaaaaaaaaa

SEQ ID NO: 332 - DNA, 11910 bp, human
  misc_feature 89: n = A,T,C or G
atggcgcacagctgtcggtggcgcttccccgcccgacccgggaccaccgggggcggcggcggcggggggcgccggggcctagggggcgncccgcggcaacgcgtcccggccctgctgcttccccccgggcccccggtcggcggtggcggccccggggcgcccccctcccccccggctgtggcggccgcggcggcggcggcgggaagcagcggggctggggttccagggggagcggccgccgcctcagcagcctcctcgtcgtccgcctcgtcttcgtcttcgtcatcgtcctcagcctcttcagggccggccctgctccgggtgggcccgggcttcgacgcggcgctgcaggtctcggccgccatcggcaccaacctgcgccggttccgggccgtgtttggggagagcggcgggggaggcggcagcggagaggatgagcaattcttaggttttggctcagatgaagaagtcagagtgcgaagtcccacaaggtctccttcagttaaaactagtcctcgaaaacctcgtgggagacctagaagtggctctgaccgaaattcagctatcctctcagatccatctgtgttttcccctctaaataaatcagagaccaaatctggagataagatcaagaagaaagattctaaaagtatagaaaagaagagaggaagacctcccaccttccctggagtaaaaatcaaaataacacatggaaaggacatttcagagttaccaaagggaaacaaagaagatagcctgaaaaaaattaaaaggacaccttctgctacgtttcagcaagccacaaagattaaaaaattaagagcaggtaaactctctcctctcaagtctaagtttaagacagggaagcttcaaataggaaggaagggggtacaaattgtacgacggagaggaaggcctccatcaacagaaaggataaagaccccttcggtctcctcattaattctgaactggaaaagccccagaaagtccggaaagacaaggaaggaacacctccacttacaaaagaagataagacagttgtcagacaaagccctcgaaggattaagccagttaggattattccttcttcaaaaaggacagatgcaaccattgctaagcaactcttacagagggcaaaaaaagggggctcaaaagaaaattgaaaaagaagcagctcagctgcagggaagaaaggtgaagacacaggtcaaaaatattcgacagttcatcatgcctgttgtcagtgctatctcctcgcggatcattaagacccctcggcggtttatagaggatgaggattatgaccctccaattaaaattgcccgattagagtctacaccgaatagtagattcagtgccccgtcctgtggatcttctgaaaaatcaagtgcagcttctcagcactcctctcaaatgtcttcagactcctctcgatctagtagccccagtgttgatacctccacagactctcaggcttctgaggagattcaggtacttcctgaggagcggagcgatacccctgaagttcatcctccactgcccatttcccagtccccagaaaatgagagtaatgataggagaagcagaaggtattcagtgtcggagagaagttttggatctagaacgacgaaaaaattatcaactctacaaagtgccccccagcagcagacctcctcgtctccacctccacctctgctgactccaccgccaccactgcagccagcctccagtatctctgaccacacaccttggcttatgcctccaacaatccccttagcatcaccatttttgcctgcttccactgctcctatgcaagggaagcgaaaatctattttgcgagaaccgacatttaggtggacttctttaaagcattctaggtcagagccacaatacttttcctcagcaaagtatgccaaagaaggtcttattcgcaaaccaatatttgataatttccgaccccctccactaactcccgaggacgttggctttgcatctggtttttctgcatctggtaccgctgcttcagcccgattgttttcgccactccattctggaacaaggtttgatatgcacaaaaggagccctcttctgagagctccaagatttactccaagtgaggctcactctagaatatttgagtctgtaaccttgcctagtaatcgaacttctgctggaacatcttcttcaggagtatccaatagaaaaaggaaaagaaaagtgtttagtcctattcgatctgaaccaagatctccttctcactccatgaggacaagaagtggaaggcttagtagttctgagctctcacctctcacccccccgtcttctgtctcttcctcgttaagcatttctgttagtcctcttgccactagtgccttaaacccaacttttacttttccttctcattccctgactcagtctggggaatctgcagagaaaaatcagagaccaaggaagcagactagtgctccggcagagccattttcatcaagtagtcctactcctctcttcccttggtttaccccaggctctcagactgaaagagggagaaataaagacaaggcccccgaggagctgtccaaagatcgagatgctgacaagagcgtggagaaggacaagagtagagagagagaccgggagagagaaaaggagaataagcgggagtcaaggaaagagaaaaggaaaaagggatcagaaattcagagtagttctgctttgtatcctgtgggtagggtttccaaagagaaggttgttggtgaagatgttgccacttcatcttctgccaaaaaagcaacagggcggaagaagtcttcatcacatgattctgggactgatattacttctgtgactcttggggatacaacagctgtcaaaaccaaaatacttataaagaaagggagaggaaatctggaaaaaaccaacttggacctcggcccaactgccccatccctggagaaggagaaaaccctctgcctttccactccttcatctagcactgttaaacattccacttcctccataggctccatgttggctcaggcagacaagcttccaatgactgacaagagggttgccagcctcctaaaaaaggccaaagctcagctctgcaagattgagaagagtaagagtcttaaacaaaccgaccagcccaaagcacagggtcaagaaagtgactcatcagagacctctgtgcgaggaccccggattaaacatgtctgcagaagagcagctgttgcccttggccgaaaacgagctgtgtttcctgatgacatgcccaccctgagtgccttaccatgggaagaacgagaaaagattttgtcttccatggggaatgatgacaagtcatcaattgctggctcagaagatgctgaacctcttgctccacccatcaaaccaattaaacctgtcactagaaacaaggcaccccaggaacctccagtaaagaaaggacgtcgatcgaggcggtgtgggcagtgtcccggctgccaggtgcctgaggactgtggtgtttgtactaattgcttagataagcccaagtttggtggtcgcaatataaagaagcagtgctgcaagatgagaaaatgtcagaatctacaatggatgccttccaaagcctacctgcagaagcaagctaaagctgtgaaaaagaaagagaaaaagtctaagaccagtgaaaagaaagacagcaaagagagcagtgttgtgaagaacgtggtggactctagtcagaaacctaccccatcagcaagagaggatcctgccccaaagaaaagcagtagtgagcctcctccacgaaagcccgtcgaggaaaagagtgaagaagggaatgtctcggcccctgggcctgaatccaaacaggccaccactccagcttccaggaagtcaagcaagcaggtctcccagccagcactggtcatcccgcctcagccacctactacaggaccgccaagaaaagaagttcccaaaaccactcctagtgagcccaagaaaaagcagcctccaccaccagaatcaggtccagagcagagcaaacagaaaaaagtggctccccgcccaagtatccctgtaaaacaaaaaccaaaagaaaaggaaaaaccacctccggtcaataagcaggagaatgcaggcactttgaacatcctcagcactctctccaatggcaatagttctaagcaaaaaattccagcagatggagtccacaggatcagagtggactttaaggaggattgtgaagcagaaaatgtgtgggagatgggaggcttaggaatcttgacttctgttcctataacacccagggtggtttgctttctctgtgccagtagtgggcatgtagagtttgtgtattgccaagtctgttgtgagcccttccacaagttttgtttagaggagaacgagcgccctctggaggaccagctggaaaattggtgttgtcgtcgttgcaaattctgtcacgtttgtggaaggcaacatcaggctacaaagcagctgctggagtgtaataagtgccgaaacagctatcaccctgagtgcctgggaccaaactaccccaccaaacccacaaagaagaagaaagtctggatctgtaccaagtgtgttcgctgtaagagctgtggatccacaactccaggcaaagggtgggatgcacagtggtctcatgatttctcactgtgtcatgattgcgccaagctctttgctaaaggaaacttctgccctctctgtgacaaatgttatgatgatgatgactatgagagtaagatgatgcaatgtggaaagtgtgatcgctgggtccattccaaatgtgagaatctttcagatgagatgtatgagattctatctaatctgccagaaagtgtggcctacacttgtgtgaactgtactgagcggcaccctgcagagtggcgactggcccttgaaaaagagctgcagatttctctgaagcaagttctgacagctttgttgaattctcggactaccagccatttgctacgctaccggcaggctgccaagcctccagacttaaatcccgagacagaggagagtataccttcccgcagctcccccgaaggacctgatccaccagttcttactgaggtcagcaaacaggatgatcagcagcctttagatctagaaggagtcaagaggaagatggaccaagggaattacacatctgtgttggagttcagtgatgatattgtgaagatcattcaagcagccattaattcagatggaggacagccagaaattaaaaaagccaacagcatggtcaagtccttcttcattcggcaaatggaacgtgtttttccatggttcagtgtcaaaaagtccaggttttgggagccaaataaagtatcaagcaacagtgggatgttaccaaacgcagtgcttccaccttcacttgaccataattatgctcagtggcaggagcgagaggaaaacagccacactgagcagcctcctttaatgaagaaaatcattccagctcccaaacccaaaggtcctggagaaccagactcaccaactcctctgcatcctcctacaccaccaattttgagtactgataggagtcgagaagacagtccagagctgaacccacccccaggcatagaagacaatagacagtgtgcgttatgtttgacttatggtgatgacagtgctaatgatgctggtcgtttactatatattggccaaaatgagtggacacatgtaaattgtgctttgtggtcagcggaagtgtttgaagatgatgacggatcactaaagaatgtgcatatggctgtgatcaggggcaagcagctgagatgtgaattctgccaaaagccaggagccaccgtgggttgctgtctcacatcctgcaccagcaactatcacttcatgtgttcccgagccaagaactgtgtctttctggatgataaaaaagtatattgccaacgacatcgggatttgatcaaaggcgaagtggttcctgagaatggatttgaagttttcagaagagtgtttgtggactttgaaggaatcagcttgagaaggaagtttctcaatggcttggaaccagaaaatatccacatgatgattgggtctatgacaatcgactgcttaggaattctaaatgatctctccgactgtgaagataagctctttcctattggatatcagtgttccagggtatactggagcaccacagatgctcgcaagcgctgtgtatatacatgcaagatagtggagtgccgtcctccagtcgtagagccggatatcaacagcactgttgaacatgatgaaaacaggaccattgcccatagtccaacatcttttacagaaagttcatcaaaagagagtcaaaacacagctgaaattataagtcctccatcaccagaccgacctcctcattcacaaacctctggctcctgttattatcatgtcatctcaaaggtccccaggattcgaacacccagttattctccaacacagagatcccctggctgtcgaccgttgccttctgcaggaagtcctaccccaaccactcatgaaatagtcacagtaggtgatcctttactctcctctggacttcgaagcattggctccaggcgtcacagtacctcttccttatcaccccagcggtccaaactccggataatgtctccaatgagaactgggaatacttactctaggaataatgtttcctcagtctccaccaccgggaccgctactgatcttgaatcaagtgccaaagtagttgatcatgtcttagggccactgaattcaagtactagtttagggcaaaacacttccacctcttcaaatttgcaaaggacagtggttactgtaggcaataaaaacagtcacttggatggatcttcatcttcagaaatgaagcagtccagtgcttcagacttggtgtccaagagctcctctttaaagggagagaagaccaaagtgctgagttccaagagctcagagggatctgcacataatgtggcttaccctggaattcctaaactggccccacaggttcataacacaacatctagagaactgaatgttagtaaaatcggctcctttgctgaaccctcttcagtgtcgttttcttctaaagaggccctctccttcccacacctccatttgagagggcaaaggaatgatcgagaccaacacacagattctacccaatcagcaaactcctctccagatgaagatactgaagtcaaaaccttgaagctatctggaatgagcaacagatcatccattatcaacgaacatatgggatctagttccagagataggagacagaaagggaaaaaatcctgtaaagaaactttcaaagaaaagcattccagtaaatcttttttggaacctggtcaggtgacaactggtgaggaaggaaacttgaagccagagtttatggatgaggttttgactcctgagtatatgggccaacgaccatgtaacaatgtttcttctgataagattggtgataaaggcctttctatgccaggagtccccaaagctccacccatgcaagtagaaggatctgccaaggaattacaggcaccacggaaacgcacagtcaaagtgacactgacacctctaaaaatggaaaatgagagtcaatccaaaaatgccctgaaagaaagtagtcctgcttcccctttgcaaatagagtcaacatctcccacagaaccaatttcagcctctgaaaatccaggagatggtccagtggcccaaccaagccccaataatacctcatgccaggattctcaaagtaacaactatcagaatcttccagtacaggacagaaacctaatgcttccagatggccccaaacctcaggaggatggctcttttaaaaggaggtatccccgtcgcagtgcccgtgcacgttctaacatgttttttgggcttaccccactctatggagtaagatcctatggtgaagaagacattccattctacagcagctcaactgggaagaagcgaggcaagagatcagctgaaggacaggtggatggggccgatgacttaagcacttcagatgaagacgacttatactattacaacttcactagaacagtgatttcttcaggtggagaggaacgactggcatcccataatttatttcgggaggaggaacagtgtgatcttccaaaaatctcacagttggatggtgttgatgatgggacagagagtgatactagtgtcacagccacaacaaggaaaagcagccagattccaaaaagaaatggtaaagaaaatggaacagagaacttaaagattgatagacctgaagatgctggggagaaagaacatgtcactaagagttctgttggccacaaaaatgagccaaagatggataactgccattctgtaagcagagttaaaacacagggacaagattccttggaagctcagctcagctcattggagtcaagccgcagagtccacacaagtaccccctccgacaaaaatttactggacacctataatactgagctcctgaaatcagattcagacaataacaacagtgatgactgtgggaatatcctgccttcagacattatggactttgtactaaagaatactccatccatgcaggctttgggtgagagcccagagtcatcttcatcagaactcctgaatcttggtgaaggattgggtcttgacagtaatcgtgaaaaagacatgggtctttttgaagtattttctcagcagctgcctacaacagaacctgtggatagtagtgtctcttcctctatctcagcagaggaacagtttgagttgcctctagagctaccatctgatctgtctgtcttgaccacccggagtcccactgtccccagccagaatcccagtagactagctgttatctcagactcaggggagaagagagtaaccatcacagaaaaatctgtagcctcctctgaaagtgacccagcactgctgagcccaggagtagatccaactcctgaaggccacatgactcctgatcattttatccaaggacacatggatgcagaccacatctctagccctccttgtggttcagtagagcaaggtcatggcaacaatcaggatttaactaggaacagtagcacccctggccttcaggtacctgtttccccaactgttcccatccagaaccagaagtatgtgcccaattctactgatagtcctggcccgtctcagatttccaatgcagctgtccagaccactccaccccacctgaagccagccactgagaaactcatagttgttaaccagaacatgcagccactttatgttctccaaactcttccaaatggagtgacccaaaaaatccaattgacctcttctgttagttctacacccagtgtgatggagacaaatacttcagtattgggacccatgggaggtggtctcacccttaccacaggactaaatccaagcttgccaacttctcaatctttgttcccttctgctagcaaaggattgctacccatgtctcatcaccagcacttacattccttccctgcagctactcaaagtagtttcccaccaaacatcagcaatcctccttcaggcctgcttattggggttcagcctcctccggatccccaacttttggtttcagaatccagccagaggacagacctcagtaccacagtagccactccatcctctggactcaagaaaagacccatatctcgtctacagacccgaaagaataaaaaacttgctccctctagtaccccttcaaacattgccccttctgatgtggtttctaatatgacattgattaacttcacaccctcccagcttcctaatcatccaagtctgttagatttggggtcacttaatacttcatctcaccgaactgtccccaacatcataaaaagatctaaatctagcatcatgtattttgaaccggcacccctgttaccacagagtgtgggaggaactgctgccacagcggcaggcacatcaacaataagccaggatactagccacctcacatcagggtctgtgtctggcttggcatccagttcctctgtcttgaatgttgtatccatgcaaactaccacaacccctacaagtagtgcgtcagttccaggacacgtcaccttaaccaacccaaggttgcttggtaccccagatattggctcaataagcaatcttttaatcaaagctagccagcagagcctggggattcaggaccagcctgtggctttaccgccaagttcaggaatgtttccacaactggggacatcacagaccccctctactgctgcaataacagcggcatctagcatctgtgtgctcccctccactcagactacgggcataacagccgcttcaccttctggggaagcagacgaacactatcagcttcagcatgtgaaccagctccttgccagcaaaactgggattcattcttcccagcgtgatcttgattctgcttcagggccccaggtatccaactttacccagacggtagacgctcctaatagcatgggactggagcagaacaaggctttatcctcagctgtgcaagccagccccacctctcctgggggttctccatcctctccatcttctggacagcggtcagcaagcccttcagtgccgggtcccactaaacccaaaccaaaaaccaaacggtttcagctgcctctagacaaagggaatggcaagaagcacaaagtttcccatttgcggaccagttcttctgaagcacacattccagaccaagaaacgacatccctgacctcaggcacagggactccaggagcagaggctgagcagcaggatacagctagcgtggagcagtcctcccagaaggagtgtgggcaacctgcagggcaagtcgctgttcttccggaagttcaggtgacccaaaatccagcaaatgaacaagaaagtgcagaacctaaaacagtggaagaagaggaaagtaatttcagctccccactgatgctttggcttcagcaagaacaaaagcggaaggaaagcattactgagaaaaaacccaagaaaggacttgtttttgaaatttccagtgatgatggctttcagatctgtgcagaaagtattgaagatgcctggaagtcattgacagataaagtccaggaagctcgatcaaatgcccgcctaaagcagctctcatttgcaggtgttaacggtttgaggatgctggggattctccatgatgcagttgtgttcctcattgagcagctgtctggtgccaagcactgtcgaaattacaaattccgtttccacaagccagaggaggccaatgaaccccccttgaaccctcacggctcagccagggctgaagtccacctcaggaagtcagcatttgacatgtttaacttcctggcttctaaacatcgtcagcctcctgaatacaaccccaatgatgaagaagaggaggaggtacagctgaagtcagctcggagggcaactagcatggatctgccaatgcccatgcgcttccggcacttaaaaaagacttctaaggaggcagttggtgtctacaggtctcccatccatggccggggtcttttctgtaagagaaacattgatgcaggtgagatggtgattgagtatgccggcaacgtcatccgctccatccagactgacaagcgggaaaagtattacgacagcaagggcattggttgctatatgttccgaattgatgactcagaggtagtggatgccaccatgcatggaaatcgtgcacgcttcatcaatcactcgtgtgagcctaactgctattctcgggtcatcaatattgatgggcagaagcacattgtcatctttgccatgcgtaagatctaccgaggagaggaactcacttacgactataagttccccattgaggatgccagcaacaagctgccctgcaactgtggcgccaagaaatgccggaagttcctaaactaa

SEQ ID NO: 333 - DNA, 3558 bp, human
cagaccccagttcgccgactaagcagaagaaagatcaaaaaccggaaaagaggagaagagcaaacaggcactttgaggaacaatcccctttaactccaagccgacagcggtctaggaattcaagttcagtgcctaccgaagacaaaggcgccccgagggagtggcggtgcgaccccagggcgtgggcccggccgcggagcccacactgcccggctgacccggtggtctcggaccatgtctcccgccccaagacccccccgttgtctcctgctccccctgctcacgctcggcaccgcgctcgcctccctcggctcggcccaaagcagcagcttcagccccgaagcctggctacagcaatatggctacctgcctcccggggacctacgtacccacacacagcgctcaccccagtcactctcagcggccatcgctgccatgcagaagttttacggcttgcaagtaacaggcaaagctgatgcagacaccatgaaggccatgaggcgcccccgatgtggtgttccagacaagtttggggctgagatcaaggccaatgttcgaaggaagcgctacgccatccagggtctcaaatggcaacataatgaaatcactttctgcatccagaattacacccccaaggtgggcgagtatgccacatacgaggccattcgcaaggcgttccgcgtgtgggagagtgccacaccactgcgcttccgcgaggtgccctatgcctacatccgtgagggccatgagaagcaggccgacatcatgatcttctttgccgagggcttccatggcgacagcacgcccttcgatggtgagggcggcttcctggcccatgcctacttcccaggccccaacattggaggagacacccactttgactctgccgagccttggactgtcaggaatgaggatctgaatggaaatgacatcttcctggtggctgtgcacgagctgggccatgccctggggctcgagcattccagtgacccctcggccatcatggcacccttttaccagtggatggacacggagaattttgtgctgcccgatgatgaccgccggggcatccagcaactttatgggggtgagtcagggttccccaccaagatgccccctcaacccaggactacctcccggccttctgttcctgataaacccaaaaaccccacctatgggcccaacatctgtgacgggaactttgacaccgtggccatgctccgaggggagatgtttgtcttcaaggagcgctggttctggcgggtgaggaataaccaagtgatggatggatacccaatgcccattggccagttctggcggggcctgcctgcgtccatcaacactgcctacgagaggaaggatggcaaattcgtcttcttcaaaggagacaagcattgggtgtttgatgaggcgtccctggaacctggctaccccaagcacattaaggagctgggccgagggctgcctaccgacaagattgatgctgctctcttctggatgcccaatggaaagacctacttcttccgtggaaacaagtactaccgtttcaacgaagagctcagggcagtggatagcgagtaccccaagaacatcaaagtctgggaagggatccctgagtctcccagagggtcattcatgggcagcgatgaagtcttcacttacttctacaaggggaacaaatactggaaattcaacaaccagaagctgaaggtagaaccgggctaccccaagtcagccctgagggactggatgggctgcccatcgggaggccggccggatgaggggactgaggaggagacggaggtgatcatcattgaggtggacgaggagggcggcggggcggtgagcgcggctgccgtggtgctgcccgtgctgctgctgctcctggtgctggcggtgggccttgcagtcttcttcttcagacgccatgggacccccaggcgactgctctactgccagcgttccctgctggacaaggtctgacgcccaccgccggcccgcccactcctaccacaaggactttgcctctgaaggccagtggcagcaggtggtggtgggtgggctgctcccatcgtcccgagccccctccccgcagcctccttgcttctctctgtcccctggctggcctccttcaccctgaccgcctccctccctcctgccccggcattgcatcttccctagataggtcccctgagggctgagtgggagggcggccctttccagcctctgcccctcaggggaaccctgtagctttgtgtctgtccagccccatctgaatgtgttgggggctctgcacttgaaggcaggaccctcagacctcgctggtaaaggtcaaatggggtcatctgctccttttccatcccctgacataccttaacctctgaactctgacctcaggaggctctgggcactccagccctgaaagccccaggtgtacccaattggcagcctctcactactctttctggctaaaaggaatctaatcttgttgagggtagagaccctgagacagtgtgagggggtggggactgccaagccaccctaagaccttgggaggaaaactcagagagggtcttcgttgctcagtcagtcaagttcctcggagatctgcctctgcctcacctaccccagggaacttccaaggaaggagcctgagccactggggactaagtgggcagaagaaacccttggcagccctgtgcctctcgaatgttagccttggatggggctttcacagttagaagagctgaaaccaggggtgcagctgtcaggtagggtggggccggtgggagaggcccgggtcagagccctgggggtgagcctgaaggccacagagaaagaaccttgcccaaactcaggcagctggggctgaggcccaaaggcagaacagccagagggggcaggaggggaccaaaaaggaaaatgaggacgtgcagcagcattggaaggctggggccgggcaggccaggccaagccaagcagggggccacagggtgggctgtggagctctcaggaagggccctgaggaaggcacacttgctcctgttggtccctgtccttgctgcccaggcagcgtggaggggaagggtagggcagccagagaaaggagcagagaaggcacacaaacgaggaatgaggggcttcacgagaggccacagggcctggctggccacgctgtcccggcctgctcaccatctcagtgaggggcaggagctggggctcgcttaggctgggtccacgcttccctggtgccagcacccctcaagcctgtctcaccagtggcctgccctctcgctcccccacccagcccacccattgaagtctccttgggccaccaaaggtggtggccatggtaccggggacttgggagagtgagacccagtggagggagcaagaggagagggatgtcgggggggtggggcacggggtaggggaaatggggtgaacggtgctggcagttcggctagatttctgtcttgtttgtttttttgttttgtttaatgtatatttttattataattattatatatgaattccaaaaaaaaaaaaaaaaaaaaa

SEQ ID NO: 334 - DNA, 2183 bp, human
ccaatgaggaagcctggcaggatggagggcgaggcctggcagctgtagtgcttctgggcagtagaggcgcggggtgcggagctagggcggccgagagccatggcggcgctattggcggcggcggcagtgcgagcccggatcctgcaggtttcttccaaggtgaaatccagtcccacctggtattcagcatcttccttctcttcttcagtgccaactgtaaagctcttcattggtgggaaattcgttgaatccaaaagtgacaaatggatcgatatccacaacccagccaccaatgaggtcattggtcgggtccctcaggccaccaaggcagaaatggatgcagccattgcttcctgcaaacgtgcttttcctgcatgggcagacacttcagtattaagccgccagcaggtcttgctccgctatcaacaacttattaaagaaaacttgaaagaaattgccaagttaatcacattggaacaagggaagaccctagctgatgctgaaggagatgtatttcgaggccttcaggtggttgagcatgcctgtagtgtgacatccctcatgatgggagagaccatgccatccatcaccaaagacatggacctttattcctaccgtctgcctctgggagtgtgtgcaggcattgctccattcaattttcctgccatgatccccctttggatgtttcccatggccatggtgtgtggaaataccttcctaatgaaaccatctgagcgagtccctggagcaactatgcttcttgctaagttgctccaggattctggtgcccctgatggaacattaaacatcatccatggacagcatgaagctgtaaattttatttgcgatcatccggacatcaaagcaatcagctttgtgggatccaacaaggcaggagagtatatcttcgagagaggatcaagacatggcaagagggttcaagccaatatgggagccaagaaccatggggtagtcatgccagatgccaataaggaaaataccctgaaccagctggttggggcagcatttggagctgctggtcagcgctgcatggctctttcaacagcagtccttgtgggagaagccaagaagtggctgccagagctggtggagcatgccaaaaacctgagagtcaatgcaggagatcagcctggagctgatcttggccctctgatcactccccaggccaaagagcgagtctgtaatctgattgatagtggaacaaaggagggagcttccatccttcttgatggacgaaaaattaaagtgaaaggctatgaaaatggcaactttgttggaccaaccatcatctcgaatgtcaagccaaatatgacctgttacaaagaggagatttttggtccagttcttgtggttctggagacagaaacattggatgaagccatccagattgtaaataacaacccatatggaaatggaactgccatcttcaccaccaatggagccactgctcggaaatatgcccacttggtggatgttggacaggtgggagtgaatgtccccattccagtgcctttgccaatgttctcattcaccggctctcgatcctccttcaggggagacaccaatttctatggcaaacagggcatccaattctacactcagttaaagaccattacttctcagtggaaagaagaagatgctactctttcctcacctgctgttgtcatgcctaccatgggccgttagaaacaagtttgtttaagactgactccatcctgagtaatctccctttatttttgaccagcttcatttgtcagctttgctcagatcagatcgatgggattggaatacattgtaactaaaatcttcctcaggactattaacccccgcaaagtttctatagggaactgcctagtgtaacaatgaaaccagatttctcacttgctcttcatacttctattttgaggtaactgttgtaactatgaaatgcttatctgaaagtagtgcttaaacctgatttctaaaaattatcccattttctgatgatttgaaggggagaaaagccagtgtatgtaaagaaaatgttccagccaggcgcggtggctcacgcctgtaattccatcattttgggaggccacagtgggcagattgcttgagcccaggagttgaagaacgtggcgaaaccccgtatctattatttaaaaaaattgaaaaagtaaaaa

SEQ ID NO: 335 - DNA, 3302 bp, human
cggtgctgccgccgttgccgggagccgcggagacaagtcattacgttttcatttctcacaactgggctgagcacaactgaaccatgggggaacacagtccagacaacaacatcatctactttgaggcagaggaagatgagctgacccccgatgataaaatgctcaggtttgtggataaaaacggactggtgccttcctcatctggaactgtttatgataggaccactgttcttattgagcaggaccctggcactttggaggatgaagatgacgacggacagtgcggagaacacttgccttttctagtagggggtgaagagggctttcacctgatagatcatgaagcaatgtcccagggttatgtgcagcacattatctcaccagatcagattcatttgacaataaaccctggttccacacccatgccaagaaatattgaaggtgcaaccctcactctgcagtcggaatgtccggaaacaaaacgtaaagaagtaaagcggtaccaatgtacctttgagggctgtccccgcacctacagcacagcaggcaacctgcgaacccaccagaagactcaccgaggagagtacacctttgtctgtaatcaggagggctgtggcaaagccttccttacctctcacagcctcaggatccacgtgcgagtgcacacgaaggagaagccatttgagtgtgacgtgcagggctgtgagaaggcattcaacacactgtacaggctgaaagcacatcagaggcttcacacagggaaaacgtttaactgtgaatctgaaggctgcagcaaatacttcaccacactcagtgatctgaggaagcacattcgaactcatacaggggaaaagccatttcggtgcgatcacgatggctgtggaaaagcatttgcagcaagccaccaccttaaaactcacgttcgtacacatactggtgaaagacccttcttctgccccagtaatggctgtgagaaaacattcagcactcaatacagtctcaaaagtcacatgaaaggtcatgataacaaaggacactcatacaatgcacttccacaacacaatggatcagaggatacaaatcactcactttgtctaagtgacttgagccttctgtccacagattctgaattgcgagaaaattccagtacgacccagggccaggacctcagcacaatttcaccagcaatcatctttgaatcaatgttccagaattcagatgatacggcaattcaggaagatcctcaacagacagcttccttgactgaaagttttaatggtgatgcagagtcagtcagtgatgttccgccatccacaggaaattcagcatctttatctcttccacttgtactgcaacctggcctctccgagccaccccagcctctactacctgcctcagctccgtctgctcctccgcctgctccctccctaggacctggctcccagcaagctgcatttggcaacccccctgctctcttacaacctccagaagtgcctgttccccacagcacacagtttgctgctaatcatcaagagtttcttccgcacccccaggcaccgcagcccattgtaccaggactttctgttgttgctggggcttctgcatcagcagcggcagtggcatcagctgtggcagcaccagccccaccacaaagtactactgagcccctgccagccatggtccagactctgcccctgggtgccaactctgtcctaactaataatcccacaataaccatcaccccaactcccaacacagctatcctgcagtccagcctagtcatgggagaacagaacttacaatggatattaaatggtgccaccagttctccacaaaaccaagaacaaattcagcaagcatctaaagttgagaaggtgttttttaccactgcagtaccagtagccagtagcccagggagctctgtccagcagattggcctcagtgttcctgtgatcatcatcaaacaagaagaggcatgtcagtgtcagtgtgcatgccgggactctgcaaaggagcgggcatccagcaggagaaagggctgctcctccccaccccctccagagccgagcccccaggctcctgatgggcccagcctgcagctcccagcgcagactttctcttcagcccctgttcccgggtcatcatcctctaccttgccctcctcctgtgagcaaagccgacaagcagagactccttcagaccctcagacagaaacattaagtgccatggatgtgtcagagtttctatccctccagagcctggacaccccgtccaatctgattcccattgaagcactactgcagggggaggaggagatgggcctcaccagcagcttctccaagtgaagggcccatgtgtgctcacctctgggaaaagcgggtgagcaggaggcatgaggtacaatgcctgccatcatgggtcagaaatttgaaggatgaagaaatctactgtttgaaatcctcacctttcagacgtattttctttattcacatcccaggagcatccattttaaggaactattctttggaaaaaaacaaaaaacaaaaaaaacaacaaaaaaagctaagttataagtgaactgtttggctgcactgtatgtcacttttgcttgttgtcatgtgaacttggaaactaaggttactcgtgtgcataaaaattctaaatgaaagggtgtggtttccatcaatctgatgctgcccatcgcttgcactggggtctttgtggatcgggcaggagttttcagtgtgttgggtgttgctccttcctatgtgtcttttgaatctgaggctgacatttgcttggaaggccagacccttgctccatcagagagggcagtggcaaaggccagtgaggcagctgtgagttggacagggttcaggtgagatggtgttgtcatttgtgcttagtgttggtggtgctcagggtggataacacgggtcgttctgcagcccgcttcagcacaaataggcagcttaaggcctggctcacaggctgtggggttgatctggctctgcagaggccctaggcagcttgttgactgctgtctgttgatgacgtgtgtgcaaagcaggctctagcaacatgatcactgtccttgccttcctggttctttctctcggttggttgccagggcttgcagatcgcagtgaattttccttggggaacatcgctgttttgtcctagagtgaacttgtggcttatggccagtgctgtttggtggtctgccttctttttaatggtattttcttcctcagagcagaagggctgcattttgcttatcagaagaaggtgcagatttaagg

SEQ ID NO: 336 - DNA, 3110 bp, human
gtggaacctcgatattggtggtgtccatcgtgggcagcggactaataaaggccatggcgccagcagaaatcctgaacgggaaggagatctccgcgcaaataagggcgagactgaaaaatcaagtcactcagttgaaggagcaagtacctggtttcacaccacgcctggcaatattacaggttggcaacagagatgattccaatctttatataaatgtgaagctgaaggctgctgaagagattgggatcaaagccactcacattaagttaccaagaacaaccacagaatctgaggtgatgaagtacattacatctttgaatgaagactctactgtacatgggttcttagtgcagctacctttagattcagagaattccattaacactgaagaagtgatcaatgctattgcacccgagaaggatgtggatggattgactagcatcaatgctgggagacttgctagaggtgacctcaatgactgtttcattccttgtacgcctaagggatgcttggaactcatcaaagagacaggggtgccgattgccggaaggcatgctgtggtggttgggcgcagtaaaatagttggggccccgatgcatgacttgcttctgtggaacaatgccacagtgaccacctgccactccaagactgcccatctggatgaggaggtaaataaaggtgacatcctggtggttgcaactggtcagcctgaaatggttaaaggggagtggatcaaacctggggcaatagtcatcgactgtggaatcaattatgtcccagatgataaaaaaccaaatgggagaaaagttgtgggtgatgtggcatacgacgaggccaaagagagggcgagcttcatcactcctgttcctggcggcgtagggcccatgacagttgcaatgctcatgcagagcacagtagagagtgccaagcgtttcctggagaaatttaagccaggaaagtggatgattcagtataacaaccttaacctcaagacacctgttccaagtgacattgatatatcacgatcttgtaaaccgaagcccattggtaagctggctcgagaaattggtctgctgtctgaagaggtagaattatatggtgaaacaaaggccaaagttctgctgtcagcactagaacgcctgaagcaccggcctgatgggaaatacgtggtggtgactggaataactccaacacccctgggagaagggaaaagcacaactacaatcgggctagtgcaagcccttggtgcccatctctaccagaatgtctttgcgtgtgtgcgacagccttctcagggccccacctttggaataaaaggtggcgctgcaggaggcggctactcccaggtcattcctatggaagagtttaatctccacctcacaggtgacatccatgccatcactgcagctaataacctcgttgctgcggccattgatgctcggatatttcatgaactgacccagacagacaaggctctctttaatcgtttggtgccatcagtaaatggagtgagaaggttctctgacatccaaatccgaaggttaaagagactaggcattgaaaagactgaccctaccacactgacagatgaagagataaacagatttgcaagattggacattgatccagaaaccataacttggcaaagagtgttggataccaatgatagattcctgaggaagatcacgattggacaggctccaacggagaagggtcacacacggacggcccagtttgatatctctgtggccagtgaaattatggctgtcctggctctcaccacttctctagaagacatgagagagagactgggcaaaatggtggtggcatccagtaagaaaggagagcccgtcagtgccgaagatctgggggtgagtggtgcactgacagtgcttatgaaggacgcaatcaagcccaatctcatgcagacactggagggcactccagtgtttgtccatgctggcccgtttgccaacatcgcacatggcaattcctccatcattgcagaccagatcgcactcaagcttgttggcccagaagggtttgtagtgacggaagcaggatttggagcagacattggaatggaaaagttttttaacatcaaatgccggtattccggcctctgcccccacgtggtggtgcttgttgccactgtcagggctctcaagatgcacgggggcggccccacggtcactgctggactgcctcttcccaaggcttacatacaggagaacctggagctggttgaaaaaggcttcagtaacttgaagaaacaaattgaaaatgccagaatgtttggaattccagtagtagtggccgtgaatgcattcaagacggatacagagtctgagctggacctcatcagccgcctttccagagaacatggggcttttgatgccgtgaagtgcactcactgggcagaagggggcaagggtgccttagccctggctcaggccgtccagagagcagcacaagcacccagcagcttccagctcctttatgacctcaagctcccagttgaggataaaatcaggatcattgcacagaagatctatggagcagatgacattgaattacttcccgaagctcaacacaaagctgaagtctacacgaagcagggctttgggaatctccccatctgcatggctaaaacacacttgtctttgtctcacaacccagagcaaaaaggtgtccctacaggcttcattctgcccattcgcgacatccgcgccagcgttggggctggttttctgtaccccttagtaggaacgatgagcacaatgcctggactccccacccggccctgtttttatgatattgatttggaccctgaaacagaacaggtgaatggattattctaaacagatcaccatccatcttcaagaagctactttgaaagtctggccagtgtctattcaggcccactgggagttaggaagtataagtaagccaagagaagtcagcccctgcccagaagatctgaaactaatagtaggagtttccccagaagtcattttcagccttaattctcatcatgtataaattaacataaatcatgcatgtctgtttactttagtgacgttccacagaataaaaggaaacaagtttgc

SEQ ID NO: 337 - DNA, 6099 bp, human
ccggcggccgagcgttctgagtcacccgggactggaggtaggaacccagccatggtgaacgaagccagaggaaacagcagcctcaacccctgcttggagggcagtgccagcagtggcagtgagagctccaaagatagttcgagatgttccaccccgggcctggaccctgagcggcatgagagactccgggagaagatgaggcggcgattggaatctggtgacaagtggttctccctggaattcttccctcctcgaactgctgagggagctgtcaatctcatctcaaggtttgaccggatggcagcaggtggccccctctacatagacgtgacctggcacccagcaggtgaccctggctcagacaaggagacctcctccatgatgatcgccagcaccgccgtgaactactgtggcctggagaccatcctgcacatgacctgctgccgtcagcgcctggaggagatcacgggccatctgcacaaagctaagcagctgggcctgaagaacatcatggcgctgcggggagacccaataggtgaccagtgggaagaggaggagggaggcttcaactacgcagtggacctggtgaagcacatccgaagtgagtttggtgactactttgacatctgtgtggcaggttaccccaaaggccaccccgaagcagggagctttgaggctgacctgaagcacttgaaggagaaggtgtctgcgggagccgatttcatcatcacgcagcttttctttgaggctgacacattcttccgctttgtgaaggcatgcaccgacatgggcatcacttgccccatcgtccccgggatctttcccatccagggctaccactcccttcggcagcttgtgaagctgtccaagctggaggtgccacaggagatcaaggacgtgattgagccaatcaaagacaacgatgctgccatccgcaactatggcatcgagctggccgtgagcctgtgccaggagcttctggccagtggcttggtgccaggcctccacttctacaccctcaaccgcgagatggctaccacagaggtgctgaagcgcctggggatgtggactgaggaccccaggcgtcccctaccctgggctctcagtgcccaccccaagcgccgagaggaagatgtacgtcccatcttctgggcctccagaccaaagagttacatctaccgtacccaggagtgggacgagttccctaacggccgctggggcaattcctcttcccctgcctttggggagctgaaggactactacctcttctacctgaagagcaagtcccccaaggaggagctgctgaagatgtggggggaggagctgaccagtgaagcaagtgtctttgaagtctttgttctttacctctcgggagaaccaaaccggaatggtcacaaagtgacttgcctgccctggaacgatgagcccctggcggctgagaccagcctgctgaaggaggagctgctgcgggtgaaccgccagggcatcctcaccatcaactcacagcccaacatcaacgggaagccgtcctccgaccccatcgtgggctggggccccagcgggggctatgtcttccagaaggcctacttagagtttttcacttcccgcgagacagcggaagcacttctgcaagtgctgaagaagtacgagctccgggttaattaccaccttgtcaatgtgaagggtgaaaacatcaccaatgcccctgaactgcagccgaatgctgtcacttggggcatcttccctgggcgagagatcatccagcccaccgtagtggatcccgtcagcttcatgttctggaaggacgaggcctttgccctgtggattgagcagtggggaaagctgtatgaggaggagtccccgtcccgcaccatcatccagtacatccacgacaactacttcctggtcaacctggtggacaatgacttcccactggacaactgcctctggcaggtggtggaagacacattggagcttctcaacaggcccacccagaatgcgagagaaacggaggctccatgaccctgcgtcctgacgccctgcgttggagccactcctgtcccgccttcctcctccacagtgctgcttctcttgggaactccactctccttcgtgtctctcccaccccggcctccactcccccacctgacaatggcagctagactggagtgaggcttccaggctcttcctggacctgagtcggccccacatgggaacctagtactctctgctctagccaggagtctgtgctcttttggtggggagcacttgcgtcctgcagaggaccacagtgggtggcacctcctgagaaggcgaggagagtggttgttgccaactaagccctcgaaccaaggcagcctccagagccagcctgggactcccagtgaacttacacttggagcccgtgcagtacaggcaaaacacgcaagggcatcaggcactggtggcatcgtagaagagatgtggcaaagtgctgtacccttccacctcctagaggtgggcagctgggccccacctacttgtgactgaaggggcacaccactgccctgcctgcccacttagccgtccatggcaccagccccctggatgggcattgggctgacacctaccatgctgctttttggcacagttgtctattctgagccttgagagaaaaagtgccccttaagggttgaaggcagtctgaacccttgtgcttggtggggctcgtggccttccccttttgcctggctgtggaggcctgatgctgccccgttccctgtcagaggctaagatgagatttgccagcacaggggccccagatctgcctgggcctgtgcagcagcccagcttcctggtgtatttttcaggtaggcccttgtcctgccagctgccttcctcatcccctcgtcctgtcccagaggttatctgcctggcctggctccccacgagtcacctgcaagccccagggcctgggggcagtgactggcaggtgcagatgggctgtttcgtgtagtggaagagcagcctgatggccaagggggtggacgcaattgtgggatgtcctctttactcccttcctggcctcactggctggggcagaggggcagccgctaggagagactgaaagcagcagctaggactgaggagtgggttttattgtccttcagagctcttcaagctgtcccctctgtcatcactccctggatgtgtggggcatggttccttccctgggaaggctaagttcagttctgttttttattctatgagaacaagtcacagctgcagctgggccccatgctctgccccaagcccccaaccccgcggtgctccggcggcttcctgtccactctcggggcccttggggcctggcttgctccagggtcttgggctactggcagctcctctccttgggctcctggctgccaggcgttggtgccacttcttaaaggcctggaaccagggaggagaggaaatgctattgttgtgggctttctccggggtctgtgctgtgcctgctagagcaacccctgtacccagctccttttgtccccagggcccctccctctgccccaagcagccagccagtcttgcctaggccaaatgcacaagctcagaatagatctgatggtgagctgggaagctgtactcagagcagagcaaatgagggagggggcgctcaggacccaggccctccatgggctagtgtgagtggcagccatgcctcatgccacaccttcttcgcaaactgatggaccgggtgggcctggcctgagctggggccacaaatcaaagcaagggctccagtatccagcctgtgtgttctgtaatggaactgaccccctcccctgaaaacgaaggggccccggggctggcaagcagggaaagctccacggtgcgcggctgtggcacagacttctggaaggctggctgagtggaatgcagggaagagggcagtacctgggaaaggacccacccatcttcctgctgctgtaactgctgagccactcgcagtcgcaggatccgctgccaccacgtctgccaggcccatctcaggtgccactccctgagctttggggacagttggcagagaaggcctcttgtgctcacgctcccccgcagtccccagcccttctgcctttctcccccgacactgctgcaccagagtgaaagggctatggcaagggggtgtcatctgaggagtattaagaatgcagattcctgggcctgtcccccaaggttttggagtcagtaggtccaagggccatacttttgagaggggtttgggttaagtatgaggtgaaatgggagatggtcagtgtggagaggggtgcacccactcaccagggtccgcaccagctgctctgccccttgggcatccacccagtgctgccatgccactgccaggcacctggcctgctgggaaccccgcagcccgtgaagcagtgcctcgaggcaccggcgctgcaggtacttcctcctgatggccaagagcatcgtgacccttcagggccagaaggagggcagagccatgggcctgggcctgcttttccaggatcctgcaggaacgagcactggccagagagggcccagctgtagccatggctcaggcaagcccctcagcccttgcccccatccctcggacccaccaaactgcacacacagctcctcttaccgtagcctccgtttatgggccttgctttgggctttggaggctctgggctcagggctggagtgcgctcttggtccctggtccctcgtccacaggggcaggcctgggacccagctactctgtccaggccactgtggccagagctggaaggcagggcagagggaatgttccctgcaccctggaaaggggagttgagtcacaagagtttaaggtgggtccaggaaggcagctgctcttagtgcccgcttaggagttgagtacagtgaggagggtggaggaaggtgctgagcttagccttgtgccctgcccccatctccccaggcctccagcctctcacggctgcctgccgcccaaagagaaatcacaggggcggggcaggaatgcaaagtgttttctcagaacagctgaaacattccgaagagggaatggatggggagaatggtcaatacacataagaccgtgtcccaaggagctgatttccaggcccctgaggactggagaccgcttcacccctgcacttcagacaccgtttgtcccccggggcaaggtctccttactctgagcccaggccgttccccttggcttcctccgtccacccaggctgcactgcagtgatggcgcgggaggcaccagctctgtggcctgtgtccagcagctgtgggtctgaaggaatagccagagaggagcacctgaaccccatgggcttggacttcctggggccccgctgggatttcttcgctgctctagctggcaggacacatcccggcctcttccacccattcccccatgtggctgaagacattccaacaatggggtgggcccataatagttagccctcagtcagttcccggagcacagccctgggagggggctatttctctccccactgaaaacatttcaaagctgagttacttgtctgaggcctcatccctcggaagccgtctgactccagagtctgagcccccggctagtaccctatagagagggggctctccaaaggggctgctggggcatgtgtgcctgtggcagaaaagaggagaccctggaattcagcaccctgggtgccattcccagcgtttagtttctagaggcctcagtttctccatcagcttatgggatccttgtctttactgacaagaatggaatagaaatgtaaaagtactctgaaaagcaattgccctgtaacttatctagaaagaaaagaccctgagactccagaatctgctgttgccatagccccatatgtgtgaattctgcaactagccaaggctagttcctttcaattccatttaaaaaacaaaaaccagcaggtgtggtggctcatggcgtaatgggcctgcccaatgctttgggaggccaaggcagatagatcgcttgagcccaggagtttgagacaagccctggcaacatagtgagatcccatttctacaaaaaaaaaaaaaaaaaaa

SEQ ID NO: 338 - DNA, 3392 bp, human
actccctcactggctgccattgaaagagtccacttctcagtgactcctagctgggcactggatgcagttgaggattgctggtcaatatgattcttcttgctgtgctttttctctgcttcatttcctcatattcagcttctgttaaaggtcacacaactggtctctcattaaataatgaccggctgtacaagctcacgtactccactgaagttcttcttgatcggggcaaaggaaaactgcaagacagcgtgggctaccgcatttcctccaacgtggatgtggccttactatggaggaatcctgatggtgatgatgaccagttgatccaaataacgatgaaggatgtaaatgttgaaaatgtgaatcagcagagaggagagaagagcatcttcaaaggaaaaagcccatctaaaataatgggaaaggaaaacttggaagctctgcaaagacctacgctccttcatctaatccatggaaaggtcaaagagttctactcatatcaaaatgaggcagtggccatagaaaatatcaagagaggtctggctagcctatttcagacacagttaagctctggaaccaccaatgaggtagatatctctggaaattgtaaagtgacctaccaggctcatcaagacaaagtgatcaaaattaaggccttggattcatgcaaaatagcgaggtctggatttacgaccccaaatcaggtcttgggtgtcagttcaaaagctacatctgtcaccacctataagatagaagacagctttgttatagctgtgcttgctgaagaaacacacaattttggactgaatttcctacaaaccattaaggggaaaatagtatcgaagcagaaattagagctgaagacaaccgaagcaggcccaagattgatgtctggaaagcaggctgcagccataatcaaagcagttgattcaaagtacacggccattcccattgtggggcaggtcttccagagccactgtaaaggatgtccttctctctcggagctctggcggtccaccaggaaatacctgcagcctgacaacctttccaaggctgaggctgtcagaaacttcctggccttcattcagcacctcaggactgcgaagaaagaagagatccttcaaatactaaagatggaaaataaggaagtattacctcagctggtggatgctgtcacctctgctcagacctcagactcattagaagccattttggactttttggatttcaaaagtgacagcagcattatcctccaggagaggtttctctatgcctgtggatttgcttctcatcccaatgaagaactcctgagagccctcattagtaagttcaaaggttctattggtagcagtgacatcagagaaactgttatgatcatcactgggacacttgtcagaaagttgtgtcagaatgaaggctgcaaactcaaagcagtagtggaagctaagaagttaatcctgggaggacttgaaaaagcagagaaaaaagaggacaccaggatgtatctgctggctttgaagaatgccctgcttccagaaggcatcccaagtcttctgaagtatgcagaagcaggagaagggcccatcagccacctggctaccactgctctccagagatatgatctccctttcataactgatgaggtgaagaagaccttaaacagaatataccaccaaaaccgtaaagttcatgaaaagactgtgcgcactgctgcagctgctatcattttaaataacaatccatcctacatggacgtcaagaacatcctgctgtctattggggagcttccccaagaaatgaataaatacatgctcgccattgttcaagacatcctacgtttggaaatgcctgcaagcaaaattgtccgtcgagttctgaaggaaatggtcgctcacaattatgaccgtttctccaggagtggatcttcttctgcctacactggctacatagaacgtagtccccgttcggcatctacttacagcctagacattctctactcgggttctggcattctaaggagaagtaacctgaacatctttcagtacattgggaaggctggtcttcacggtagccaggtggttattgaagcccaaggactggaagccttaatcgcagccacccctgacgagggggaggagaaccttgactcctatgctggtatgtcagccatcctctttgatgttcagctcagacctgtcacctttttcaacggatacagtgatttgatgtccaaaatgctgtcagcatctggcgaccctatcagtgtggtgaaaggacttattctgctaatagatcattctcaggaacttcagttacaatctggactaaaagccaatatagaggtccagggtggtctagctattgatatttcaggtgcaatggagtttagcttgtggtatcgtgagtctaaaacccgagtgaaaaatagggtgactgtggtaataaccactgacatcacagtggactcctcttttgtgaaagctggcctggaaaccagtacagaaacagaagcaggcttggagtttatctccacagtgcagttttctcagtacccattcttagtttgcatgcagatggacaaggatgaagctccattcaggcaatttgagaaaaagtacgaaaggctgtccacaggcagaggttatgtctctcagaaaagaaaagaaagcgtattagcaggatgtgaattcccgctccatcaagagaactcagagatgtgcaaagtggtgtttgcccctcagccggatagtacttccagcggatggttttgaaactgacctgtgatattttacttgaatttgtctccccgaaagggacacaatgtggcatgactaagtacttgctctctgagagcacagcgtttacatatttacctgtatttaagatttttgtaaaaagctacaaaaaactgcagtttgatcaaatttgggtatatgcagtatgctacccacagcgtcattttgaatcatcatgtgacgctttcaacaacgttcttagtttacttatacctctctcaaatctcatttggtacagtcagaatagttattctctaagaggaaactagtgtttgttaaaaacaaaaataaaaacaaaaccacacaaggagaacccaattttgtttcaacaatttttgatcaatgtatatgaagctcttgataggacttccttaagcatgacgggaaaaccaaacacgttccctaatcaggaaaaaaaaaaaaaaaaaaaagtaagacacaaacaaaccatttttttctctttttttggagttgggggcccagggagaagggacaaggcttttaaaagacttgttagccaacttcaagaattaatatttatgtctctgttattgttagttttaagccttaaggtagaaggcacatagaaataacatc

SEQ ID NO: 339 - DNA, 1655 bp, human
aagccccagcccggcctccgctccggccgccgccaccgcccctgttttgtttccatggcgacaggcggcgcagggcccgctccaaacataacgcgctgtggaaaacatgctgctcgggggacccccccgcagtccccgctcggggacgagccccaaggggccctggagcagtacaggccacgtgcagtttggcaagagcccccagacctggcccaggcgcacaagaccccgctctccagagcctgccgcgccttcaggggttcggggctccacttggacgaggcgccgtgacactccgaggcgcgccgggccgacagcgctgtcccgctacgtgggccacctctggatgggccggcggccgccctcccccgaggcccgcggcccagtcccccgcagttcagctgccagtcgggccagaagaagcctcgcctccccggggatctccccaggccccctgaccgcaacgatcggaggggcggtggcggggggcgggcccaggcaggggagggcagaagcacacaaggaagtgtttccgggacagagggtgggcaagatggcggcgcccatggagctgttctgctggtcagggggctgggggctgccgtcagtggacctggacagcctggccgtgctgacctatgccagatttactggtgctccactgaaggtacacaagatcagcaacccctggcagagcccttcaggaactctgcctgcccttcggaccagtcatggagaggtcatctcagttccacacaagatcatcacccaccttcgaaaagagaagtacaatgctgattatgatctgtcagctcggcaaggggcagacaccctggccttcatgtctctcctggaggagaagttgctcccggtgctggtacatactttttggatagacaccaagaactacgtggaagtgacccggaagtggtatgcagaggctatgccctttcccctcaacttcttcctgcctggccgcatgcagcggcagtacatggaacggctacagctgctgactggggagcacaggcctgaggacgaggaagagctggagaaggagctgtaccgagaggctcgggagtgtctgaccctgctctctcagcgcctgggctctcaaaagttcttctttggagatgcccctgcctccttggacgccttcgtcttcagctacttggccctgctgctgcaggcaaagctgcccagtgggaagctgcaggtccacctgcgtgggctgcacaacctctgtgcctattgtacccacattctcagtctctacttcccctgggatggagctgaggtaccaccgcaacgccagacaccagcaggcccagagactgaggaggagccataccggcgccggaaccagatcctatctgtgctggcaggactggcagccatggtgggctacgccttgctcagcggcattgtctccatccagcgggcaacgcctgctcgggccccaggcacccggaccctgggcatggctgaggaggatgaagaggaatgatttgtcctcacgctcccaagactggtttttctactctcatgcattccagaggcccccgtgcctcctcgttgttggtacagccggacacggggtgctgccacccagaataaagccactcacactgaaaaaaaaaaaaaaaaaaaaaaaa

SEQ ID NO: 340 - DNA, 15720 bp, human
caacccacaccgcccctgccagccaccatggggctgccactagcccgcctggcggctgtgtgcctggccctgtctttggcagggggctcggagctccagacagagggcagaacccgataccacggccgcaacgtctgcagcacctggggcaacttccactacaagaccttcgacggggacgtcttccgcttccccggcctctgcgactacaacttcgcctccgactgccgaggctcctacaaggaatttgctgtgcacctgaagcggggtccgggccaggctgaggcccccgccggggtggagtccatcctgctgaccatcaaggatgacaccatctacctcacccgccacctggctgtgcttaacggggccgtggtcagcaccccgcactacagccccgggctgctcattgagaagagcgatgcctacaccaaagtctactcccgcgccggcctcaccctcatgtggaaccgggaggatgcactcatgctggagctggacactaagttccggaaccacacctgtggcctctgcggggactacaacggcctgcagagctattcagaattcctctctgacggcgtgctcttcagtcccctggagtttgggaacatgcagaagatcaaccagcccgatgtggtgtgtgaggatcccgaggaggaggtggcccccgcatcctgctccgagcaccgcgccgagtgtgagaggctgctgaccgccgaggccttcgcggactgtcaggacctggtgccgctggagccgtatctgcgcgcctgccagcaggaccgctgccggtgcccgggcggtgacacctgcgtctgcagcaccgtggccgagttctcccgccagtgctcccacgccggcggccggcccgggaactggaggaccgccacgctctgccccaagacctgccccgggaacctggtgtacctggagagcggctcgccctgcatggacacctgctcacacctggaggtgagcagcctgtgcgaggagcaccgcatggacggctgtttctgcccagaaggcaccgtatatgacgacatcggggacagtggctgcgttcctgtgagccagtgccactgcaggctgcacggacacctgtacacaccgggccaggagatcaccaatgactgcgagcagtgtgtctgtaacgctggccgctgggtgtgcaaagacctgccctgccccggcacctgtgccctggaaggcggctcccacatcaccaccttcgatgggaagacgtacaccttccacggggactgctactatgtcctggccaagggtgaccacaacgattcctacgctctcctgggcgagctggccccctgtggctccacagacaagcagacctgcctgaagacggtggtgctgctggctgacaagaagaagaatgcggtggtcttcaagtccgatggcagtgtactgctcaaccagctgcaggtgaacctgccccacgtgaccgcgagcttctctgtcttccgcccgtcttcctaccacatcatggtgagcatggccattggcgtccggctgcaggtgcagctggccccagtcatgcaactctttgtgacactggaccaggcctcccaggggcaggtgcagggcctctgcgggaacttcaacggcctggaaggtgacgacttcaagacggccagcgggctggtggaggccacgggggccggctttgccaacacctggaaggcacagtcaacctgccatgacaagctggactggttggacgatccctgctccctgaacatcgagagcgccaactacgccgagcactggtgctccctcctgaagaagacagagaccccctttggcaggtgccactcggctgtggaccctgctgagtattacaagaggtgcaaatatgacacgtgtaactgtcagaacaatgaggactgcctgtgcgccgccctgtcctcctacgcgcgcgcctgcaccgccaagggcgtcatgctgtggggctggcgggagcatgtctgcaacaaggatgtgggctcctgccccaactcgcaggtcttcctgtacaacctgaccacctgccagcagacctgccgctccctctccgaggccgacagccactgtctcgagggctttgcgcctgtggacggctgcggctgccctgaccacaccttcctggacgagaagggccgctgcgtacccctggccaagtgctcctgttaccaccgcggtctctacctggaggcgggggatgtggtcgtcaggcaggaagaacgatgtgtgtgccgggatgggcggctgcactgtaggcagatccggctgatcggccagagctgcacggccccaaagatccacatggactgcagcaacctgactgcactggccacctcgaagccccgagccctcagctgccagacgctggccgccggctattaccacacagagtgtgtcagtggctgtgtgtgccccgacgggctgatggatgacggccggggtggctgcgtggtggagaaggaatgcccttgcgtccataacaacgacctgtattcttccggcgccaagatcaaggtggactgcaatacctgcacctgcaagagaggacgctgggtgtgcacccaggctgtgtgccatggcacctgctccatttacgggagtggccactacatcacctttgatgggaagtactacgactttgacggacactgctcctacgtggctgttcaggactactgcggccagaactcctcactgggctcattcagcatcatcaccgagaacgtcccctgtggcactacgggcgtcacctgctccaaggccatcaagatcttcatggggaggacggagctgaagttggaagacaagcaccgtgtggtgatccagcgtgatgagggtcaccacgtggcctacaccacgcgggaggtgggccagtacctggtggtggagtccagcacgggcatcatcgtcatctgggacaagaggaccaccgtgttcatcaagctggctccctcctacaagggcaccgtgtgtggcctgtgtgggaactttgaccaccgctccaacaacgacttcaccacgcgggaccacatggtggtgagcagcgagctggacttcgggaacagctggaaggaggcccccacctgcccagatgtgagcaccaaccccgagccctgcagcctgaacccgcaccgccgctcctgggccgagaagcagtgcagcatcctcaaaagcagcgtgttcagcatctgccacagcaaggtggaccccaagcccttctacgaggcctgtgtgcacgactcgtgctcctgtgacacgggtggggactgtgagtgcttctgctctgccgtggcctcctacgcccaggagtgtaccaaagagggggcctgcgtgttctggaggacgccggacctgtgccccatattctgcgactactacaaccctccgcatgagtgtgagtggcactatgagccatgtgggaaccggagcttcgagacctgcaggaccatcaacggcatccactccaacatctccgtgtcctacctggagggctgctacccccggtgccccaaggacaggcccatctatgaggaggatctgaagaagtgtgtcactgcagacaagtgtggctgctatgtcgaggacacccactacccacctggagcatcggttcccaccgaggagacctgcaagtcctgcgtgtgtaccaactcctcccaagtcgtctgcaggccggaggaaggaaagattcttaaccagacccaggatggcgccttctgctactgggagatctgtggccccaacgggacggtggagaagcacttcaacatctgttccattacgacacgcccgtccaccctgaccaccttcaccaccatcaccctccccaccacccccacctccttcaccactaccaccaccaccaccaccccgacctccagcacagttttatcaacaactccgaagctgtgctgcctctggtctgactggatcaatgaggaccaccccagcagtggcagcgacgacggtgaccgagaaccatttgatggggtctgcggggcccctgaggacatcgagtgcaggtcggtcaaggatccccacctcagcttggagcagcatggccagaaggtgcagtgtgatgtctctgttgggttcatttgcaagaatgaagaccagtttggaaatggaccatttggactgtgttacgactacaagatacgtgtcaattgttgctggcccatggataagtgtatcaccactcccagccctccaactaccactcccagccctccaccaaccacgacgaccacccttccaccaaccaccacccccagccctccaaccaccaccacaaccacccctccaccaaccaccacccccagccctccaataaccaccacgaccacccctctaccaaccaccactcccagccctccaataagcaccacaaccacccctccaccaaccaccactcccagccctccaaccaccactcccagccctccaaccaccactcccagccctccaacaaccaccacaaccacccctccaccaaccaccactcccagccctccaatgactacgcccatcactccaccagccagcactaccacccttccaccaaccaccactcccagccctccaacaaccaccacaaccacccctccaccaaccaccactcccagtcctccaacgactacgcccatcactccaccaaccagcactactacccttccaccaaccaccactcccagccctccaccaaccaccacaaccacccctccaccaaccaccactcccagccctccaacaaccaccactcccagtcctccaacaatcaccacaaccacccctccaccaaccaccactcccagccctccaacaacgaccacaaccacccctccaccaaccaccactcccagccctccaacgactacacccatcactccaccaaccagcactaccacccttccaccaaccaccactcccagccctccaccaaccaccacaaccacccctccaccaaccaccactcccagccctccaacaaccaccactcccagccctccaataaccaccacaaccacccctccaccaaccaccactcccagctctccaataaccaccactcccagccctccaacaaccaccatgaccaccccttcaccaaccaccacccccagctctccaataaccaccacaaccaccccttcctcaactaccactcccagccctccaccaaccaccatgaccaccccttcaccaaccaccactcccagccctccaacaaccaccatgaccacccttccaccaaccaccacttccagccctctaacaactactcctctacctccatcaataactcctcctacattttcaccattctcaacgacaacccctactaccccatgcgtgcctctctgcaattggactggctggctggattctggaaaacccaactttcacaaaccaggtggagacacagaattgattggagacgtctgtggaccaggctgggcagctaacatctcttgcagagccaccatgtatcctgatgttcccattggacagcttggacaaacagtggtgtgtgatgtctctgtggggctgatatgcaaaaatgaagaccaaaagccaggtggggtcatccctatggccttctgcctcaactacgagatcaacgttcagtgctgtgagtgtgtcacccaacccaccaccatgacaaccaccaccacagagaacccaactccgccaaccacgacacccatcaccaccaccactacggtgaccccaaccccaacacccaccggcacacagaccccaaccacgacacccatcaccaccaccactacggtgaccccaaccccaacacccaccggcacacagaccccaaccacgacacccatcaccaccaccactacggtgaccccaaccccaacacccaccggcacacagaccccaaccacgacacccatcaccaccaccactacggtgaccccaaccccaacacccaccggcacacagaccccaaccacgacacccatcaccaccaccactacggtgaccccaaccccaacacccaccggcacacagaccccaaccacgacacccatcaccaccaccactacggtgaccccaaccccaacacccaccggcacacagaccccaaccacgacacccatcaccaccaccactacggtgaccccaaccccaacacccaccggcacacagaccccaaccacgacacccatcaccaccaccactacggtgaccccaaccccaacacccaccggcacacagaccccaaccacgacacccatcaccaccaccactacggtgaccccaaccccaacacccaccggcacacagaccccaaccacgacacccatcaccaccaccactacggtgaccccaaccccaacacccaccggcacacagaccccaaccacgacacccatcaccaccaccactacggtgaccccaaccccaacacccaccggcacacagaccccaaccacgacacccatcaccaccaccactacggtgaccccaaccccaacacccaccggcacacagaccccaaccacgacacccatcaccaccaccactacggtgaccccaaccccaacacccaccggcacacagaccccaaccacgacacccatcaccaccaccactacggtgaccccaaccccaacacccaccggcacacagaccccaaccacgacacccatcaccaccaccactacggtgaccccaaccccaacacccaccggcacacagaccccaaccacgacacccatcaccaccaccactacggtgaccccaaccccaacacccaccggcacacagaccccaaccacgacacccatcaccaccaccactacggtgaccccaaccccaacacccaccggcacacagaccccaaccacgacacccatcaccaccaccactacggtgaccccaaccccaacacccaccggcacacagaccccaaccacgacacccatcaccaccaccactacggtgaccccaaccccaacacccaccggcacacagaccccaaccacgacacccatcaccaccaccactacggtgaccccaaccccaacacccaccggcacacagaccccaaccacgacacccatcaccaccaccactacggtgaccccaaccccaacacccaccggcacacagaccccaaccacgacacccatcaccaccaccactacggtgaccccaaccccaacacccaccggcacacagaccccaaccacgacacccatcaccaccaccactacggtgaccccaaccccaacacccaccggcacacagaccccaaccacgacacccatcaccaccaccactacggtgaccccaaccccaacacccaccggcacacagaccccaaccacgacacccatcaccaccaccactacggtgaccccaaccccaacacccaccggcacacagaccccaaccacgacacccatcaccaccaccactacggtgaccccaaccccaacacccaccggcacacagaccccaaccacgacacccatcaccaccaccactacggtgaccccaaccccaacacccaccggcacacagaccccaaccacgacacccatcaccaccaccactacggtgaccccaaccccaacacccaccggcacacagaccccaaccacgacacccatcaccaccaccactacggtgaccccaaccccaacacccaccggcacacagaccccaaccacgacacccatcaccaccaccactacggtgaccccaaccccaacacccaccggcacacagaccccaaccacgacacccatcaccaccaccactacggtgaccccaaccccaacacccaccggcacacagaccccaaccacgacacccatcaccaccaccactacggtgaccccaaccccaacacccaccggcacacagaccccaaccacgacacccatcaccaccaccactacggtgaccccaaccccaacacccaccggcacacagaccccaaccacgacacccatcaccaccaccactacggtgaccccaaccccaacacccaccggcacacagaccccaaccacgacacccatcaccaccaccactacggtgaccccaaccccaacacccaccggcacacagaccccaaccacgacacccatcaccaccaccactacggtgaccccaaccccaacacccaccggcacacagaccccaaccacgacacccatcaccaccaccactacggtgaccccaaccccaacacccaccggcacacagaccccaaccacgacacccatcaccaccaccactacggtgaccccaaccccaacacccaccggcacacagaccccaaccacgacacccatcaccaccaccactacggtgaccccaaccccaacacccaccggcacacagaccccaaccacgacacccatcaccaccaccactacggtgaccccaaccccaacacccaccggcacacagaccccaaccacgacacccatcaccaccaccactacggtgaccccaaccccaacacccaccggcacacagaccccaaccacgacacccatcaccaccaccactacggtgaccccaaccccaacacccaccggcacacagaccccaaccacgacacccatcaccaccaccactacggtgaccccaaccccaacacccaccggcacacagaccccaaccacgacacccatcaccaccaccactacggtgaccccaaccccaacacccaccggcacacagaccccaaccacgacacccatcaccaccaccactacggtgaccccaaccccaacacccaccggcacacagaccccaaccacgacacccatcaccaccaccactacggtgaccccaaccccaacacccaccggcacacagaccccaaccacgacacccatcaccaccaccactacggtgaccccaaccccaacacccaccggcacacagaccccaaccacgacacccatcaccaccaccactacggtgaccccaaccccaacacccaccggcacacagaccccaaccacgacacccatcaccaccaccactacggtgaccccaaccccaacacccaccggcacacagaccccaaccacgacacccatcaccaccaccactacggtgaccccaaccccaacacccaccggcacacagaccccaaccacgacacccatcaccaccaccactacggtgaccccaaccccaacacccaccggcacacagaccccaaccacgacacccatcaccaccaccactacggtgaccccaaccccaacacccaccggcacacagaccccaaccacgacacccatcaccaccaccactacggtgaccccaaccccaacacccaccggcacacagaccccaaccacgacacccatcaccaccaccactacggtgaccccaaccccaacacccaccggcacacagaccccaaccacgacacccatcaccaccaccactacggtgaccccaaccccaacacccaccggcacacagaccccaaccacgacacccatcaccaccaccactacggtgaccccaaccccaacacccaccggcacacagaccccaaccacgacacccatcaccaccaccactacggtgaccccaaccccaacacccaccggcacacagaccccaaccacgacacccatcaccaccaccactacggtgaccccaaccccaacacccaccggcacacagaccccaaccacgacacccatcaccaccaccactacggtgaccccaaccccaacacccaccggcacacagaccccaaccacgacacccatcaccaccaccactacggtgaccccaaccccaacacccaccggcacacagaccccaaccacgacacccatcaccaccaccactacggtgaccccaaccccaacacccaccggcacacagaccccaaccacgacacccatcaccaccaccactacggtgaccccaaccccaacacccaccggcacacagaccccaaccacgacacccatcaccaccaccactacggtgaccccaaccccaacacccaccggcacacagaccccaaccacgacacccatcaccaccaccactacggtgaccccaaccccaacacccaccggcacacagaccccaaccacgacacccatcaccaccaccactacggtgaccccaaccccaacacccaccggcacacagaccccaaccacgacacccatcaccaccaccactacggtgaccccaaccccaacacccaccggcacacagaccccaaccacgacacccatcaccaccaccactacggtgaccccaaccccaacacccaccggcacacagaccccaaccacgacacccatcaccaccaccactacggtgaccccaaccccaacacccaccggcacacagaccccaaccacgacacccatcaccaccaccactacggtgaccccaaccccaacacccaccggcacacagaccccaaccacgacacccatcaccaccaccactacggtgaccccaaccccaacacccaccggcacacagaccccaaccacgacacccatcaccaccaccactacggtgaccccaaccccaacacccaccggcacacagaccccaaccacgacacccatcaccaccaccactacggtgaccccaaccccaacacccaccggcacacagaccccaaccacgacacccatcaccaccaccactacggtgaccccaaccccaacacccaccggcacacagaccccaaccacgacacccatcaccaccaccactacggtgaccccaaccccaacacccaccggcacacagaccccaaccacgacacccatcaccaccaccactacggtgaccccaaccccaacacccaccggcacacagaccccaaccacgacacccatcaccaccaccactacggtgaccccaaccccaacacccaccggcacacagaccccaaccacgacacccatcaccaccaccactacggtgaccccaaccccaacacccaccggcacacagaccccaaccacgacacccatcaccaccaccactacggtgaccccaaccccaacacccaccggcacacagaccccaaccacgacacccatcaccaccaccactacggtgaccccaaccccaacacccaccggcacacagaccccaaccacgacacccatcaccaccaccactacggtgaccccaaccccaacacccaccggcacacagaccccaaccacgacacccatcaccaccaccactacggtgaccccaaccccaacacccaccggcacacagaccccaaccacgacacccatcaccaccaccactacggtgaccccaaccccaacacccaccggcacacagaccccaaccacgacacccatcaccaccaccactacggtgaccccaaccccaacacccaccggcacacagaccccaaccacgacacccatcaccaccaccactacggtgaccccaaccccaacacccaccggcacacagaccccaaccacgacacccatcaccaccaccactacggtgaccccaaccccaacacccaccggcacacagaccccaaccacgacacccatcaccaccaccactacggtgaccccaaccccaacacccaccggcacacagaccccaaccacgacacccatcaccaccaccactacggtgaccccaaccccaacacccaccggcacacagaccccaaccacgacacccatcaccaccaccactacggtgaccccaaccccaacacccaccggcacacagaccccaaccacgacacccatcaccaccaccactacggtgaccccaaccccaacacccaccggcacacagaccccaaccacgacacccatcaccaccaccactacggtgaccccaaccccaacacccaccggcacacagaccccaaccacgacacccatcaccaccaccactacggtgaccccaaccccaacacccaccggcacacagaccccaaccacgacacccatcaccaccaccactacggtgaccccaaccccaacacccaccggcacacagaccccaaccacgacacccatcaccaccaccactacggtgaccccaaccccaacacccaccggcacacagaccccaaccacgacacccatcaccaccaccactacggtgaccccaaccccaacacccaccggcacacagaccccaaccacgacacccatcaccaccaccactacggtgaccccaaccccaacacccaccggcacacagaccccaaccacgacacccatcaccaccaccactacggtgaccccaaccccaacacccaccggcacacagaccccaaccacgacacccatcaccaccaccactacggtgaccccaaccccaacacccaccggcacacagaccccaaccacgacacccatcaccaccaccactacggtgaccccaaccccaacacccaccggcacacagaccccaaccacgacacccatcaccaccaccactacggtgaccccaaccccaacacccaccggcacacagaccccaaccacgacacccatcaccaccaccactacggtgaccccaaccccaacacccaccggcacacagaccgggccccccacccacacaagcacagcaccgattgctgagttgaccacatccaatcctccgcctgagtcctcaacccctcagacctctcggtccacctcttcccctctcacggagtcaaccacccttctgagtaccctaccacctgccattgagatgaccagcacggccccaccctccacacccacggcacccacgaccacgagcggaggccacacactgtctccaccgcccagcaccaccacgtcccctccaggcacccccactcgcggtaccacgaccgggtcatcttcagcccccacccccagcactgtgcagacgaccaccaccagtgcctggaccccaacgccgaccccactctccacacccagcatcatcaggaccacaggcctgaggccctacccttcctctgtgcttatctgctgtgtcctgaacgacacctactacgcaccaggtgaggaggtgtacaacggcacatacggagacacctgttatttcgtcaactgctcactgagctgtacgttggagttctataactggtcctgcccatccacgccctccccaacacccacgccctccaagtcgacgcccacgccttccaagccatcgtccacgccctccaagccgacgcccggcaccaagccccccgagtgcccagactttgatcctcccagacaggagaacgagacttggtggctgtgcgactgcttcatggccacgtgcaagtacaacaacacggtggagatcgtgaaggtggagtgtgagccgccgcccatgcccacctgctccaacggcctccaacccgtgcgcgtcgaggaccccgacggctgctgctggcactgggagtgcgactgctactgcacgggctggggcgacccgcactatgtcaccttcgacggactctactacagctaccagggcaactgcacctacgtgctggtggaggagatcagcccctccgtggacaacttcggagtttacatcgacaactaccactgcgatcccaacgacaaggtgtcctgtccccgcaccctcatcgtgcgccacgagacccaggaggtgctgatcaagaccgtgcatatgatgcccatgcaggtgcaggtgcaggtgaacaggcaggcggtggcactgccctacaagaagtacgggctggaggtgtaccagtctggcatcaactacgtggtggacatccccgagctgggtgtcctcgtctcctacaatggcctgtccttctccgtcaggctgccctaccaccggtttggcaacaacaccaagggccagtgtggcacctgcaccaacaccacctccgacgactgcattctgcccagcggggagatcgtctccaactgtgaggctgcggctgaccagtggctggtgaacgacccctccaagccacactgcccccacagcagctccacgaccaagcgcccggccgtcactgtgcccgggggcggtaaaacgaccccacacaaggactgcaccccatctcccctctgccagctcatcaaggacagcctgtttgcccagtgccacgcactggtgcccccgcagcactactacgatgcctgcgtgttcgacagctgcttcatgccgggctcgagcctggagtgcgccagtctgcaggcctacgcagccctctgtgcccagcagaacatctgcctcgactggcggaaccacacgcatggggcctgcttggtggagtgcccatctcacagggagtaccaggcctgtggccctgcagaagagcccacgtgcaaatccagctcctcccagcagaacaacacagtcctggtggaaggctgcttctgtcctgagggcaccatgaactacgctcctggctttgatgtctgcgtgaagacctgcggctgtgtgggacctgacaatgtgcccagagagtttggggagcacttcgagttcgactgcaagaactgtgtctgcctggagggtggaagtggcatcatctgccaacccaagaggtgcagccagaagcccgttacccactgcgtggaagacggcacctacctcgccacggaggtcaaccctgccgacacctgctgcaacattaccgtctgcaagtgcaacaccagcctgtgcaaagagaagccctccgtgtgcccgctgggattcgaagtgaagagcaagatggtgcctggaaggtgctgtcccttctactggtgtgagtccaagggggtgtgtgttcacgggaatgctgagtaccagcccggttctccagtttattcctccaagtgccaggactgcgtgtgcacggacaaggtggacaacaacaccctgctcaacgtcatcgcctgcacccacgtgccctgcaacacctcctgcagccctggcttcgaactcatggaggcccccggggagtgctgtaagaagtgtgaacagacgcactgtatcatcaaacggcccgacaaccagcacgtcatcctgaagcccggggacttcaagagcgacccgaagaacaactgcacattcttcagctgcgtgaagatccacaaccagctcatctcgtccgtctccaacatcacctgccccaactttgatgccagcatttgcatcccgggctccatcacattcatgcccaatggatgctgcaagacctgcacccctcgcaatgagaccagggtgccctgctccaccgtccccgtcaccacggaggtttcgtacgccggctgcaccaagaccgtcctcatgaatcattgctccgggtcctgcgggacatttgtcatgtactcggccaaggcccaggccctggaccacagctgctcctgctgcaaagaggagaaaaccagccagcgtgaggtggtcctgagctgccccaatggcggctcgctgacacacacctacacccacatcgagagctgccagtgccaggacaccgtctgcgggctccccaccggcacctcccgccgggcccggcgctcccctaggcatctggggagcgggtgagcggggtgggcacagcccccttcactgccctcgacagctttacctcccccggaccctctgagcctcctaagctcggcttcctctcttcagatatttattgtctgagtctttgttcagtccttgctttccaataataaactcagggggacatgc

SEQ ID NO: 341 - DNA, 5182 bp, human
ttcaggaaccgggttggcgaatgcagttgccaggtgtcactgatgctacagaacagctctgccagagcccttccacgggggagggagcctgccagctgcgaggacctctgtggtggaggagttggtgctgatggtggtggtagtgaccgctatgggtccctgaggcctggctggccagcaagagggcagggttggctagaggaggaagacggcgaggacgtgcgaggggtgctgaagaggcgcgtggagacgaggcagcacactgaggaggcgatccgccagcaggaggtggagcagctggacttccgagacctcctggggaagaaggtgagtacaaagaccctatcggaagacgacctgaaggagatcccagccgagcagatggatttccgtgccaacctgcagcggcaagtgaagccaaagactgtgtctgaggaagagaggaaggtgcacagcccccagcaggtcgattttcgctctgtcctggccaagaaggggacttccaagacccccgtgcctgagaaggtgccaccgccaaaacctgccaccccggattttcgctcagtgctgggtggcaagaagaaattaccagcagagaatggcagcagcagtgccgagaccctgaatgccaaggcagtggagagttccaagcccctgagcaatgcacagccttcagggcccttgaaacccgtgggcaacgccaagcctgctgagaccctgaagccaatgggcaacgccaagcctgccgagaccctgaagcccatgggcaatgccaagcctgatgagaacctgaaatccgctagcaaagaagaactcaagaaagacgttaagaatgatgtgaactgcaagagaggccatgcagggaccacagataatgaaaagagatcagagagccaggggacagccccagccttcaagcagaagctgcaagatgttcatgtggcagagggcaagaagctgctgctccagtgccaggtgtcttctgaccccccagccaccatcatctggacgctgaacggaaagaccctcaagaccaccaagttcatcatcctctcccaggaaggctcactctgctccgtctccatcgagaaggcactgcctgaggacagaggcttatacaagtgtgtagccaagaatgacgctggccaggcggagtgctcctgccaagtcaccgtggatgatgctccagccagtgagaacaccaaggccccagagatgaaatcccggaggcccaagagctctcttcctcccgtgctaggaactgagagtgatgcgactgtgaaaaagaaacctgcccccaagacacctccgaaggcagcaatgccccctcagatcatccagttccctgaggaccagaaggtacgcgcaggagagtcagtggagctgtttggcaaagtgacaggcactcagcccatcacctgtacctggatgaagttccgaaagcagatccaggaaagcgagcacatgaaggtggagaacagcgagaatggcagcaagctcaccatcctggccgcgcgccaggagcactgcggctgctacacactgctggtggagaacaagctgggcagcaggcaggcccaggtcaacctcactgtcgtggataagccagaccccccagctggcacaccttgtgcctctgacattcggagctcctcactgaccctgtcctggtatggctcctcatatgatgggggcagtgctgtacagtcctacagcatcgagatctgggactcagccaacaagacgtggaaggaactagccacatgccgcagcacctctttcaacgtccaggacctgctgcctgaccacgaatataagttccgtgtacgtgcaatcaacgtgtatggaaccagtgagccaagccaggagtctgaactcacaacggtaggagagaaacctgaagagccgaaggatgaagtggaggtgtcagatgatgatgagaaggagcccgaggttgattaccggacagtgacaatcaatactgaacaaaaagtatctgacttctacgacattgaggagagattaggatctgggaaatttggacaggtctttcgacttgtagaaaagaaaactcgaaaagtctgggcagggaagttcttcaaggcatattcagcaaaagagaaagagaatatccggcaggagattagcatcatgaactgcctccaccaccctaagctggtccagtgtgtggatgcctttgaagaaaaggccaacatcgtcatggtcctggagatcgtgtcaggaggggagctgtttgagcgcatcattgacgaggactttgagctgacggagcgtgagtgcatcaagtacatgcggcagatctcggagggagtggagtacatccacaagcagggcatcgtgcacctggacctcaagccggagaacatcatgtgtgtcaacaagacgggcaccaggatcaagctcatcgactttggtctggccaggaggctggagaatgcggggtctctgaaggtcctctttggcaccccagaatttgtggctcctgaagtgatcaactatgagcccatcggctacgccacagacatgtggagcatcggggtcatctgctacatcctagtcagtggcctttcccccttcatgggagacaacgataacgaaaccttggccaacgttacctcagccacctgggacttcgacgacgaggcattcgatgagatctccgacgatgccaaggatttcatcagcaatctgctgaagaaagatatgaaaaaccgcctggactgcacgcagtgccttcagcatccatggctaatgaaagataccaagaacatggaggccaagaaactctccaaggaccggatgaagaagtacatggcaagaaggaaatggcagaaaacgggcaatgctgtgagagccattggaagactgtcctctatggcaatgatctcagggctcagtggcaggaaatcctcaacagggtcaccaaccagcccgctcaatgcagaaaaactagaatctgaagatgtgtcccaagctttccttgaggctgttgctgaggaaaagcctcatgtaaaaccctatttctctaagaccattcgcgatttagaagttgtggagggaagtgctgctagatttgactgcaagattgaaggatacccagaccccgaggttgtctggttcaaagatgaccagtcaatcagggagtcccgccacttccagatagactacgatgaggacgggaactgctctttaattattagtgatgtttgcggggatgacgatgccaagtacacctgcaaggctgtcaacagtcttggagaagccacctgcacagcagagctcattgtggaaacgatggaggaaggtgaaggggaaggggaagaggaagaagagtgaaacaaagccagagaaaagcagtttctaagtcatattaaaaggactatttctctaaaactcaaaaaaaaaaaaaaaactcaagatagtaaaagcacctagtgtgatagattatcggttaggtcatttgtgggttgattcttcagaaacagcagttgatacctagcagcgttattgatgggcattaatctatgttagttggcaccttaagatactagtgcagctagatttcatttagggaaatcaccagtaacttgactgaccaattgattttagagagaaagtaaccaaaccaaatatttatctgggcaaagtcataaattctccacttgaatgcgctcatgaaaaataaggccaaaacaagagttctgggccacagctcagcccagagggttcctggggatgggaggcctctctctccccaccccctgactctagagaactgggttttctcccagtactccagcaattcatttctgaaagcagttgagccactttattccaaagtacactgcagatgttcaaactctccatttctctttccccttccacctgccagttttgctgactctcaacttgtcatgagtgtaagcattaaggacattatgcttcttcgattctgaagacaggtccctgctcatggatgactctggcttccttaggaaaatatttttcttccaaaatcagtaggaaatctaaacttatcccctctttgcagatgtctagcagcttcagacatttggttaagaacccatgggaaaaaaaaaatccttgctaatgtggtttcctttgtaaaccaggattcttatttgtgctgttatagaatatcagctctgaacgtgtggtaaagatttttgtgtttgaatataggagaaatcagtttgctgaaaagttagtcttaattatctattggccacgatgaaacagatttcaactgataaagagctggagaactccatgtactttggaatctcctccaagatagccagagtttaatacatcttcattctcaacactctccaaagaacttgacctaccttatgggttccatatttttcttcttaaatgtgcatcaatcatgccttgcccccaacctttaaatatattcttagacctggtaaatgcactcagacttgcgtctttaggaatttttaactttctttcactacattggcacttaaattttttctttataaagctttttgaaggtcataaacaaagaccataattgatgatagacctaatacatttcctctgtgtgtgtgtgtaacattccaaatactttttttttcttttccactgtttgtaaggtgcaacaatttaatatttttaagggactttttaagagttccttaagaaccaatttaaaattacttcagtgcaatcctacacagtatcaacattagaattttgatattagtcttatgttatcttccattctatttttatctgctttttgctgctagtttcaaactgccagtatttttccttttgcttttaaaatagttacaatatttttcatgatagccacagtattgccacagtttattataataaagggtttttatttgatttagcgcattcaaagcttttttctatcacttttgtgttcagaatataacctttgtgtgcgtgtatgttgtgtgtgtgcatgtgtggcgtatatgtgtgttacaggttaatgccttcttggaattgtgttaatgttctcttggtttattatgccatcagaatggtaaatgagaacactacaactgtagtcagctcacaatttttaaataaaggataccacagtgcatgctgtttgttcaaaaaaaaaaaaaaaaaa

SEQ ID NO: 342 - DNA, 3624 bp, human
cagggagcctgggctggaagaggcagcaaaagggaaaatcagaagagtggacactggcaagaggagggcagcctttttcccagcttccttgcaccatggacagctcccattaagccacctctccatcctggggccaggactcttatgccccattcctgtcaaattgagatttcatccaccattctccaaggacagtgaagttataccctagttccagtgttgggatcagtggcccctctggacatgcctctcctggaaggttctgtgggggtggaggatcttgtcctcctggaacccttggtggaggagtcactgctcaagaatcttcagcttcgctatgaaaacaaggagatttatacctacattgggaatgtggtgatctcagtgaatccctatcaacagcttcccatctatgggccagagttcattgccaaatatcaagactatactttctatgagctgaagccccatatctacgcattggcaaatgtggcgtaccagtcactgagggacagggaccgagaccagtgtatcctcatcacaggcgagagtggatcagggaagactgaggccagcaagctggtgatgtcttatgtggctgccgtctgtgggaaaggagagcaggtgaactctgtgaaggagcagctgctacagtctaacccagtgctggaggcttttggcaatgccaagaccattcgcaacaacaattcctcccgatttggaaaatacatggatattgaatttgacttcaagggatcccccctcggtggtgtcatcacaaactatctgcttgagaaatcccgattagtgaagcagctcaaaggagaaaggaacttccacatcttctatcagctgctggctggagcagatgaacagctgctgaaggccctgaagcttgagcgggatacaactggctatgcctatctgaatcatgaagtatccagagtggatggcatggacgacgcctccagcttcagggctgtacagagtgcaatggcagtgattgggttctcggaggaggagattcgacaagtgctagaggtgacatccatggtgctaaagctggggaacgtgttggtggctgatgagttccaggccagtgggataccagcaagtggcatccgtgatgggagaggtgttcgggagattggggagatggtgggcttgaattcagaagaagtagagagagctttgtgctcgaggaccatggaaacagccaaggaaaaggtggtcactgcactgaatgttatgcaggctcagtatgctcgggacgccctggctaagaacatctacagccgcctctttgactggatagtgaatcgaatcaatgagagcatcaaggtgggcatcggggaaaagaagaaggtaatgggagtccttgatatctacggttttgagatattagaggataatagctttgagcaatttgtgatcaactactgcaatgagaagctgcagcaggtgttcatagagatgaccctgaaagaagagcaagaggaatataagagagaaggcataccgtggacaaaggtggactactttgataatggcatcatttgtaagctcattgagcataatcagcgaggtatcctggccatgttggatgaggagtgcctgcggcctggggtggtcagtgactccactttcctagcaaagctgaaccagctcttctccaagcatggccactacgagagcaaagtcacccagaatgcccagcgtcagtatgaccacaccatgggcctcagctgcttccgcatctgccactatgcgggcaaggtgacatacaacgtgaccagctttattgacaagaataatgacctactcttccgagacctgttgcaggccatgtggaaggcccagcaccccctccttcggtccttgtttcctgagggcaatcctaagcaggcatctctcaaacgccccccgactgctggggcccagttcaagagttctgtggccatcctcatgaagaatctgtattccaagagccccaactacatcaggtgcataaagcccaatgagcatcagcagcgaggtcagttctcttcagacctggtggcaacccaggctcggtacctgggactgctggagaacgtacgggtgcgacgggcaggctatgcccaccgccagggttatgggcccttcctggaaaggtaccgattgctgagccggagcacctggcctcactggaatgggggagaccgggaaggtgttgagaaggtcctgggggagctgagcatgtcctcgggggagctggcctttggcaagacaaagatcttcattagaagccccaagactcttttctacctcgaagaacagaggcgcctgagactccagcagctggccacactcatacagaagatttaccgaggctggcgctgccgcacccactaccaactgatgcgaaagagtcagatcctcatctcctcttggtttcggggaaacatgcaaaagaaatgctatgggaagataaaggcatccgtgttattgatccaggcttttgtgagagggtggaaggcccgaaagaattatcgcaaatatttccggtcagaggctgccctcaccttggcagatttcatctacaagagcatggtacagaaattcctactggggctgaagaacaatttgccatccacaaacgtcttagacaagacatggccagccgccccctacaagtgcctcagcacagcaaatcaggagctgcagcagctcttctaccagtggaagtgcaagaggttccgggatcagctgtccccgaagcaggtagagatcctgagggaaaagctctgtgccagtgaactgttcaagggcaagaaggcttcatatccccagagtgtccccattccattctgtggtgactacattgggctgcaagggaaccccaagctgcagaagctgaaaggcggggaggaggggcctgttctgatggcagaggccgtgaagaaggtcaatcgtggcaatggcaagacttcttctcggattctcctcctgaccaagggccatgtgattctcacagacaccaagaagtcccaggccaaaattgtcattgggctagacaatgtggctggggtgtcagtcaccagcctcaaggatgggctctttagcttgcatctgagtgagatgtcatcggtgggctccaagggggacttcctgctggtcagcgagcatgtgattgaactgctgaccaaaatgtaccgggctgtgctggatgccacgcagaggcagcttacagtcaccgtgactgagaagttctcagtgaggttcaaggagaacagtgtggctgtcaaggtcgtccagggccctgcaggtggtgacaacagcaagctacgctacaaaaaaaaggggagtcattgcttggaggtgactgtgcagtgaggagggggcaccatgcagagatggcagttgcttcctcctgaaccagcactaatccccctctgccctcctgtgtgggaggatctctaacccctctgatcgtggcgcatggcttggggattaaactacccttgaagaggacccttgtcccaaacccttcttgttctctcctccaaaagtagcttcctccaacccgcagcctctctgcacactaataaaacatgtggcttggaaaggttcaaaaaaaaaaaa

SEQ ID NO: 343 - DNA, 4613 bp, human
atgaagatggcggacgcgaagcagaagcggaacgagcagctgaaacgctggatcggctccgagacggacctcgagcctccggtggtgaagcgccagaagaccaaggtgaagttcgacgatggcgccgtcttcctggctgcttgctccagcggcgacacggacgaggtcctcaagctgctgcaccgcggcgccgacatcaattacgccaatgtggacggactcactgccctgcaccaggcttgcattgatgacaatgttgatatggtgaagtttctggtagaaaatggagcaaatattaatcaacctgataatgaaggctggataccactacatgcagcagcttcctgtggatatcttgatattgcagagtttttgattggtcaaggagcacatgtaggggctgtcaacagtgaaggagatacacctttagatattgcggaggaggaggcaatggaagagctacttcaaaatgaagttaatcggcaaggggttgatatagaagcagctcgaaaggaagaagaacggatcatgcttagagatgccaggcagtggctaaatagtggtcatataaatgatgtccggcatgcaaaatctggaggtacagcacttcacgttgcagctgctaaaggctatacggaagttttaaaacttttaatacaggcaggctatgatgttaatattaaagactatgatggctggacacctcttcatgctgcagctcattggggtaaagaagaagcatgtcgaattttagtggacaatctgtgtgatatggagatggtcaacaaagtgggccaaacagcctttgatgtagcagatgaagacattttaggatatttagaagagttgcaaaagaaacaaaatctgctccatagtgaaaaacgggacaagaaatctccactaattgaatcaacagcaaatatggacaataatcagtcacagaagacctttaaaaacaaagagacgttgattattgaaccagagaaaaatgcatcccgtattgaatctctggaacaagaaaaggttgatgaagaagaagaaggaaagaaggatgagtctagctgctctagtgaagaagatgaggaagatgactcggaatcagaagctgaaacagataagacaaaacccctggcttctgtaactaatgccaacacttctagtacacaagcagctcctgtagctgttacaacacctactgtgtcatcaggtcaagcaacacctacatcacctattaaaaagtttccaaccacagctacaaaaatttctcccaaagaagaagagagaaaagatgagtctcctgcaacttggaggttaggacttagaaagacgggcagctatggtgcacttgctgaaatcacagcatctaaagagggtcagaaagaaaaagatactgcaggtgttacacgttcagcttcaagtcccagactttcctcctctttggataataaagaaaaggagaaagatagtaaaggaactaggcttgcatatgttgcacctacaataccaagacgactagccagtacatctgacattgaagagaaagaaaacagagattcttcaagtttgcgaacaagtagttcatatacaaggagaaaatgggaagatgatcttaaaaaaaatagctcagttaatgaaggatcaacgtatcataaaagttgctcctttggtagaagacaagatgatttgattagttctagtgttccaagcaccacatcaacaccaacagttacctctgcagctgggcttcagaaaagcctgctttccagcacaagcactactacaaagattacaacgggttcttcctcagcaggcacacaaagcagtacctcaaatcgtttgtgggctgaggatagtactgagaaagaaaaggacagtgttcctacggcagtgaccattcctgttgctccaactgttgtaaatgctgcagcttctaccacaaccctgactacaactactgctggcactgtctcctccacaacagaggtcagggagagacgcagatcatacctcactcctgttagggatgaagagtctgaatcccaaagaaaagcaagatctagacaagcaagacaatctagaagatcaacacagggagtgacattaactgatcttcaagaagctgagaaaacaataggaagaagtcgttctacccgaaccagagaacaagaaaatgaagaaaaagaaaaagaggaaaaagagaaacaagataaagagaaacaagaagaaaagaaggagtcagaaacatctagagaagatgaatataaacaaaagtactccagaacgtatgatgagacttaccagcgttataggccagtatcaacttcaagttcaaccactccatcctcttcactttctactatgagcagttcactgtatgcttcaagtcaactaaacaggccaaatagtcttgtaggcataacttctgcttactccagaggaataacaaaagaaaatgaaagagagggagaaaaaagagaagaggagaaagaaggagaagataaatcacaacctaaatcaatcagagaacgacgacgaccaagagagaaaagaagatctacaggagtttcattttggacacaagatagtgatgaaaatgaacaagaacaacaatcagacacagaagagggatccaataagaaagaaactcagacggattccatttctagatatgaaaccagttctacatcagctggtgatcgatatgattccttgctgggtcgctctggatcatacagttacttagaagaaagaaaaccttacagcagcaggctagaaaaggatgactcaactgactttaaaaagctttatgaacaaattctagctgaaaatgaaaagctgaaggcacagctacatgatacaaatatggaactaacagatcttaaattacagttggaaaaggccacccagagacaagaaagatttgctgatagatcactgttggaaatggaaaaaagggaacgaagagctctagaaagaagaatatctgaaatggaagaagagctcaaaatgttaccagacctaaaagcagacaaccagaggctaaaggatgaaaatggggccttgatcagagttataagcaaactttccaaataaaaaaaaaaaagcagcaagtaatggaattgcacatattagtaacccagtggaccataattggcagtcactggaagtctgggaagaatccttggagactgtcattttcggatatcctgccaaatgccctcttatctagaatttttgtttcattttgtttaattttctggggtgtttttgttgttgttggtttgttttttgtttttttttttaatcaagaccattgtttcatgttaatgcagctgctgagaagatttttttttaatgactgagaaaacttgtttacagctccagcatataaggaaagtgttcaaggccagatatgcctcagatatttaaccagtaagccttagttgtacataaatacttttgtgtcaacaaaaactttcagctctcacagaagacagttactcaacattttttgatgtgccacagtttcgagtttttcgatatttaaattttttggcttttcatctaagtttgggtttgtattttttccttctaaactcttcatgtggcagagtcttctatgttttcacggctttttcattacagaaaagaacacttgctcttctgtgattattgtcatgtattaggctaatgctgtgttgtctcccacctggaactgaattgcttggtggaacatatgctttcactgtttgtgcaatatgcatttatttcttatatgaatgctttaaagtcatttgaggttagatcttttaattcctattttctgcttcattggtcactttttttttattgtagtataagatgttagattctgtaatcttcacattcattttagcaggtactgagtgatgctgtatatacaaataagtgtattgttttgatttttagaccaccacatggcatgcttgactatttcttatttcaaatgtctgctaatgcagagtaggctactccatgatagtgttaaaaaacaaaatttgctaacaatgtgatataaagactttaaaagttacacattatgtggagccctatctttacaaaagtttcctactgtaaagtgcttttattttcagttttcatttgatagtactcaaccataattaaagttgcataagataattgctttacatttcacatacctatatttatctgagtgctgtctaaaactgttgtgctagccaaagtaatgctatgaaatcatttgcagaattaacccgtgagttaatgttaaatgcactgttattgccatgtgaagaggcatcgactttgataccaccatcatgttcagaccattttatacatttcagtggcctttttttttttaaggaaaaaaaagcgcaaaaccaagtacatagtgacgatggcttttatttggacaaatagcttttatattttcattaaaccatgcaaaaaatactacatctttctggcacataactgtctccttaaccactggaacagttcagccatttgaataaattgtacattgtaaagcttatagtagctgattgtattattgattgtattgtatactatattaaatgtgaatttgt

SEQ ID NO: 344 - DNA, 1089 bp, human
ggcacagtaagtactttctgtgccgctactgtctatccgcagccatccgcctttctttcgggctaggccgccccggggactgagagttaaggagagttggaggctttactgggccacagggttcctactcgcccctgggcctccggacaaaatggggtctgcggttggtgtcctggcaaaagcagggtagaagggctgcggggcgggcccagaatccgagcctgcagagatgggagcagttgcagtgttgagggcggaagaggagtgcgtcttgttttgggaactgcttcacaggatccagaaaaggaaatgcccggcgaagccacagaaaccgtccctgctacagagcaggagttgccgcagccccaggctgagacagggtctggaacagaatctgacagtgatgaatcagtaccagagcttgaagaacaggattccacccaggcaaccacacaacaagcccagctggcggcagcagctgaaatcgatgaagaaccagtcagtaaagcaaaacagagtcggagtgaaaagaaggcacggaaggctatgtccaaactgggtcttcggcaggttacaggagttactagagtcactatccggaaatctaagaatatcctctttgtcatcacaaaaccagatgtctacaagagccctgcttcagatacttacatagtttttggggaagccaagatcgaagatttatcccagcaagcacaactagcagctgctgagaaattcaaagttcaaggtgaagctgtctcaaacattcaagaaaacacacagactccaactgtacaagaggagagtgaagaggaagaggtcgatgaaacaggtgtagaagttaaggacatagaattggtcatgtcacaagcaaatgtgtcgagagcaaaggcagtccgagccctgaagaacaacagtaatgatattgtaaatgcgattatggaattaacaatgtaaccatatggaagcaactttttttggtgtctcaaaggagtaactgcagcttggtttgaaatttgtactgtttctatcataaataaagttatggcttcttgttggaaaaaaaaaaaaaaaaaaaaaaaaaaaaaa

SEQ ID NO: 345 - DNA, 2908 bp, human
ctgctcgcggcgccgcctcctgctcctcccgctgctgctgccgctgccgccctgagtcactgcctgcgcagctccggccgcctggctccccatactagtcgccgatatttggagttcttacaacatggcagacattgacaacaaagaacagtctgaacttgatcaagatttggatgatgttgaagaagtagaagaagaggaaactggtgaagaaacaaaactcaaagcacgtcagctaactgttcagatgatgcaaaatcctcagattcttgcagcccttcaagaaagacttgatggtctggtagaaacaccaacaggatacattgaaagcctgcctagggtagttaaaagacgagtgaatgctctcaaaaacctgcaagttaaatgtgcacagatagaagccaaattctatgaggaagttcacgatcttgaaaggaagtatgctgttctctatcagcctctatttgataagcgatttgaaattattaatgcaatttatgaacctacggaagaagaatgtgaatggaaaccagatgaagaagatgagatttcggaggaattgaaagaaaaggccaagattgaagatgagaaaaaggatgaagaaaaagaagaccccaaaggaattcctgaattttggttaactgtttttaagaatgttgacttgctcagtgatatggttcaggaacacgatgaacctattctgaagcacttgaaagatattaaagtgaagttctcagatgctggccagcctatgagttttgtcttagaatttcactttgaacccaatgaatattttacaaatgaagtgctgacaaagacatacaggatgaggtcagaaccagatgattctgatcccttttcttttgatggaccagaaattatgggttgtacagggtgccagatagattggaaaaaaggaaagaatgtcactttgaaaactattaagaagaagcagaaacacaagggacgtgggacagttcgtactgtgactaaaacagtttccaatgactctttctttaacttttttgcccctcctgaagttcctgagagtggagatctggatgatgatgctgaagctatccttgctgcagacttcgaaattggtcactttttacgtgagcgtataatcccaagatcagtgttatattttactggagaagctattgaagatgatgatgatgattatgatgaagaaggtgaagaagcggatgaggaaggggaagaagaaggagatgaggaaaatgatccagactatgacccaaagaaggatcaaaacccagcagagtgcaagcagcagtgaagcaggatgtatgtggccttgaggataacctgcactggtctaccttctgcttccctggaaaggatgaatttacatcatttgacaagcctattttcaagttatttgttgtttgtttgcttgtttttgtttttgcagctaaaataaaaatttcaaatacaattttagttcttacaagataatgtcttaattttgtaccaattcaggtagaagtagaggcctaccttgaattaagggttatactcagtttttaacacattgttgaagaaaaggtaccagctttggaacgagatgctatactaataagcaagtgtaaaaaaaaaaaaaaaagaggaagaaaatcttaagtgattgatgctgttttcttttaaaaaaaaaaaaaaaaattcattttctttgggttagagctagagagaaggccccaagcttctatggtttcttctaattcttattgcttaaagtatgagtatgtcacttacccgtgcttctgtttactgtgtaattaaaatgggtagtactgtttacctaactacctcatggatgtgttaaggcatattgagttaaatctcatataatgtttctcaatcttgttaaaagctcaaaattttgggcctatttgtaatgccagtgtgacactaagcattttgttcacaccacgctttgataactaaactggaaaacaaaggtgttaagtacctctgttctggatctgggcagtcagcactctttttagatctttgtgtggctcctatttttatagaagtggagggatgcactatttcacaaggtccaagatttgttttcagatatttttgatgactgtattgtaaatactacagggatagcactatagtattgtagtcatgagacttaaagtggaaataagactatttttgacaaaagatgccattaaatttcagactgtagagccacatttacaatacctcaggctaattactgttaattttggggttgaactttttttgacagtgagggtggattattggattgtcattagaggaaggtctagatttcctgctcttaataaaattacattgaattgatttttagaggtaatgaaaacttcctttctgagaagttagtgttaaggtcttggaatgtgaacacattgtttgtagtgctatccattcctctcctgagattttaacttactactggaaatccttaaccaattataatagctttttttctttattttcaaaatgatttcctttgctttgattagacactatgtgctttttttttttaaccatagttcatcgaaatgcagctttttctgaacttcaaagatagaatcccatttttaatgaactgaagtagcaaaatcatctttttcattctttaggaaatagctattgccaaagtgaaggtgtagataatacctagtcttgttacataaaggggatgtggtttgcagaagaattttctttataaaattgaagttttaagggacgtcagtgtttatgccatttttccagttccaaaatgattccattccattctagaaatttgaagtatgtaacctgaaatccttaataaaatttggatttaattttataaaaaaaaaaaaaaaaaaaaaaaaaaaaaaaa

SEQ ID NO: 346 - DNA, 2714 bp, human
ccgacatgttgagtcataagacgcgtcggtgttgcagtctgtgtccttggaggtgaccagggccactgcaggcatggtgctagcagagctgtacgtctctgaccgagagggaagcgatgccacgggagatggaaccaaggagaaaccatttaaaacaggtctaaaggctttgatgacagtagggaaagaaccatttcctaccatttacgtagattcacaaaaagaaaatgagaggtggaatgttatttctaaatcacagttgaagaacattaaaaagatgtggcatagggaacaaatgaagagtgaatcccgggaaaagaaagaggcagaagatagtttacgaagagaaaagaacctggaagaagcaaagaagattaccattaaaaatgatccaagtctcccagagccaaaatgtgtgaagattggtgcgttagaaggatatagaggccaaagagtaaaggtgtttggctgggtccacaggctgcgcaggcaaggaaagaatttaatgtttctggtgttgcgagatggtacaggttatcttcagtgtgtcttggcggatgagttgtgtcagtgctacaatggagttctcttgtccacggagagcagtgttgcagtgtatggaatgctaaatcttaccccaaagggcaagcaggctccaggtggccatgagctgagttgtgacttctgggaactaattgggttggcccctgctggaggagctgacaacctgatcaatgaggagtctgacgttgatgtccagctcaacaacagacacatgatgatccgaggagaaaacatgtccaaaatcctaaaagcacgatccatggtcaccaggtgctttagagatcacttctttgatagggggtactatgaagttactcctccaacattagtgcaaacacaagtagaaggtggtgccacactcttcaagcttgactattttggggaagaggcatttttgactcaatcctctcagttgtacttggagacctgcctcccagccctgggagatgttttttgtattgctcagtcataccgggcagagcagtccagaacacgaaggcacctggctgagtacactcacgtggaagctgagtgtcctttcctgacttttgacgacctcctgaaccggttggaggacttggtttgtgatgtggtagatcgaatattgaagtcacctgcagggagcatagtgcatgagctcaacccgaactttcagccccccaaacggcctttcaaacggatgaactattcagatgctatcgtttggctaaaagaacatgatgtaaagaaagaagatggaactttctatgaatttggagaagatatcccagaagctcctgagagactgatgacagacaccattaatgaaccaatcttgctgtgtcgatttcctgtggagatcaagtccttctacatgcagcgatgtcctgaggattcccgtcttactgaatctgtcgacgtgttgatgcccaatgttggtgagattgtgggaggctcaatgcgtatctttgatagtgaagaaatactggcaggttataaaagggaagggattgaccccactccctattactggtatacggatcagagaaaatacggtacatgtccccatggaggatatggcttgggcttggaacgattcttaacgtggattctgaataggtatcacatccgagacgtgtgcttataccctcgatttgtccagcgttgcacgccataaccattttctccagaagcgtggaggaaagattatgaaaggaacaggctctttaaaaaagaaaacaaaaagccagaatcttccttttttttgtttcattggggtttctctttctgtttttctttctactaccataaaaactatctcaaatcacctgaacatcaagtgatattaaggttgtcatcttaagaaaaaatatccatttttttcttaagttcgggaaacaaagttcggggaaaatacctggcatgaaactgtagttagggatacatttcagcattttactcactttatccaagttattcattttattcaagttatatgtatgtataattcaacaattttagattatggtgtaagatactccagtaacttatctttctgtccttttaagtgtacctggaattctttgatttattttattgcatcaatgaattaaaacaaaaatcttgggggaagaaattggcaatatcgtataaaaatctgctcatattagaacacagtataattcagcagtaaacactagaatcaaatgaatagccttttgtatcagttattaatcttttctaactctgcttagctgctaataatcctgaggcatagaaattgaagaatttgtaaaaatagaattgccttaaaggatttgaagtaagaacataattttggggagagttttttagtgattcacagtatccctcttagcattaatttaaggtaaagaggcagattgattttccctctttcctggtaattcctaagtaattaagaataaataagttccaaaagaaattgtagctggaatcttaataacaattgtgagtggctgtttgagttgcccccaccatgtccttagatctaatctgtgctaccttattaactcacagcaggcttactgaatggcttcatttcagatttagttgatttctccaccaaatgcatgtcatgtattctcaataggctgtattcccagcagtcaataaatgaacacccgtaaaaa

SEQ ID NO: 347 - DNA, 600 bp, human
gagggtccgcggttggtcagaccggggcacttggcctgaagacctggaattggcgacttcgatattaacaaggatggcggcggccgcagcaagtcgaggagtcggggcaaagctgggcctgcgtgagattcgcatccacttatgtcagcgctcgcccggcagccagggcgtcagggacttcattgagaaacgctacgtggagctgaagaaggcgaatcccgacctacccatcctaatccgcgaatgctccgatgtgcagcccaagctctgggcccgctacgcatttggccaagagacgaatgtccctttgaacaacttcagtgctgatcaggtaaccagagccctggagaacgttctaagtggtaaagcctgaagcctccactgaggattaagagcaacagccccagagcctgggctctgctggacttagtataatgtgaaaaaaatgtgttctcctattcctcataaagcttgtgctgtaaaatactttctcagggtgttcttgtcctcatctaccctctaccccttactgtgcaaccactgaggcaaagtagcttaatataaaaataaaactttattctgtctcaaaaaaaaaaaaaa

SEQ ID NO: 348 - DNA, 1550 bp, human
tggagctaagctgtttccagggtgacagagtggcgacctcggtggtcgattgagcaggtctgagaattgttcccaaagggttgtgcgtcaccgagtcgttggcgctgtcatggcgggtgtgctgaagaagaccactggccttgtgggattggctgtgtgcaatactcctcacgagaggctaagaatattgtacacaaagattcttgatgttcttgaggaaatccctaaaaatgcagcatatagaaagtatacagaacagattacaaatgagaagctggctatggttaaagcggaaccagatgttaaaaaattagaagaccaacttcaaggcggtcaattagaagaggtgattcttcaggctgaacatgaactaaatctggcaagaaaaatgagggaatggaaactatgggagccattagtggaagagcctcctgccgatcagtggaaatggccaatataattattaagtgactttggtgtgttcatgggaaactgatgtaattaaatattctgttatattaagagcgtgttcttattactgacattttgtaatcaagaaaagtgatatagaaaatatgtaggagactgttaaaattggtgattatggtaatatggtcatgtgaatcaatttttgatttataaagtactcacacaagttgtttcaaagatgatatttctgtgaacagagaggccatgggaagatttgaaaattattaaagaaaaattcctacagattttcaatgcagagaccataatcaaaaagtaaactttctttagtagtatgttcaatacatcatttaattttttaagttatcctgaagaaggaaaggtccttaattattatagtctaaacaaatttatagattactgtttgaagtaaataatacgagtgaatattttcaaatgtgataaaatagcacaagtggctggtgataaaatttgaaattatggttaacctcagctgtgatcttatgtatgtaaagtgaaatttaaatagataattataggttgattacaaaatccatagtgtcattttattttagtcattattgaattataccatttactctgttttcttatagtcttaattttattatattttgttgttactgtattatatttgaaaaccttcaaattagaatacattgtacagttaaagaaattgacttggtacttaaaagaaagatttcccattgcatacaggttattggagaaattttccttttgttgcatttgtggaagttagttttctggcccgtggcctttaattttcttaatcaacctaattacatcaggatagaggtagagtttctgtaaaagaagagacattaagagttcctgaaatttatatctggcataccgataggcttatattcaaaacatcttagtcatacgaccataaattaaaagtggagtcactaaatagtttgcagtacgtttctaatataagtgtaggtgggtatcaaaacaagacaaatgctgttcagggaaagaagttggcaagcttaaggttaaacaaaaataaaattacatgtgttttcgccttccta

SEQ ID NO: 349 - DNA, 1063 bp, human
gatggcggggagcggcgtccgccaagctacttctaccgccagcaccttcgtgaagcccattttcagtcgggacatgaacgaggccaagcggagggtgcgcgagctctaccgcgcctggtatcgggaggtgccgaacactgtgcaccaattccagctggacatcactgtgaaaatgggacgggataaagtccgagaaatgtttatgaagaatgcccatgtcacagaccccagggtggttgatcttctggtcattaagggaaagatcgaactggaagaaacaattaaagtatggaagcagcggacacatgttatgcggttcttccatgaaacagaagcgccaaggccaaaggatttcctatccaagttctatgttggccacgatccatgaagtcattcagtggaaagatgcacgttgatactattttagagcacaaataaactcactatacaatggtcactttgtgatagaattccattgatgaaccaattttctgcagcctctttttgcctgagcaagtgggaccttggtatacacatcacctgttctttcccttttcttgaaatgtggtgtttgctgtaaattggattgaattatttttctcagagccttgcatgtcagtaaacaggaaggaaggaggccatctgttcaaaaattgtgacattgggcatgaggctggacgacttgttaatgtagttgtttctatagcccctatgattagacacttcagtgtcagggcacagattatctaaaattagccagctcttcctgtcagggatcagggcagcactaacaggcgcaaaagtagagctgtcaagatgggctagttttccttgggttctgaagaaaatggatgtgcaaaggcttggctccgctacttgtaacaagctccagcccttaaaatgaaattaacttcctactcaggcaccctgcttaggtgcacagctgttcaatatacacagagaacagaaatattcctactgtctttggaaaccctggtgtacctctcagtggcagaataaacatcaacacaggttcaagaactgaaaaaaaaaaaaaaaaaaa

SEQ ID NO: 350 - DNA, 859 bp, human
ggttgggcagggcaatacgcctgcgtgttgccggatgcgcatgcgcaggcgccgtgtggcactcggcggtcgaaaggggagttcaaggagacgggggcgacgcggctgagggcttctcgtcggggtcggggctgcagccgtcatgccggggatagtggagctgcccactctagaggagctgaaagtagatgaggtgaaaattagttctgctgtgcttaaagctgcggcccatcactatggagctcaatgtgataagcccaacaaggagtttatgctctgccgctgggaagagaaagatccgaggcggtgtttagaggaaggcaaactggtcaacaagtgtgctttggacttctttaggcagataaaacgtcactgtgcagagccttttacagaatattggacttgcattgattatactggccagcagttatttcgtcactgtcgcaaacagcaggcaaagtttgacgagtgtgtgctggacaaactgggctgggtgcggcctgacctgggagaactgtcaaaggtcaccaaagtgaaaacagatcgacctttaccggagaatccctatcactcaagaccaagaccggatcccagccctgagatcgagggagatctgcagcctgccacacatggcagccgcttttatttctggaccaagtaaagatgggtccgtggcccacactcggtcatgtgctcagacaacgactgatgaaaacgcccatgcggtttgcatcgactgatagtgtgttctttccgggatcacaaacattaacaaaaaagttaacttatgtgacttggcagttattctataccatttcctgtccattaaaatttttaaaggaaaaaaaaaaaaaaaaaa

SEQ ID NO: 351 - DNA, 1334 bp, human
gtgggaaaagatggcggctgccgcacaatcccgggttgtccgggtcctgtcaatgtcacgttctgccattactgcaatagccacatctgtgtgtcacggcccaccctgtcgccagcttcatcatgccctcatgcctcatgggaaaggtggacgttcctcagtcagtgggattgtggccactgtgtttggagcaacaggattcctggggcgatatgttgtcaaccaccttggacgcatggggtcacaggtaatcataccctatcggtgtgataaatatgacatcatgcaccttcgtcccatgggtgacctgggccagcttctgtttctggaatgggacgcgagagataaagattctatccgacgagtagtacaacacagcaatgtggtcatcaatcttattggacgagactgggaaaccaaaaactttgattttgaggatgtttttgtgaagattccccaagcaattgctcaactgtccaaggaagctggagttgaaaaattcattcatgtttcacatctgaatgcgaatattaaaagctcttctagatatttgagaaataaggctgttggagagaaagtagtgagagatgcatttccggaagccattatcgtaaagccgtcggacatctttggaagagaggatagattccttaattcttttgcaagtatgcatcggtttggtcctataccccttggttccttgggctggaagacagttaaacaaccagtatatgtcgtagatgtatccaaaggaattgttaatgcagttaaggatcctgatgccaatgggaaatcctttgctttcgttggtcccagtcggtacctccttttccacctggtgaagtacatctttgctgtggctcacagattgttcctcccattccccttgccgctttttgcctatcgatgggtagcaagagtctttgaaataagcccatttgagccctggataacaagggataaagtggagcggatgcacatcacagacatgaaattgcctcacctgcctggcttagaagaccttggtattcaggcaacaccactggaactcaaggccattgaggtgctgcggcgtcatcgcacttaccgctggctgtctgctgaaattgaggatgtgaagccggccaagaccgtcaacatttagtgcctcctgagcagctcttggttttggcgtcttttgggtcggcccatgtggtttgagcacccagccaggcggtctctttagaggatcctgtacacagttccactattaaaacatttcaggttgaaaaaaaaaaaaaaaaaaaaaaaaaaaaaaaaaaaaaaaaaaaaaaaaaaaaaaaaaaaaaaaaaaa

SEQ ID NO: 352 - DNA, 1088 bp, human
ctcccttcttcctcctgcccgtagtagccatggcggccatgagtttgttgcggcgggtttcggttactgcggtggcagctctgtctggccggccccttggcactcgcctcggatttgggggcttcctcactcgtggctttccgaaggctgctgctcctgttcgacacagtggagaccatgggaaaagactatttgtcatcagaccttctagattctatgacaggcgttttttgaagttattgagattctacattgcattgactgggattccagtagcaattttcataactctggtgaatgtattcattggtcaagctgaactagcagaaattccagaaggctatgtcccagaacactgggaatattataagcatcccatatcaagatggattgcccgtaatttctatgatagtcctgaaaagatatatgaaagaacaatggccgtccttcagattgaagctgaaaaggctgaattacgggtaaaggagctggaagtgcgaaaattgatgcatgtgagaggagatggaccctggtattactatgagacaattgacaaggaacttattgatcattctccgaaagcaactcctgacaattaagcatttttttctccaaatacaaagtatattctctttattggaaaataaattaataaatatattctgtatttttgctctccgtgaaaaacaaaagagcctctgacattactgtctctcagtgttggttcagattgaggcttttgtttgaggagtttggcttccagtccccaaagaaggtttaaaatgtactaataaaaactggagaaataggaatttgtgaactcctaaaattgtagcaactttgaaaggttagtgttttatttacctgacaaatggaagttatagaagtctaataatgttaagcaccagtaattatagtattttgtacaaatgcctgtactgtagatgtctgtattattgaggggcaactcaggattttaagttccataaagtattgaaccaactctaaaatgttaactccttaataaacagattctcagtaaacaaattttaaagtttaaaaaaaaaaaaaaaaaaaaaaaaaaaaaa

SEQ ID NO: 353 - DNA, 570 bp, human
actgaggggtcagtggttccgggtaggagctaggtgaccctcggctgctgcagggatctgcagcgactgcagccatgggggcccacctggtccggcgctacctgggcgatgcctcggtggagcccgaccccctgcagatgccaaccttcccgccagactacggcttccccgaacgcaaggagcgcgagatggtggccacacagcaggagatgatggacgcgcagctgaggctccagctgcgggactactgcgcccaccacctcatccggctgctcaagtgcaagcgtgacagcttccccaacttcctggcctgcaagcaggagcggcacgactgggactactgcgagcaccgcgactatgtgatgcgcatgaaggagtttgagcgggagcggaggctgctccagcggaagaagcggcgggagaagaaggcggcagagttggccaaaggccagggacccggggaagtggaccccaaggtggccctgtagggggtgcaccccccaccctatggaccagtcaaataaaagccttcaggcccctcaaaaaaaaaaaaaaaaaaaaaaaaaaaaa

SEQ ID NO: 354 - DNA, 689 bp, human
cggcatgtggaagaaggtgaagatggcggtggccagggccggggtcttgggagtccagtggctgcaaagggcatcccggaacgtgatgccgctgggcgcacggacagcctcccacatgaccaaggacatgttcccggggccctatcctaggaccccagaagaacgggccgccgccgccaagaagtataatatgcgtgtggaagactacgaaccttacccggatgatggcatggggtatggcgactacccgaagctccctgaccgctcacagcatgagagagatccatggtatagctgggaccagccgggcctgaggttgaactggggtgaaccgatgcactggcacctagacatgtacaacaggaaccgtgtggatacatcccccacacctgtttcttggcatgtcatgtgtatgcagctcttcggtttcctggctttcatgatattcatgtgctgggtgggggacgtgtaccctgtctaccagcctgtgggaccaaagcagtatccttacaataatctgtacctggaacgaggcggtgatccctccaaagaaccagagcgggtggttcactatgagatctgaggaggcttcgtgggcttttgggtcctctaactaggactccctcattcctagaaatttaaccttaatgaaatccctaataaaactcagtgctgtgttaaaaaaaaaa

SEQ ID NO: 355 - DNA, 736 bp, human
agccgcctcggtcctctgtagcgggcgacctaggccccgggacccggacggaggtagaggccagggcagcgcgtccgggagcggagtccgcgcccgccgccgccatgccggacagctgggacaaggatgtgtaccctgagcccccgcgccgcacgccggtgcagcccaatcccatcgtctacatgatgaaagcgttcgacctcatcgtggaccgacccgtgaccctcgtgagagaatttatagagcggcagcacgcaaagaacaggtattactactaccaccggcagtaccgccgcgtgccagacatcactgagtgcaaggaggaggacatcatgtgcatgtatgaagccgaaatgcagtggaagagggactacaaagtcgaccaagaaattatcaacattatgcaggatcggctcaaagcctgtcagcagagggaaggacagaactaccagcagaactgtatcaaggaagtggagcagttcacccaggtggccaaggcctaccaggaccgctatcaggacctgggggcctacagttctgccaggaagtgcctggccaaacagaggcagaggatgctgcaagagagaaaagctgcaaaagaggccgccgctgccacctcctgaggcagctgtgggtgcccctgctgtgtggctctgtatgactgttgctgaaatataaagccctgcaacctgaaaaaaaaaaaaaaaaaaaaaaaaaaaaaaaaaaaaaaaaaaaa

SEQ ID NO: 356 - DNA, 2061 bp, human
gccccaggagaggcagagagtgagggaaagggcctggccggcatgcacagataggatcacggtcctgggagaattcctgctcttatagtctaacctaccatggcttctcttttctcaaggctccctcatgctgccctttggccctagtggctggtttccagggctgaggggactgagtgagctgcctgagaaaagagggtagggaacagaaaagccagccaggagctgtgggaggaaacgccctcagtaaagatgaccgcggtcactgttatctaaacgcaagtgaagccgagtcacaggacccggatgttgtcagttcgacggtaaacgaccctgccagcttccaagagggcggcttcactgtgcgaataggtgagaagccaagaaggaggcgcgctggagttacttccgcccggttctccttcccgcagtctgcagccggagtaagatggcggcgctgagggctttgtgcggcttccggggcgtcgcggcccaggtgctgcggcctggggctggagtccgattgccgattcagcccagcagaggtgttcggcagtggcagccagatgtggaatgggcacagcagtttgggggagctgttatgtacccaagcaaagaaacagcccactggaagcctccaccttggaatgatgtggaccctccaaaggacacaattgtgaagaacattaccctgaactttgggccccaacacccagcagcgcatggtgtcctgcgactagtgatggaattgagtggggagatggtgcggaagtgtgatcctcacatcgggctcctgcaccgaggcactgagaagctcattgaatacaagacctatcttcaggcccttccatactttgaccggctagactatgtgtccatgatgtgtaacgaacaggcctattctctagctgtggagaagttgctaaacatccggcctcctcctcgggcacagtggatccgagtgctgtttggagaaatcacacgtttgttgaaccacatcatggctgtgaccacacatgccctggaccttggggccatgacccctttcttctggctgtttgaagaaagggagaagatgtttgagttctacgagcgagtgtctggagcccgaatgcatgctgcttatatccggccaggaggagtgcaccaggacctaccccttgggcttatggatgacatttatcagttttctaagaacttctctcttcggcttgatgagttggaggagttgctgaccaacaataggatctggcgaaatcggacaattgacattggggttgtaacagcagaagaagcacttaactatggttttagtggagtgatgcttcggggctcaggcatccagtgggacctgcggaagacccagccctatgatgtttacgaccaggttgagtttgatgttcctgttggttctcgaggggactgctatgataggtacctgtgccgggtggaggagatgcgccagtccctgagaattatcgcacagtgtctaaacaagatgcctcctggggagatcaaggttgatgatgccaaagtgtctccacctaagcgagcagagatgaagacttccatggagtcactgattcatcactttaagttgtatactgagggctaccaagttcctccaggagccacatatactgccattgaggctcccaagggagagtttggggtgtacctggtgtctgatggcagcagccgcccttatcgatgcaagatcaaggctcctggttttgcccatctggctggtttggacaagatgtctaagggacacatgttggcagatgtcgttgccatcataggtacccaagatattgtatttggagaagtagatcggtgagcaggggagcagcgtttgatcccccctgcctatcagcttcttctgtggagcctgttcctcactggaaattggcctctgtgtgtgtgtgtgtgtgtgtgtgtgtgtgtgtatgttcgtgtacacttggctgtcaggctttctgtgcatgtactaaaaaaggagaaattataataaattagccgtcttgcggcccctaggcctaaaaaaaaaaaaaaaaaaaa

SEQ ID NO: 357 - DNA, 899 bp, human
catctgagtaacatggcggcggcggcggtagccaggctgtggtggcgcgggatcttgggggcctcggcgctgaccagggggactgggcgaccctccgttctgttgctgccggtgaggcgggagagcgccggggccgacacgcgccccactgtcagaccacggaatgatgtggcccacaagcagctctcagcttttggagagtatgtggctgaaatcttgcccaagtatgtccaacaagttcaggtgtcctgcttcaatgagttagaggtctgtatccatcctgatggcgtcatcccagtgctgactttcctcagggatcacaccaatgcacagttcaaatctctggttgacttgacagcagtggacgtcccaactcggcaaaaccgttttgagattgtctacaacctgttgtctctgcgcttcaactcacggatccgtgtgaagacctacacagatgagctgacgcccattgagtctgctgtctctgtgttcaaggcagccaactggtatgaaagggagatctgggacatgtttggagtcttctttgctaaccaccctgatctaagaaggatcctgacagattatggcttcgagggacatcctttccggaaagactttcctctatctggctatgttgagttacgttatgatgatgaagtgaagcgggtggtggcagagccggtggagttggcccaagagttccgcaaatttgacctgaacagcccctgggaggctttcccagtctatcgccaacccccggagagtctcaagcttgaagccggagacaagaagcctgatgccaagtagctccagggaacgcatgtggatcctagacagcgccttatctatgattgagtgtccgtgtaaataaattcctacttagacttaaaaaaaaaaaa

SEQ ID NO: 358 - DNA, 1566 bp, human
atcgcgccagttcctcagcctcagtgctatgaaggtgacagcgtgaggtgacccatctggcccgccgcgatgctggcaacacggcggctgctcggctggtcgcttcccgcgcgggtatctgtgcgtttcagcggcgacacgacagcacccaagaaaacctcatttggctcgctgaaggatgaagaccggattttcaccaacctgtacggccgccatgactggaggctgaaaggttccctgagtcgaggtgactggtacaagacaaaggagatcctgctgaaggggcccgactggatcctgggcgagatcaagacatcgggtttgaggggccgtggaggcgctggcttccccactggcctcaagtggagcttcatgaataagccctcagatggcaggcccaagtatctggtggtgaacgcagacgagggggagccgggcacctgcaaggaccgggagatcttacgccatgatcctcacaagctgctggaaggctgcctggtggggggccgggccatgggcgcccgcgctgcctatatctacatccgaggggaattctacaatgaggcctccaatctgcaggtggccatccgagaggcctatgaggcaggtctgattggcaagaatgcttgtggctctggctatgattttgacgtgtttgtggtgcgcggggctggggcctacatctgtggagaggagacagcgctcatcgagtccattgagggcaagcagggcaagccccgcctgaagccccccttccccgcagacgtgggagtgtttggctgccccacaactgtggccaacgtggagacagtggcagtgtcccccacaatctgccgccgtggaggtacctggtttgctggctttggcagagaacgcaactcaggcaccaaactattcaacatctctggccatgtcaaccacccttgcactgtggaggaggagatgtctgtgcccttgaaagaactgattgagaagcatgctgggggtgtcacgggcggctgggacaacctccttgctgtgatccctggcggctcgtctaccccactgatccccaagtctgtgtgtgagacggtgctgatggacttcgatgcgctggtgcaggcacagacaggcctgggcacagctgcggtgatcgtcatggaccgctcgacggacatcgtgaaagccatcgcccgcctcattgagttctataagcacgagagctgtggccagtgtaccccatgccgtgagggtgtggactggatgaacaaggtgatggcacgtttcgtgaggggggatgcccggccggccgagatcgactccctgtgggagatcagcaagcagatagaaggccatacgatttgtgctctgggtgacggggccgcctggcctgtgcagggtctgatccgccactttcggccggagctcgaggagcggatgcagcggtttgcccagcagcatcaggcccggcaggctgcctcttagcccaccaccctggcctgctgtcctgcgtctatccatgtggaatgctggacaataaagcgagtgctgcccaccctccaaaaaaaaaaaaaaaaaaaaaaaaaa

SEQ ID NO: 359 - DNA, 779 bp, human
cccgctggcccaatggcagcgtcctacagtgtagcctccgcctcccgattgactggcctgcttggcaaggcaagtagcggcggcgcttcaagatgcgctgcctgaccacgcctatgctgctgcgggccctggcccaggctgcacgtgcaggacctcctggtggccggagcctccacagcagtgcagtggcagccacctacaagtatgtgaacatgcaggatcccgagatggacatgaagtcagtgactgaccgggcagcccgcaccctgctgtggactgagctcttccgaggcctgggcatgaccctgagctacctgttccgggaaccggccaccatcaactacccgttcgagaagggcccgctgagccctcgcttccgtggggagcatgcgctgcgccggtacccatccggggaggagcgttgcattgcctgcaagctctgcgaggccatctgccccgcccaggccatcaccatcgaggctgagccaagagctgatggcagccgccggaccacccgctatgacatcgacatgaccaagtgcatctactgcggcttctgccaggaggcctgtcccgtggatgccatcgtcgagggccccaactttgagttctccacggagacccatgaggagctgctgtacaacaaggagaagttgctcaacaacggggacaagtgggaggccgagatcgccgccaacatccaggctgactacttgtatcggtgacgccccaccggcctgcagcccctgctgcccaataaaaccactccgaccccacgg

SEQ ID NO: 360 - DNA, 827 bp, human
ggaacagtgtggcccgccatgttcttctccgcggcgctccgggcccgggcggctggcctcaccgcccactggggaagacatgtaaggaatttgcataagacagctatgcaaaatggagctggaggagctttatttgtgcacagagatactcctgagaataaccctgatactccatttgatttcacaccagaaaactataagaggatagaggcaattgtaaaaaactatccagaaggccataaagcagcagctgttcttccagtcctggatttagcccaaaggcagaatgggtggttgcccatctctgctatgaacaaggttgcagaagttttacaagtacctccaatgagagtatatgaagtagcaactttttatacaatgtataatcgaaagccagttggaaagtatcacattcaggtctgcactactacaccctgcatgcttcgaaactctgacagcatactggaggccattcagaaaaagcttggaataaaggttggggagactacacctgacaaacttttcactcttatagaagtggaatgtttaggggcctgtgtgaacgcaccaatggttcaaataaatgacaattactatgaggatttgacagctaaggatattgaagaaattattgatgagctcaaggctggcaaaatcccaaaaccagggccaaggagtggacgcttctcttgtgagccagctggaggtcttacctctttgactgaaccacccaagggacctggatttggtgtacaagcaggcctttaatttatattgaactgtaaatatgtcactagagaaataaaatatggacttccaatctacgt

SEQ ID NO: 361 - DNA, 4760 bp, human
ggccggcggtggcggcggcgagggctggactcgggcttagggcctgctgtggaggcagcggcggacgccgagctaagcagtttctctggaaacccccctggtaagtgtggaggaggcgggacactctgacccaagacgaaaggcctgtagctccagccaaagaaaataaaccttaggagggagaaggaaaaaaaaaaatccatcagctgttcctgagaacagcctgcattggaatctacagagaggacaactaatgtgagtgaggaagtgactgtatgtggactgtggagaaagtaagtcacgtgggcccttgaggacctggactgggttaggaacagttgtactttcagaggtgaggtgtcgagaagggaaagtgaatgtggtctggagtgtgtccttggccttggctccacagggtgtgctttcctctggggccgtcagggagctcatcccttgtgttctgccagggtggggtacggggtttgacactgaggagggtaacctgctggctggagcggcagagcagtggccttgatttgtcttttggaagattttaaaaaccaaaaagcataaacattctggtccttcagcaatgctttctctgaagaaatacttaacggaaggacttctccagttcaccattctgctgagtttgattggggtacgggtggacgtggatacttacctgacctcacagcttcccccactccgggagatcatcctggggcccagttctgcctatactcagacccagttccacaacctgaggaataccttggatggctatggtatccaccccaagagcatagacctggacaattacttcactgcccggcggctcctcagtcaggtgagggccctggacaggttccaggtgccaaccactgaggtaaatgcctggctggttcaccgagacccagaggggtctgtctctggcagtcagcccaactcaggcctcgccctcgagagttccagtggcctccaagatgtgacaggcccagacaacggggtgcgagaaagcgaaacggagcagggattcggtgaagatttggaggatttgggggctgtagcccccccagtcagtggagacttaaccaaagaggacatagatctgattgacatcctttggcgacaggatattgatctgggggctgggcgtgaggtttttgactatagtcaccgccagaaggagcaggatgtggagaaggagctgcgagatggaggcgagcaggacacctgggcaggcgagggcgcggaagctctggcacggaacctgctagtggatggagagactggggagagcttccctgcacaggtgcctagtggggaggaccagacggccctgtccctggaagagtgccttaggctgctggaagccacctgcccctttggggagaatgctgagtttccagcagacatttccagcataacagaagcagtgcctagtgagagtgagccccctgctcttcaaaacaacctcttgtctcctcttctgaccgggacagagtcaccatttgatttggaacagcagtggcaagatctcatgtccatcatggaaatgcaggccatggaagtgaacacatcagcaagtgaaatcctgtacagtgcccctcctggagacccactgagcaccaactacagccttgcccccaacactcccatcaatcagaatgtcagcctgcatcaggcgtccctggggggctgcagccaggacttcttactcttcagccccgaggtggaaagcctgcctgtggccagtagctccacgctgctcccgttggcccccagcaattctaccagcctcaactccaccttcggctccaccaacctgacagggctcttctttccaccccagctcaatggcacagccaatgacacagcaggcccagagctgcctgaccctttggggggtctgttagatgaagctatgttggatgagatcagccttatggacctggccattgaagaaggctttaaccctgtgcaggcctcccagctggaggaggaatttgactctgactcaggcctttccttagactcgagccatagcccttcttccctaagcagctctgaaggcagttcttcctcttcttcctcctcctcttcctcttcttcctctgcttcttcctctgcctcttcctccttttctgaggaaggtgcggttggctacagctctgactctgagaccctggatctggaagaggccgagggtgctgtgggctaccagcctgagtattccaagttctgccgcatgagctaccaggatccagctcagctctcatgcctgccctacctggagcacgtgggccacaaccacacatacaacatggcacccagtgccctggactcagccgacctgccaccacccagtgccctcaagaaaggcagcaaggagaagcaggctgacttcctggacaagcagatgagccgggatgagcaccgagcccgagccatgaagatccctttcaccaatgacaaaatcatcaacctgcctgtggaggagttcaatgaactgctgtccaaataccagttgagtgaagcccagctgagcctcatccgagacatccggcgccggggcaagaacaagatggcggcgcagaactgccgcaagcgcaagctggacaccatcctgaatctggagcgtgatgtggaggacctgcagcgtgacaaagcccggctgctgcgggagaaagtggagttcctgcgctccctgcgacagatgaagcagaaggtccagagcctgtaccaggaggtgtttgggcggctgcgagatgagaacggacgaccctactcgcccagtcagtatgcgctccagtacgccggggacggcagtgtcctcctcatcccccgcacgatggccgaccagcaggcccggcggcaggagaggaagccaaaggaccggagaaagtgagcctggggaagaagggggtttgaagcccaccaagaccgaaactggagaagggctggacctggacctggacctggacctacagcggggacttaaatgccttcttatccaatatatcttctcagatgggatgactgcgggtcagtgtacaggaagaggcaggcactggctggctcagctccactcgggtggagtggaagtggccagaccatttagacggacagggtcctcaccctacccctttcctgtgaggcaggggtggtggtggagttgctggaggtagaggagctatgtggagcaaaggccgacagaggggaaggaatggacctgtgagaggaagggaaggtggcagaaagtctcatttcaggaaggagggatagaaggaaggaaggaaggaacccccccccccccccgaaaaaaaaatcaaagcgggaagaaaatcagagggaaggttaaggttggctctggccaggattccaggcagcaggttggagtgactggtgggcctagatcactggtgtgataaaccccatttcaccccggggggggtggggtacacagacacagggtgggggtggggaggggcggtgttaactctttctgctccttgcattttgacatccctgaaggggagctcttggatatcattggccatgtttcaatcgaatggagccactgggccccaacactggctttgagatttagagtcaaagggtagagtgaacaggaaagggtcacgtggtcccatgttgcaacagccccaacatcacgcatgtcattcactgccttgccactccatctccctccgtgctccagccacccctgagctgaggctcccattgtctccatcagagcctgcatgtgtatgccgtcctcccctggtccggtgtttgtgttccccacccctcacagactgcctgagctcttctgtaagctggggtagggtgatggcagtgctccgggaactgggcctgcagccttcctcttctgggactgctgtgaggcagaggaatgatggagaatctagtgtagcagcctccaggcaggattcagcacaacactggggagtcacccttccctcgggcctctgcctaccaacaactgggcttatcactgggaaaacacaaaaaattacacaacccagcaacaacaaaagaactagtcctcttagaatttcttgcgctttgatttttttagggcttgtgccctgtttcacttatagggtctagaatgcttgtgttgagtaaaaaggagattcccaatattcaaagctgctaaatgttctctttgccataaagactccgtgtaactgtgtgaacacttgggatttttctcctctgtcccgaggtcgtcgtctgctttcttttttgggtttctttctagaagattgagaagtgcatatgacaggctgagagcacctccccaaacacacaagctctcagccacaggcagcttctccacagccccagcttcgcacaggctcctggagggctgcctgggggaggcagacatgggagtgccaaggtggccagatggttccaggactacaatgtctttatttttaactgtttgccactgctgccctcacccctgcccggctctggagtaccgtctgccccagacaagtgggagtgaaatgggggtggggggaagcactgattcccagttagggggtgcctaactgagcagtagggatagaaggtgtgaacctgggagtgcttttataaattattttccttgtagattttatttttaatttatctctgtgacctgccagggagaggggagagagagagagatgctgttgagcacatgacaaaataaaataaaatggatgattcaaaaaaaaaaa

SEQ ID NO: 362 - DNA, 4629 bp, human
acgtgacctggtgacagtgctgacttggctgtacagctcgatctaggttctgcggcacgggatggcggaggcgcctcctgtctcaggtacttttaaattcaatacagatgctgctgaattcattcctcaggagaaaaaaaattctggtctaaattgtgggactcaaaggagactagactctaataggattggtagaagaaattacagttcaccacctccctgtcacctttccaggcaggtcccttatgatgaaatctctgctgttcatcagcatagttatcatccgtcaggaagcaaacctaagagtcagcagacgtctttccagtcctctccttgtaataaatcgcccaagagccatggccttcagaatcaaccttggcagaaattgaggaatgagaagcaccatatcagagtcaagaaagcacagagtcttgctgagcagacctcagatacagctggattagagagctcgaccagatcagagagtgggacagacctcagagagcatagtccttctgagagtgagaaggaagttgtgggtgcagatcccaggggagcaaaacccaaaaaagcaacacagtttgtatacagctatggtagaggaccaaaagtcaaggggaaactcaaatgtgaatggagtaaccgaacaactccaaaaccggaggatgctggacccgaaagtaccaaacctgtgggggttttccaccctgactcttcagaggcatcctctagaaaaggagtattggatgggtatggagccagacgaaatgagcagagaagatacccacagaaaaggcctccctgggaagtggagggggccaggccacgaccaggcagaaatccaccaaaacaggagggccaccgacatacaaacgcaggacacagaaacaacatgggccccattccaaaggatgacctcaatgaaagaccagcaaaatctacctgtgacagtgagaacttggcagtcatcaacaagtcttccaggagggttgaccaagagaaatgcactgtacggaggcaggatcctcaagtagtatctcctttctcccgaggcaaacagaaccatgtgctaaagaatgtggaaacgcacacaggttctctaattgaacaactaacaacagaaaaatacgagtgcatggtgtgctgtgaattggttcgtgtcacggccccagtgtggagttgtcagagctgttaccatgtgtttcatttgaactgcataaagaaatgggcaaggtctccagcatctcaagcagatggccagagtggttggaggtgccctgcctgtcagaatgtttctgcacatgttcctaatacctacacttgtttctgtggcaaggtaaagaatcctgagtggagcagaaatgaaattccacatagctgtggtgaggtttgtagaaagaaacagcctggccaggactgcccacattcctgtaaccttctctgccatccaggaccctgcccaccctgccctgcctttatgacaaaaacatgtgaatgtggacgaaccaggcacacagttcgctgtggtcaggctgtctcagtccactgttctaacccatgtgagaatattttgaactgtggtcagcaccagtgtgctgagctgtgccatgggggtcagtgccagccttgccagatcattttgaaccaggtatgctattgcggcagcacctcccgagatgtgttatgtggaaccgatgtaggaaagtctgatggatttggggatttcagctgtttaaagatatgtggcaaggacttgaaatgcggtaaccatacatgttcgcaagtgtgccaccctcagccctgccagcaatgcccacggctcccccagctggtgcgctgttgcccctgtggccaaactcctctcagccaattgctagaacttggaagtagtagtcggaaaacatgcatggaccctgtgccttcatgtggaaaagtgtgcggcaagcctctgccttgtggttccttagatttcattcatacctgtgaaaagctctgccatgaaggagactgtggaccatgctctcgcacatcagttatttcctgcagatgctctttcagaacaaaggagcttccatgtaccagtctcaaaagtgaagatgctacatttatgtgtgacaagcggtgtaacaagaaacggttgtgtggacggcataaatgtaatgagatatgctgtgtggataaggagcacaagtgtcctttgatttgtgggaggaaactccgttgtggccttcataggtgtgaagaaccttgtcatcgtggaaactgccagacatgctggcaagccagttttgatgaattaacctgccattgtggtgcatcagtgatttaccctccagttccctgtggtactaggccccctgaatgtacccaaacctgcgctagagtccatgagtgtgaccatccagtatatcattcttgtcatagtgaggagaagtgtcccccttgcactttcctaactcagaagtggtgcatgggcaagcatgagtttcggagcaacatcccctgtcacctggttgatatctcttgcggattaccctgcagtgccacgctaccatgtgggatgcacaaatgtcagagactctgtcacaaaggggagtgtcttgtggatgagccctgcaagcagccctgcaccacccccagagctgactgtggtcacccgtgtatggcaccctgccataccagctcaccctgccctgtgactgcttgtaaagctaaggtagagctacagtgtgaatgtggacgaagaaaagagatggtgatttgctctgaagcatctagtacttatcaaagaatagctgcaatctccatggcctctaagataacagacatgcagcttggaggttcagtggagatcagcaagttaattaccaaaaaggaagttcatcaagccaggctggagtgtgatgaggagtgttcagccttggaaaggaaaaagagattagcagaggcatttcatatcagtgaggattctgatcctttcaatatacgttcttcagggtcaaaattcagtgatagtttgaaagaagatgccaggaaggacttaaagtttgtcagtgacgttgagaaggaaatggaaaccctcgtggaggccgtgaataagggaaagaatagtaagaaaagccacagcttccctcccatgaacagagaccaccgccggatcatccatgacttggcccaagtttatggcctggagagcgtgagctatgacagtgaaccgaagcgcaatgtggtggtcactgccatcagggggaagtccgtttgtcctcctaccacgctgacaggtgtgcttgaaagggaaatgcaggcacggcctccaccaccgattcctcatcacagacatcagtcagacaagaatcctgggagcagtaatttacagaaaataaccaaggagccaataattgactattttgacgtccaggactaagaagatcatgatgcacttagataaaagaatgattaggtatagtggagacttatttgccagcagataaatcatgcccgttcccctctgcctggcagaatcacagtctcacatactgtcttgtactgacacatccaaagcatgagtgtgtcagaaatcccttgtctattcctgtctgtataaagtgtttcattatgaccagatctctgattgtatggtcactaggtatgcaatcacgcattcaaagaggctctttacaccatcactgtgattgctctgagagttgagggactattgggctttatttggacaaaccaaacttttagcctgaaaccaactttatgccactaagtcatagcctcagttgtcccagttatttgtcctcctgaaaatgcctgaaacatcagacagacattgcttgctttacccaaactgatcaaaatctttaggagcacaaatgaattttttagtctgaaataccaaataatgaattggtataccatatccggaatcacacatgttatcttaaacccagccatcatacctaagtcttttgccaaaacctctcataggtatatctagctgaacttattttggcattttcaatgtgatcagttctagacctagaagggggtcaggctgctttacagaattctatttccttaagtccctggcacttctcataccacatcactgaacctgttcagtaacaatcagtttggccgtcccccatgatggtaggaaatatagagagcaagttcttctgccagggtcacactgtggtctctgaactgaccagtatatccctaactcctctttgatagagaaagagtctcaaatggacaactgtcctgtgttgctttccctaggccttcagcagcctattggctctccctgcctctgagctctggactctgtttgaatattccaagtagtatatggacagtccagggcttatgcccagcagcccactggaggcattcttcaggctcctttaaggcaggtgcattgatagttccattagtgtgacccttgcattggcacccctccagcctggaggccaggcttccagcaacttccttctgccctagagcaagccatgagccccagagcagtagcaggagacttgagaagtagagtgacaaaaacaagcacttaattaaattataaaatttaactttaaaaaaaaaaaaaaaaaaaaaaaaaaa

SEQ ID NO: 363 - DNA, 811 bp, human
gcagaagcgttccgtgcgtgcaagtgctgcgaaccacgtgggtcccgggcgcgtttcgggtgctggcggctgcagccggagttcaaacctaagcagctggaaggaaccatggccaactgtgagcgtaccttcattgcgatcaaaccagatggggtccagcggggtcttgtgggagagattatcaagcgttttgagcagaaaggattccgccttgttggtctgaaattcatgcaagcttccgaagatcttctcaaggaacactacgttgacctgaaggaccgtccattctttgccggcctggtgaaatacatgcactcagggccggtagttgccatggtctgggaggggctgaatgtggtgaagacgggccgagtcatgctcggggagaccaaccctgcagactccaagcctgggaccatccgtggagacttctgcatacaagttggcaggaacattatacatggcagtgattctgtggagagtgcagagaaggagatcggcttgtggtttcaccctgaggaactggtagattacacgagctgtgctcagaactggatctatgaatgacaggagggcagaccacattgcttttcacatccatttcccctccttcccatgggcagaggaccaggctgtaggaaatctagttatttacaggaacttcatcataatttggagggaagctcttggagctgtgagttctccctgtacagtgttaccatccccgaccatctgattaaaatgcttcctcccagcataggattcattgagttggttacttcatattgttgcattgcttttttttccttct

SEQ ID NO: 364 - DNA, 1759 bp, human
ggcacgagaaaattcatgcgagggagacgtggtgggcggtccttcctgtgacacgacccttgagtgacagttctatttgattgcctccggtactgtgaggaaaggacacgactctatggtgaggactgatggacatacattatctgagaaaagaaactaccaggtgacaaacagcatgtttggtgcttcaagaaagaagtttgtagagggggtcgacagtgactaccatgacgaaaacatgtactacagccagtcttctatgtttccacatcggtcagaaaaagatatgctggcatcaccatctacatcaggtcagctgtctcagtttggggcaagtttatacgggcaacaaagtgcactaggccttccaatgagggggatgagcaacaatacccctcagttaaatcgcagcttatcacaaggcactcagttaccgagccacgtcacgccaacaacaggggtaccaacaatgtcacttcacacgcctccatctccaagcaggggtattttgcctatgaatcctaggaatatgatgaaccactcccaggttggtcagggcattggaattcctagcaggacaaatagcatgagcagttcagggttaggtagccccaacagaagctcgccaagcataatatgtatgccaaagcagcagccttctcgacagccttttactgtgaacagtatgtctggatttggaatgaacaggaatcaggcatttggaatgaataactccttatcaagtaacatttttaatggaacagacggaagtgaaaatgtgacaggattggacctttcagatttcccagcattagcagaccgaaacaggagggaaggaagtggtaacccaactccattaataaaccccttggctggaagagctccttatgttggaatggtaacaaaaccagcaaatgaacaatcccaggacttctcaatacacaatgaagattttccagcattaccaggctccagctataaagatccaacatcaagtaatgatgacagtaaatctaatttgaatacatctggcaagacaacttcaagtacagatggacccaaattccctggagataaaagttcaacaacacaaaataataaccagcagaaaaaagggatccaggtgttacctgatggtcgggttactaacattcctcaagggatggtgacggaccaatttggaatgattggcctgttaacatttatcagggcagcagagacagacccaggaatggtacatcttgcattaggaagtgacttaacaacattaggcctcaatctgaactctcctgaaaatctctaccccaaatttgcgtcaccctgggcatcttcaccttgtcgacctcaagacatagacttccatgttccatctgagtacttaacgaacattcacattagggataagctggctgcaataaaacttggccgatatggtgaagaccttctcttctatctctattacatgaatggaggagacgtattacaacttttagctgcagtggagctttttaaccgtgattggagataccacaaagaagaacgagtatggattaccagggcaccaggcatggagccaacaatgaaaaccaatacctatgagaggggaacatattacttctttgactgtcttaactggaggaaagtagctaaggagttccatctggaatatgacaaattagaagaacggcctcacctgccatccaccttcaactacaaccctgctcagcaagccttctaaaaaaaaaaaaaaaaaaaaaaa

SEQ ID NO: 365 - DNA, 3671 bp, human
gaattccgacaaaacaaaagggagaaccttctcccggtagcagcggcaggaactgcaaacatgatggcggcagctcccatccagcagaacgggacccacactggggttcccatagacctggacccgccggactcgcggaaaaggccgctggaagccccccctgaagccggcagcaccaagaggaccaatacgggcgaagacggccagtattttctaaaggttctcatacctagttatgctgctggatctataattgggaagggaggacagacaattgttcagttgcaaaaagaaactggagccaccatcaagctgtctaagctgtctaagtccaaagatttttacccaggtactactgagcgagtgtgcttgatccagggaacggttgaagcactgaatgcagttcatggattcattgcagaaaaaattcgagaaatgccccaaaatgtggccaagacagaaccagtcagcattctacaaccccagaccaccgttaatccagatcgcatcaaacaaacattgccatcttccccaactaccaccaagtcctctccatctgatcccatgaccacctccagagctaatcaggtaaagattatagttcccaacagcacagcaggtctgataatagggaagggaggtgctactgtgaaggctgtaatggagcagtcaggggcttgggtgcagctttcccagaaacctgatgggatcaacttgcaagagagggttgtcactgtgagtggagaacctgaacaaaaccgaaaagctgttgaacttatcatccagaagatacaagaggatccacaaagtggcagctgtctcaatatcagttatgccaatgtgacaggtccagtggcaaattccaatccaaccggatctccttatgcaaacactgctgaagtgttaccaactgctgcagcagctgcagggctattaggacatgctaaccttgctggcgttgcagcctttccagcagttttatctggcttcacaggcaatgacctggtggccatcacctctgcacttaatacattagccagctatggatataatctcaacactttaggtttaggtctcagtcaagcagcagcaacaggggctttggctgcagcagctgccagtgccaacccagcagcagcagcagccaatttattggccacctatgccagtgaagcctcagccagtggcagcacagctggtggtacggcggggacatttgcattaggtagcctggctgctgctactgctgcaaccaatggatattttggagctgcttctcccctagctgccagtgccattctaggaacagaaaagtccacagatggatccaaggatgtagttgaaatagcagtgccagaaaacttagttggtgcaatacttggcaaaggagggaaaacattagtggaataccaggagttgactggtgcaaggatacagatctccaaaaaaggagaattcgtacctggcacaaggaatcggaaggtaaccattactggaacaccagctgcaacacaggctgctcaatatttaattacacaaaggatcacatatgagcaaggagttcgggctgccaatcctcagaaagtgggttgagtgccccagttacacatcagattgttttaacccctcctttaccccattttcaagaaggatgtactgtactttgcagaagtgaagtttttctgttattaatatataattatgcaaatgaatgcgactatgttgacaatgtgtatatgtaaataatatgtgttttaccagatgtttcatagaaagaattttttcttgatctgttttgttctctatactttgcttgtgtatatttgtcagaggtgtttctagtgtaagatttaagcctgccattttaccagcattattgtagtttaatgattgaatgtagacagggatatgcgtatagttttcagtattagttctagataacactaaattaactactgttaggttgagtatggtggggtcagtgacctaaaatggagtgaggccaaagcactgtcctgtaagtcttacttcctgcttagggcacagtgaagtaggaaacaatattttgaaaataagttttaaatttaaaatgatcaaaaagcaatatagttgcataaaagcactgtaaaatatttaaaaggttaaaactgtggaaaattatattggtaagtttacagatcaataaaagcacctgttctccatctgaactagacaatggaaataatgctgcatgctgccatggcccattcttcatcatttgtaagttcaacaaaagttctcacatggagtcccacctcttcagaggttgcacatttgtttttaagactgaattcactactgatcccatcgcctggccgagacagtcattactccattaacatcctcactgtttagacacataactgtggtacaggattggaaattataaacaaaagtgaaagtgccaacaaattattgatagctgataatgtttcatatctgcaactgcttgataagtatgttgcattttaagagcttataattgtgtataatttgttaacactagaaacctattagtattgtgaatgtagattttactgtgaagctatctgtgatttagctgtttgctcccatgatggagtctttgcagcatggcgctagcagccaatgcagtttctaatactcggtaatttgcatgttttgtggagcatttttatgtcaccaaccagacagtatttcctgcatgcttatttagaagaggcagcttatcttgagaggtagtgttatctacctttgtcaggctttttgacaggtcatttcagagtaagcctttgttcccaagacccaacaactgtcaccctcttctgtacctctcctgagtgccaactgtccaggccatttgacacaccatctgttaacctctgagtttgcccactcaaggccactcataggggcatcctagccctgtgcactcagcactcataggatcatccagactctcatgcggcatgcagtctaatcatgacaaataatgctgctactctgatatctggctgagcaactgaattacaaaagagaattacttccatctcaacttcaacccattgattacgtccatcctagcaagctaaatggcatcccagctgctcctttctgtgcaaccaattaaagaacaatgagtgtgatgctccatgtctgaatttcgtccagcctctctctgaactgtgatctttgtcctcatgaactttcccttttgttcattgaactatatggactcttcatttcatattgatttactgtgcaatttacttttggacattgagaacttgaaattatttcctgatcccttccccttccactattaataattcatttctgtcaaactgtaagagtagactcattttttttttttttagtttttaacattggactgttatttcatttagagttctctatctctaaatatttatttagagaatgattttaaaagggaatgatatgcttgtttaaatgaaagagaaaagctgtagtaaactgtgttaattggtaatgactatttatcgtcgatactctgtagctgtgtaagttttgacaaatagtgtatctcgtggaatcagtggttagcattgccgctattatatttactcattttatcattataaatgtgtttagttcatcatgtagcatcaaaa

SEQ ID NO: 366 - DNA, 1554 bp, human
gcggaccccagagagccctgagcagccccaccgccgccgccggcctagttaccatcacaccccgggaggagccgcagctgccgcagccggccccagtcaccatcaccgcaaccatgagcagcgaggccgagacccagcagccgcccgccgccccccccgccgcccccgccctcagcgccgccgacaccaagcccggcactacgggcagcggcgcagggagcggtggcccgggcggcctcacatcggcggcgcctgccggcggggacaagaaggtcatcgcaacgaaggttttgggaacagtaaaatggttcaatgtaaggaacggatatggtttcatcaacaggaatgacaccaaggaagatgtatttgtacaccagactgccataaagaagaataaccccaggaagtaccttcgcagtgtaggagatggagagactgtggagtttgatgttgttgaaggagaaaagggtgcggaggcagcaaatgttacaggtcctggtggtgttccagttcaaggcagtaaatatgcagcagaccgtaaccattatagacgctatccacgtcgtaggggtcctccacgcaattaccagcaaaattaccagaatagtgagagtggggaaaagaacgagggatcggagagtgctcccgaaggccaggcccaacaacgccggccctaccgcaggcgaaggttcccaccttactacatgcggagaccctatgggcgtcgaccacagtattccaaccctcctgtgcagggagaagtgatggagggtgctgacaaccagggtgcaggagaacaaggtagaccagtgaggcagaatatgtatcggggatatagaccacgattccgcaggggccctcctcgccaaagacagcctagagaggacggcaatgaagaagataaagaaaatcaaggagatgagacccaaggtcagcagccacctcaacgtcggtaccgccgcaacttcaattaccgacgcagacgcccagaaaaccctaaaccacaagatggcaaagagacaaaagcagccgatccaccagctgagaattcgtccgctcccgaggctgagcagggcggggctgagtaaatgccggcttaccatctctaccatcatccggtttagtcatccaacaagaagaaatatgaaattccagcaataagaaatgaacaaaagattggagctgaagacctaaagtgcttgctttttgcccgttgaccagataaaataactatctgcattatctatgcagcatggggtttttattatttttacctaaagacgtctctttttggtaataacaaacgtgttttttaaaaaagcctggtttttctcaatacgcctttaaaggtttttaaattgtttcatatctggtcaagttgagatttttaagaacttcatttttaatttgtaataaaagtttacaacttgattttttcaaaaaagtcaacaaactgcaagcacctgttaataaaggtcttaaataataaaaaaaaaaaaaaaaaaaaaaaaaaaaaaaaaaaaaaaaaaaaaaaaaaaaaaaaaaaaccctgag

SEQ ID NO: 367 - DNA, 3547 bp, human
gcactcgcccggctcgcccgctttcgcacccagttcacgcgccacagctatgtgtccccgagccgcgcgggcgcccgcgacgctactcctcgccctgggcgcggtgctgtggcctgcggctggcgcctgggagcttacgattttgcacaccaacgacgtgcacagccggctggagcagaccagcgaggactccagcaagtgcgtcaacgccagccgctgcatgggtggcgtggctcggctcttcaccaaggttcagcagatccgccgcgccgaacccaacgtgctgctgctggacgccggcgaccagtaccagggcactatctggttcaccgtgtacaagggcgccgaggtggcgcacttcatgaacgccctgcgctacgatgccatggcactgggaaatcatgaatttgataatggtgtggaaggactgatcgagccactcctcaaagaggccaaatttccaattctgagtgcaaacattaaagcaaaggggccactagcatctcaaatatcaggactttatttgccatataaagttcttcctgttggtgatgaagttgtgggaatcgttggatacacttccaaagaaaccccttttctctcaaatccagggacaaatttagtgtttgaagatgaaatcactgcattacaacctgaagtagataagttaaaaactctaaatgtgaacaaaattattgcactgggacattcgggttttgaaatggataaactcatcgctcagaaagtgaggggtgtggacgtcgtggtgggaggacactccaacacatttctttacacaggcaatccaccttccaaagaggtgcctgctgggaagtacccattcatagtcacttctgatgatgggcggaaggttcctgtagtccaggcctatgcttttggcaaatacctaggctatctgaagatcgagtttgatgaaagaggaaacgtcatctcttcccatggaaatcccattcttctaaacagcagcattcctgaagatccaagcataaaagcagacattaacaaatggaggataaaattggataattattctacccaggaattagggaaaacaattgtctatctggatggctcctctcaatcatgccgctttagagaatgcaacatgggcaacctgatttgtgatgcaatgattaacaacaacctgagacacacggatgaaatgttctggaaccacgtatccatgtgcattttaaatggaggtggtatccggtcgcccattgatgaacgcaacaatggcacaattacctgggagaacctggctgctgtattgccctttggaggcacatttgacctagtccagttaaaaggttccaccctgaagaaggcctttgagcatagcgtgcaccgctacggccagtccactggagagttcctgcaggtgggcggaatccatgtggtgtatgatctttcccgaaaacctggagacagagtagtcaaattagatgttctttgcaccaagtgtcgagtgcccagttatgaccctctcaaaatggacgaggtatataaggtgatcctcccaaacttcctggccaatggtggagatgggttccagatgataaaagatgaattattaagacatgactctggtgaccaagatatcaacgtggtttctacatatatctccaaaatgaaagtaatttatccagcagttgaaggtcggatcaagttttccacaggaagtcactgccatggaagcttttctttaatatttctttcactttgggcagtgatctttgttttataccaatagccaaaaattctccttgcctttaatgtgtgaaactgcattttttcaagtgagattcaaatctgccttttaggacctggctttgtgacagcaaaaaccatctttacaggctcctagaagctgaaggttagagcattataaaatgaagagacagacatgattactcagggtcagcaacctagtgagttagaaaaaaaattaacatagggccctataaggagaaagccaactatgttaagtttacgtgtccaaattttaatgaaattttactaacaattttaaaccatatttttcttcttcatatccatttctaatccatcaaacagcttatgtttacataaaattttatcattcacaaggaagttttaagcacactgtctcatttgatatccacaacttatttttggtaggaaagagagatgtttttcccacctgtcagatgaaaaaactgaagctcaaaaagggttgacttgaccatacagctaatgctgacagatccaagacctagacctaggtcttttgaactcaagtccagcattctcaactatatcaagttactgttcagaatacttaatatctcctctcttcataattatcaatagccccaagctcatggatgacaaatctctgctttatttcttgtctctattttttcactttatagctcctgttataatagcaagtttaatggtataaacacaggataccatcctctcttgcaacacccatgtgcctttgatgagtcaggtagcaagctgtagtagataatgagaaaggccagaggctgcaaagacagtcaaaggacacgagagaaaggaaggggaagaacaggactccaggactgttttatattatagaaaagcaagagctaaagagcatttacacatgttaaacagatacttgttaagcatagtgcctgacacacggcattagctgttattttatgagattccatcagctctgcctctgtcctctttcttctaacatgaaggtatcatgagaagagaaccttctaacataagctgtaattctaaacctgcacttgtccctctccagcaagaggctagcactgaattcattctactcatactacacacccagttatggaatgtccagagttctcgaagaaaataaatgactttaggaagaggtatacattttttaagtcgctctgcctccaaatctgaacagtcactgtaaatcattcttaagcccagatatgagaacttctgctggaaagtgggaccctctgagtgggtggtcagaaaatacccatgctgatgaaatgacctatgcccaaagaacaaatacttaacgtgggagtggaaccacatgagcctgctcagctctgcataagtaattcaagaaatgggaggcttcaccttaaaaacagtgtgcaaatggcagctagaggttttgataggaagtatgtttgtttcttagtgtttacaaatattaagtactcttgatacaaaatatacttttaaacttcataacctttttataaaagttgttgcagcaaaataatagcctcggttctatgcatatatggattgctataaaaaatgtcaataagattgtacaaggaaaattagagaaagtcacatttagggtttattttttacacttggccagtaaaatagggtaaatcctattagaaattttttaaagaactttttttaagtttcctaaatctgtgtgtgtattgtgaagtggtataagaaatgactttgaaccactttgcaattgtagattcccaacaataaaattgaagat

SEQ ID NO: 368 - DNA, 2013 bp, human
aattcctgtcctcaggcgctgtcagatctgtggtttttctacttgaaggacacaatgttttccaaactagcacatttgcagaggtttgctgtacttagtcgcggagttcattcttcagtggcttctgctacatctgttgcaactaaaaaaacagtccaaggccctccaacctctgatgacatttttgaaagggaatataagtatggtgcacacaactaccatcctttacctgtagccctggagagaggaaaaggtatttacttatgggatgtagaaggcagaaaatattttgacttcctgagttcttacagtgctgtcaaccaagggcattgtcaccccaagattgtgaatgctctgaagagtcaagtggacaaattgaccttaacatctagagctttctataataacgtacttggtgaatatgaggagtatattactaaacttttcaactaccacaaagttcttcctatgaatacaggagtggaggctggagagactgcctgtaaactagctcgtaagtggggctataccgtgaagggcattcagaaatacaaagcaaagattgtttttgcagctgggaacttctggggtaggacgttgtctgctatctccagttccacagacccaaccagttacgatggttttggaccatttatgccgggattcgacatcattccctataatgatctgcccgcactggagcgtgctcttcaggatccaaatgtggctgcgttcatggtagaaccaattcagggtgaagcaggcgttgttgttccggatccaggttacctaatgggagtgcgagagctctgcaccaggcaccaggttctctttattgctgatgaaatacagacaggattggccagaactggtagatggctggctgttgattatgaaaatgtcagacctgatatagtcctccttggaaaggccctttctgggggcttataccctgtgtctgcagtgctgtgtgatgatgacatcatgctgaccattaagccaggggagcatgggtccacatacggtggcaatccactaggctgccgagtggccatcgcagcccttgaggttttagaagaagaaaaccttgctgaaaatgcagacaaattgggcattatcttgagaaatgaactcatgaagctaccttctgatgttgtaactgccgtaagaggaaaaggattattaaacgctattgtcattaaagaaaccaaagattgggatgcttggaaggtgtgtctacgacttcgagataatggacttctggccaagccaacccatggcgacattatcaggtttgcgcctccgctggtgatcaaggaggatgagcttcgagagtccattgaaattattaacaagaccatcttgtctttctgagggtagccagctgttttcagtggtccctgggagccagctggagacaggtggtcctgtaaaagctttattcctaatgtgggcacattccactcccatgagtcttcaaaaactttttttttgaatatatttttttcagttgatacataatagaacaacgtttatgaacctgccgtttgctttgtaacgtaactaaataatgtaatggcatctatattcagttgaagtgttttgatgtgcatgtgtacttcctaaggtgaaatgcatctatatacagacagcctctaaatcaagtccttcagtataattgatatatgtttttataatttcctcactggtataagtgtttcatatttgaaaaagttatctctgggtattgcataaaaggcttcatcttataaagtgaaatcattgttattgaattttaggaaggattaatggttaagtgtatataaaatactaatattaagtaaacttcatattggccaacaccagggttgtattctatggatgtcattattttgaattaagaattagtgtttaacattcctaaattgttttgagtgcttgattataatttgtaaaaaatgtttattttcaatacttctttaaatttaaaataaagcttatatttcaaatgtc

SEQ ID NO: 369 - DNA, 2062 bp, human
gtcagtccctcctgtagccgccgccgccgccgcccgccgcccctctgccagcagctccggcgccacctcgggccggcgtctccggcgggcgggagccaggcgctgacgggcgcggcgggggcggccgagcgctcctgcggctgcgactcaggctccggcgtctgcgcttccccatggggctggcctgcggcgcctgggcgctctgagattgtcactgctgttccaagggcacacgcagagggatttggaattcctggagagttgcctttgtgagaagctggaaatatttctttcaattccatctcttagttttccataggaacatcaagaaatcatgaacaactttggtaatgaagagtttgactgccacttcctcgatgaaggttttactgccaaggacattctggaccagaaaattaatgaagtttcttcttctgatgataaggatgccttctatgtggcagacctgggagacattctaaagaaacatctgaggtggttaaaagctctccctcgtgtcacccccttttatgcagtcaaatgtaatgatagcaaagccatcgtgaagacccttgctgctaccgggacaggatttgactgtgctagcaagactgaaatacagttggtgcagagtctgggggtgcctccagagaggattatctatgcaaatccttgtaaacaagtatctcaaattaagtatgctgctaataatggagtccagatgatgacttttgatagtgaagttgagttgatgaaagttgccagagcacatcccaaagcaaagttggttttgcggattgccactgatgattccaaagcagtctgtcgtctcagtgtgaaattcggtgccacgctcagaaccagcaggctccttttggaacgggcgaaagagctaaatatcgatgttgttggtgtcagcttccatgtaggaagcggctgtaccgatcctgagaccttcgtgcaggcaatctctgatgcccgctgtgtttttgacatgggggctgaggttggtttcagcatgtatctgcttgatattggcggtggctttcctggatctgaggatgtgaaacttaaatttgaagagatcaccggcgtaatcaacccagcgttggacaaatactttccgtcagactctggagtgagaatcatagctgagcccggcagatactatgttgcatcagctttcacgcttgcagttaatatcattgccaagaaaattgtattaaaggaacagacgggctctgatgacgaagatgagtcgagtgagcagacctttatgtattatgtgaatgatggcgtctatggatcatttaattgcatactctatgaccacgcacatgtaaagccccttctgcaaaagagacctaaaccagatgagaagtattattcatccagcatatggggaccaacatgtgatggcctcgatcggattgttgagcgctgtgacctgcctgaaatgcatgtgggtgattggatgctctttgaaaacatgggcgcttacactgttgctgctgcctctacgttcaatggcttccagaggccgacgatctactatgtgatgtcagggcctgcgtggcaactcatgcagcaattccagaaccccgacttcccacccgaagtagaggaacaggatgccagcaccctgcctgtgtcttgtgcctgggagagtgggatgaaacgccacagagcagcctgtgcttcggctagtattaatgtgtagatagcactctggtagctgttaactgcaagtttagcttgaattaagggatttggggggaccatgtaacttaattactgctagttttgaaatgtctttgtaagagtagggtcgccatgatgcagccatatggaagactaggatatgggtcacacttatctgtgttcctatggaaactatttgaatatttgttttatatggatttttattcactcttcagacacgctactcaagagtgcccctcagctgctgaacaagcatttgtagcttgtacaatggcagaatgggccaaaagcttagtgttgtgacctgtttttaaaataaagtatcttgaaataattaggc

SEQ ID NO: 370 - DNA, 1930 bp, human
gcgggtccggtttccggcgggagcgtgggccgccagactcgggagaggctccgtcttgtgcaagggtcctgtgggctggctgcactggcctctgcggtggtgcctgccagaatgccccacttggaaaacgtggtgctttgtcgcgagtctcaagtgtccatcttgcagtccttgtttggagagagacatcatttcagctttccatccatttttatttatggacatactgctagtggaaagacctatgtaacacaaacgttgttgaaaactttagagctcccacatgtgtttgtgaattgtgttgaatgctttacattgaggctgcttttggaacaaattttaaacaaattgaatcatcttagttcttcagaggatggatgttctactgaaataacctgtgaaacatttaatgactttgttcgcttgtttaaacaagtaaccacagctgaaaatcttaaagatcagactgtatatattgttctagataaagcagagtatctaagagatatggaagcaaatcttttgcctggatttcttagattacaagaattggctgacagaaatgtgactgttctctttctcagtgaaattgtttgggaaaagtttcgtccaaatactggatgctttgagccgtttgtcttatatttccctgattacagcataggcaaccttcaaaagatcctgtcccatgatcatcctccagagtattcagctgatttctatgctgcctacattaacattcttcttggagttttctacactgtttgtcgagatttgaaagagctcagacatctggcagtacttaattttcctaaatattgtgaacccgtggttaaaggagaagcaagtgaacgtgatactcgcaaactgtggagaaatattgaacctcatttgaagaaagctatgcagactgtttatctcagggaaatatcaagttcccagtgggaaaagctacagaaagatgacacagatccggggcaactgaaaggcctctcagcgcatactcatgtggaacttccatattactctaagttcattctaattgctgcataccttgcttcatacaatccagcaagaactgacaagaggttttttcttaagcatcatggaaaaatcaagaaaaccaactttctaaaaaaacacgaaaagacaagcaatcatctccttgggccaaaaccatttccactagacagattattagcaatattatatagtatcgtggacagcagagttgctccaacagcaaatattttttcccagattacctctctagtgacccttcagctgttaaccctggttggccatgacgatcagcttgatggaccaaaatacaaatgcacagtgtctctagacttcatcagagctattgcaaggacggtgaactttgacataataaaatacttgtatgatttcttgtgaaaacaagcttcaaagccatatggacactgtgacaatgactaagccaagctgtgttcatccagctacttagctggccaaggagaggagttctttggctctattggatttgtccaaacaggtgctggcccagcatggaatctgatgaaaatattctgattggtctgggtggatgtgagcagaagactatttaccagggaccctggagtatttggaagcaacgtgttaattataaacagcagggtttgagcacaatctgttctactcttaatgatgttatcttaacactgaaattgcctgaaacccatttacttaggactacattttgctctgtgaactatcccctgcgctttgaacgtgccagcagcccttgtttatatgcccattcttttcacttcctctccacaggagcctctgcagtcgcttgccaaagcagattttcctaaggccactgttttaaaagatcatagttgcaaaatataataaatacaagttctttttaaaatccaaaaaa

SEQ ID NO: 371 - DNA, 5083 bp, human
agaagagcgatgggagggggtgacgtggcagtgacaggcgcataaactgaaatgaatggcggaaacagcagccaatcggcgatcagattggccgggcattccgcattctcccgtcctccctgagcgctggaaacttcaggaaagcaccaatgagcttccccaaaagtctgattggcctttatctgaaccaatcaaaggtgggtctggcggacgcgtcccaccccaggctctcactgggcgctgtagaatgacaggcccgagagaaatgccaatatccgcggggtcttcctcaagtgacactcagcggcaccaatcgacgtccttcttcccggcggccgagccctcctccccgcggctggccgggcggggcggggacgctgcgcggcggtggctgatgcggtagccgtgtggggcgctccgggcggcgacggcggctctcgtaggcggttccggtcttgtatctccaggcggcggcggctcatggcggcgacggagctgagaggagtggtggggccaggcccggcagccattgcagcacttggcggcggcggcgccggtcccccagtggtgggaggaggcggcggccgcggagatgcggggccaggctccggggccgcgtcagggacggtggtcgcggcggcggcgggaggcccgggcccgggggccgggggagtggcggcggctggcccggcccctgcgccgccgactgggggctcgggcggctcgggcgctgggggttcgggctcggctcgagagggctggctcttcaaatggaccaattatatcaaaggctaccagcggcgatggttcgtgctgagcaacgggctcctgagctactacagatcaaaggcagaaatgagacatacctgccgtggtaccatcaacctcgccacagccaacatcaccgtggaggactcctgcaacttcatcatttccaatgggggtgctcagacctaccatctgaaagctagttcagaagttgagcggcagcgctgggtgacggccctggaactggccaaggccaaagctgtgaagatgctggcagagtcagatgaatcaggagatgaagagtctgtctcacaaactgacaagactgagctgcagaatacccttcggaccctctctagcaaagtagaggacttgagcacgtgcaatgacttgatagctaagcatggcacagctctgcagcgttctctcagtgagctggagtccctgaagttgcctgctgagagcaatgaaaagatcaaacaggtcaacgaacgagccacactctttaggataacatccaatgccatgatcaacgcctgcagagatttcctcatgttagcccagacccatagtaaaaaatggcaaaagtcactacagtatgaaagagaccagcgtatccgactggaagaaaccctcgagcagctggcgaagcagcataatcacctggagagggccttccgaggagccacggtgctgccggcaaacactcctggcaatgtgggttctggtaaagatcagtgctgctctggcaaaggggacatgagcgatgaagatgatgagaatgaattttttgatgcacctgagatcatcaccatgcctgaaaatttgggccacaaacgtactggcagcaatatcagtggagccagcagtgacatcagccttgatgaacagtacaagcatcagctggaggagaccaaaaaggaaaagagaaccagaataccatacaagccaaactatagcctcaatttatggagcatcatgaagaactgcattggaaaagaactctctaagatccccatgccggtaaactttaatgagcccttgtccatgcttcagcgccttactgaagatctggaataccatgagctgttagaccgagctgcaaaatgtgagaattctctagaacagctctgttatgttgcagctttcaccgtgtcctcctactccactactgtcttccgcaccagtaagccattcaacccactgcttggggagacctttgagctggaccgattagaggagaatgggtaccgatccctctgtgaacaggtgagtcatcatccccctgctgctgcgcaccatgctgagtccaaaaatggctggacattgcgtcaggaaatcaaaatcaccagcaagtttcgaggcaaatacctctccattatgcccctcggtaccattcattgtattttccatgcaactgggcaccactacacttggaagaaagttaccacaactgtacacaacattattgtgggcaagttgtggatagatcagtctggcgaaattgatattgtgaatcacaagacaggagacaagtgtaatcttaaatttgttccttatagctacttctctcgggatgtagcaagaaaggtgacgggggaagtgacagatccatcaggaaaagtccactttgctcttctggggacgtgggatgagaaaatggaatgtttcaaagtacagccagtcattggggaaaatgggggtgatgctcgacagagaggccatgaagcagaggaaagcagggtcatgctgtggaaaaggaatcctttaccgaagaatgcagaaaacatgtactacttctcagagcttgctctgactctcaatgcttgggaaagtggcactgcccccacagacagccggttacgacctgaccagagactgatggaaaatggacgctgggatgaagcaaatgcggagaagcagcgcctggaggaaaaacaaagactttccagaaagaagagagaagcggaagctatgaaagccacagaggatggcacaccatatgatccctataaggcactgtggtttgagcggaagaaggaccctgttaccaaggagttaacccatatttataggggagaatactgggagtgtaaagaaaaacaggactggagctcatgcccggacattttctgaaacggcagtaacaaaaaagaggagcatataatggagaagaggacagaggatgtgtgggaaagctggaagttgtgactctcttaccaagtgctttcctcaagtttgtctctcttgaccaatcattttttccaaatcaatcaccagaaggagacaccagtggtggtgattggctggttgccttagctgattgaaactgaaatcgacataggagatactatgtctgtaagggagaggtttagtggccgaaggttagtgttattccacatccacgaagtcaagtattcttggctcttctttctccctctgcccccatttaagacaatgtcactcaccctccccttgtagtatcctgctcagccaagatctgcctaagattatgattcaggggcattttggtgctgttaaaagcaagagccgaatttagaagttcccttaaaaagaaacacataagacttaccaatggaggcattgtgaatggttgcagtggagcttaggtataacatcatcaagtgtgttcacacgcggggtcggtttaatggagtgtccacgcggagataactgcgatattggaacacctgtgagagagattgttctatagggctggaatattcagagttacattcttggaagtttctgtttttacttgcatcaaacacccctctgttgttctccatcatctttaatagcaactggagaccactttggtcattggtaagggggtgcattctcctcacaaaggggttttatggacttcctcaggcggagagcttctgagaacacaggcaggatggaaaaagactactagccacttttgctttcccaaccccccttaatgccatccttcattgtctttctggcttctcttcttctggcacagtaccattttgggtctgtgccccagtgtggagcaaaacattgcctgtcccattctgatatacttcagaatttgagagcagaagttaatgtggaacaaaagttttcaccatctctcaagccccaaggactggagccacctctggaataatgtgttaaatatctgtatattatatatatgtagagaaaaatctaattttttggtttgatttccttcccattaagaatcttgttttttgatacccttgtctccctgagactctttcttggacacgtgttgatgtggatggcactcctgctctccatcttttatgggcagagagatttcaaaacctgagcaggatcatgtctggcagttactaaacagggactttgtccatggtttgtatcatggggtgcctactgctgtctaaactctgctctcctaattagctgactcttgaaaatgaaatcctaacctctttcctgcctcttttctttctcttttcaggaagagtgtgggtagaaagtccggagggcaacttccaatttaattctgctctgtccggcgcataggctgaattccaaaagaactttcttcctaggatgtggggcttaaagcaccgtcatgtggggtggatcagataattgctcctgtggggccctggcttccttctctgtttgtgcagtatttgtttttgttgtcttgttgagaaatatcccctgtgcaacccacccttggttgaggatcacaaattgaggtgccttccttgtatgctttttgttagtattttttgtttttgttccttaactgctgagcctcagccagcgtgggtcctgggggaaataccattccaaaggaagccatccctatggggaaattggttttactgggtaaattaatacttttatttcttcccctatcccttccttcctagttgtgataaacatgggagaggagtgactttgactgctggggaatttcctcctaagaaccttattcccaaaataagccagggattatgtcaaggcttctttcaaggaggctcataaaagcagtgacctcatccggggctttggatagagtgagaattccccaactaaattggacttctctgctttatccccttctcttccttcaccatctgcactacatttctggctgatcccaatcagattcccgctaatggaagaagtttagaatctttcaggtggaataaagtcacatgaaaacaaaacacaactatatatattttcagtttttttgccttattgatttttttccaaaaaaaaaaaactactaaattaaataattttttaaaagtca

SEQ ID NO: 372 - DNA, 2438 bp, human
cccggcggcgccaaccgaagcgccccgcctgatccgtgtccgacatgctgcgccgcgctctgctgtgcctggccgtggccgccctggtgcgcgccgacgcccccgaggaggaggaccacgtcctggtgctgcggaaaagcaacttcgcggaggcgctggcggcccacaagtacctgctggtggagttctatgccccttggtgtggccactgcaaggctctggcccctgagtatgccaaagccgctgggaagctgaaggcagaaggttccgagatcaggttggccaaggtggacgccacggaggagtctgacctggcccagcagtacggcgtgcgcggctatcccaccatcaagttcttcaggaatggagacacggcttcccccaaggaatatacagctggcagagaggctgatgacatcgtgaactggctgaagaagcgcacgggcccggctgccaccaccctgcctgacggcgcagctgcagagtccttggtggagtccagcgaggtggctgtcatcggcttcttcaaggacgtggagtcggactctgccaagcagtttttgcaggcagcagaggccatcgatgacataccatttgggatcacttccaacagtgacgtgttctccaaataccagctcgacaaagatggggttgtcctctttaagaagtttgatgaaggccggaacaactttgaaggggaggtcaccaaggagaacctgctggactttatcaaacacaaccagctgccccttgtcatcgagttcaccgagcagacagccccgaagatttttggaggtgaaatcaagactcacatcctgctgttcttgcccaagagtgtgtctgactatgacggcaaactgagcaacttcaaaacagcagccgagagcttcaagggcaagatcctgttcatcttcatcgacagcgaccacaccgacaaccagcgcatcctcgagttctttggcctgaagaaggaagagtgcccggccgtgcgcctcatcaccctggaggaggagatgaccaagtacaagcccgaatcggaggagctgacggcagagaggatcacagagttctgccaccgcttcctggagggcaaaatcaagccccacctgatgagccaggagctgccggaggactgggacaagcagcctgtcaaggtgcttgttgggaagaactttgaagacgtggcttttgatgagaaaaaaaacgtctttgtggagttctatgccccatggtgtggtcactgcaaacagttggctcccatttgggataaactgggagagacgtacaaggaccatgagaacatcgtcatcgccaagatggactcgactgccaacgaggtggaggccgtcaaagtgcacagcttccccacactcaagttctttcctgccagtgccgacaggacggtcattgattacaacggggaacgcacgctggatggttttaagaaattcctggagagcggtggccaggatggggcaggggatgatgacgatctcgaggacctggaagaagcagaggagccagacatggaggaagacgatgatcagaaagctgtgaaagatgaactgtaatacgcaaagccagacccgggcgctgccgagacccctcgggggctgcacacccagcagcagcgcacgcctccgaagcctgcggcctcgcttgaaggagggcgtcgccggaaacccagggaacctctctgaagtgacacctcacccctacacaccgtccgttcacccccgtctcttccttctgcttttcggtttttggaaagggatccatctccaggcagcccaccctggtggggcttgtttcctgaaaccatgatgtactttttcatacatgagtctgtccagagtgcttgctaccgtgttcggagtctcgctgcctccctcccgcgggaggtttctcctctttttgaaaattccgtctgtgggatttttagacatttttcgacatcagggtatttgttccaccttggccaggcctcctcggagaagcttgtcccccgtgtgggagggacggagccggactggacatggtcactcagtaccgcctgcagtgtcgccatgactgatcatggctcttgcatttttgggtaaatggagacttccggatcctgtcagggtgtcccccatgcctggaagaggagctggtggctgccagccctggggcccggcacaggcctgggccttccccttccctcaagccagggctcctcctcctgtcgtgggctcattgtgaccactggcctctctacagcacggcctgtggcctgttcaaggcagaaccacgacccttgactcccgggtggggaggtggccaaggatgctggagctgaatcagacgctgacagttcttcaggcatttctatttcacaatcgaattgaacacattggccaaataaagttgaaattttaccaccaaaaaaaaaaaaaaaa

SEQ ID NO: 373 - DNA, 2680 bp, human
cagctgggggtaaggggggcggattattcatataattgttataccagacggtcgcaggcttagtccaattgcagagaactcgcttcccaggcttctgagagtcccggaagtgcctaaacctgtctaatcgacggggcttgggtggcccgtcgctccctggcttcttccctttacccagggcgggcagcgaagtggtgcctcctgcgtcccccacaccctccctcagcccctcccctccggcccgtcctgggcaggtgacctggagcatccggcaggctgccctggcctcctgcgtcaggacaagcccacgaggggcgttactgtgcggagatgcaccacgcaagagacaccctttgtaactctcttctcctccctagtgcgaggttaaaaccttcagccccacgtgctgtttgcaaacctgcctgtacctgaggccctaaaaagccagagacctcactcccggggagccagcatgtccactgcggtcctggaaaacccaggcttgggcaggaaactctctgactttggacaggaaacaagctatattgaagacaactgcaatcaaaatggtgccatatcactgatcttctcactcaaagaagaagttggtgcattggccaaagtattgcgcttatttgaggagaatgatgtaaacctgacccacattgaatctagaccttctcgtttaaagaaagatgagtatgaatttttcacccatttggataaacgtagcctgcctgctctgacaaacatcatcaagatcttgaggcatgacattggtgccactgtccatgagctttcacgagataagaagaaagacacagtgccctggttcccaagaaccattcaagagctggacagatttgccaatcagattctcagctatggagcggaactggatgctgaccaccctggttttaaagatcctgtgtaccgtgcaagacggaagcagtttgctgacattgcctacaactaccgccatgggcagcccatccctcgagtggaatacatggaggaagaaaagaaaacatggggcacagtgttcaagactctgaagtccttgtataaaacccatgcttgctatgagtacaatcacatttttccacttcttgaaaagtactgtggcttccatgaagataacattccccagctggaagacgtttctcaattcctgcagacttgcactggtttccgcctccgacctgtggctggcctgctttcctctcgggatttcttgggtggcctggccttccgagtcttccactgcacacagtacatcagacatggatccaagcccatgtatacccccgaacctgacatctgccatgagctgttgggacatgtgcccttgttttcagatcgcagctttgcccagttttcccaggaaattggccttgcctctctgggtgcacctgatgaatacattgaaaagctcgccacaatttactggtttactgtggagtttgggctctgcaaacaaggagactccataaaggcatatggtgctgggctcctgtcatcctttggtgaattacagtactgcttatcagagaagccaaagcttctccccctggagctggagaagacagccatccaaaattacactgtcacggagttccagcccctgtattacgtggcagagagttttaatgatgccaaggagaaagtaaggaactttgctgccacaatacctcggcccttctcagttcgctacgacccatacacccaaaggattgaggtcttggacaatacccagcagcttaagattttggctgattccattaacagtgaaattggaatcctttgcagtgccctccagaaaataaagtaaagccatggacagaatgtggtctgtcagctgtgaatctgttgatggagatccaactatttctttcatcagaaaaagtccgaaaagcaaaccttaatttgaaataacagccttaaatcctttacaagatggagaaacaacaaataagtcaaaataatctgaaatgacaggatatgagtacatactcaagagcataatggtaaatcttttggggtcatctttgatttagagatgataatcccatactctcaattgagttaaatcagtaatctgtcgcatttcatcaagattaattaaaatttgggacctgcttcattcaagcttcatatatgctttgcagagaactcataaaggagcatataaggctaaatgtaaaacacaagactgtcattagaattgaattattgggcttaatataaatcgtaacctatgaagtttattttctattttagttaactatgattccaattactactttgttattgtacctaagtaaattttctttaggtcagaagcccattaaaatagttacaagcattgaacttctttagtattatattaatataaaaacatttttgtatgttttattgtaatcataaatactgctgtataaggtaataaaactctgcacctaatccccataacttccagtatcattttccaattaattatcaagtctgttttgggaaacactttgaggacatttatgatgcagcagatgttgactaaaggcttggttggtagatattcaggaaatgttcactgaataaataagtaaatacattattgaaaagcaaatctgtataaatgtgaaatttttatttgtattagtaataaaacattagtagttta

SEQ ID NO: 374 - DNA, 3753 bp, human
gttctgaatgatgactgacgcgggtttgggtgatacccctcacagcccctgtcattccggagtcataaggcacccgcgcgtctagccccagcgccagggcacgcgagcggcgctggagggaggaaagcttccgcctgcgggccggacaaaagtcccgcctgcccacggctttttgcccgccgctcgtgaccgagacgcctcgccgcggccagctcgctgctctcgctggcggatggtgtgtggccgccgcaggacgcccgccgtgcccgggccatgaagtagcggctgctggcggcgccgctgcccaaccgccagccccagccccgcgctgcgctgcccggtcctctcccggcggggtcgtatcggcgtggacatggctggccgcgtccctagcctgctagttctccttgtttttccaagcagctgtttggctttccgaagcccactttctgtctttaagaggtttaaagaaactaccagaccattttccaatgaatgtcttggtaccaccagacccgtagttcctattgattcatcagattttgcattggatattcgcatgcctggggttacacctaaacagtccgatacatacttctgcatgtctatgcgaataccagtggatgaggaagccttcgtgattgacttcaagcctcgagccagcatggatactgtccatcacatgttactttttggatgcaatatgccttcatccactggaagttactggttttgtgatgaaggaacctgtacagataaagccaatattctgtatgcctgggcgagaaatgctccccctacccggctccccaaaggtgttggattcagagttggaggagagactggaagtaaatactttgtactacaggtacactatggggatattagtgcttttagagataataacaaggactgttctggtgtgtccttacacctcacacgtctgccacagcctttaattgctggcatgtaccttatgatgtctgttgacactgttatcccagcaggagaaaaagtggtgaattctgacatttcatgccattataaaaattatccaatgcatgtctttgcctatagagttcacactcaccatttaggtaaggtagtaagtggatacagagtaagaaatggacagtggacactgattggacggcagagccctcagctgccacaggctttctaccctgtggggcatccagttgatgtaagttttggtgacctactggctgcaagatgtgtattcactggtgaaggaaggacagaagccacacacattggtggcacgtctagtgatgaaatgtgcaacttatacattatgtattacatggaagccaagcatgcagtttctttcatgacctgtacccagaatgtagctccagatatgttcagaaccataccaccagaggccaacattccaattcccgtgaagtctgatatggttatgatgcatgaacatcataaagaaacagaatataaagataagattcctttactacagcagccaaaacgagaagaagaagaagtgttagaccagggtgatttctattcactactttccaagctgctaggagaaagggaagatgttgttcatgtgcacaaatataatcctacagaaaaggcagaatcagagtcagacctggtagctgagattgcaaatgtagtccaaaaaaaggatcttggtcgatctgatgccagagagggtgcagaacatgagaggggtaatgctattcttgtcagagacagaattcacaaattccacagactagtatctaccttgaggccaccagagagcagagttttctcattacagcagcccccacctggtgaaggcacctgggaaccagaacacacaggagatttccacatggaagaggcactggattggcctggagtatacttgttaccaggccaggtttctggggtggctctagaccctaagaataacctggtgattttccacagaggtgaccatgtctgggatggaaactcgtttgacagcaagtttgtttaccagcaaataggactcggaccaattgaagaagacactattcttgtcatagatccaaataatgctgcagtactccagtccagtggaaaaaatctgttttacttgccacatggcttgagtatagataaagatgggaattattgggtcacagacgtggctctccatcaggtgttcaaactggatccaaacaataaagaaggccctgtattaatcctgggaaggagcatgcaaccaggcagtgaccagaatcacttctgtcaacccactgatgtggctgtggatccaggcactggagccatttatgtatcagatggttactgcaacagcaggattgtgcagttttcaccaagtggaaagttcatcacacagtggggagaagagtcttcagggagcagtcctctgccaggccagttcactgttcctcacagcttggctcttgtgcctcttttgggccaattatgtgtggcagaccgggaaaatggtcggatccagtgttttaaaactgacaccaaagaatttgtgagagagattaagcattcatcatttggaagaaatgtatttgcaatttcatatataccaggcttgctctttgcagtgaatgggaagcctcattttggggaccaagaacctgtacaaggatttgtgatgaacttttccaatggggaaattatagacatcttcaagccagtgcgcaagcactttgatatgcctcatgatattgttgcatctgaagatgggactgtgtacattggagatgctcataccaacaccgtgtggaagttcaccttgactgagaaattggaacatcgatcagttaaaaaggctggcattgaggtccaggaaatcaaagattctgaacacaaactcgagacgagttcaggaagagtactgggaagatttagaggaaagggaagtggaggcttaaaccttggtaatttctttgcaagccgtaagggctacagtcgaaaagggtttgaccggcttagcactgagggcagtgaccaagagaaagaggatgatggaagtgaatcagaagaggagtattcagcacctctgcctgcgctcgcaccttcctcctcctgaaaaccaagctttgatttagattgagtaagatttacccagaatgtcagattcctttccctttagcacgtttaaagttctgtgtatttaattgtaaactgtactagtctgtgtgggactgtacacactttatttacttcgttttggttaagttggcttctgtttctagttgaggagtttcctaaaagttcataacagtgccattgtctttatatgaacatagactagagaaaccgtcctctttttccatcataattctaatctaacaatggaagatttgcccatttacacttttgagactttttggtggatgtaaataaccccattctttgcttgaacacagtattttcccaatagcactttcattgccagtgtctttctttggtgcctttcctgttcagcattcttagcctgtggcagtaaagagaaactttgtgctacatgacgacaaagctgctaaatctcctatttttttaaaatcactaacattatattgcaatgaaggaaataaaaaagtctctatttaaattcttttttaaattttcttcagttggtgtgtttttgggatgtcttatttttagatggttacactgttagaacactattttcagaatctgaatgtaatttgtgtaataaagtgttttcagagcaaaaaaaaaaaaaaa

SEQ ID NO: 375 - DNA, 2272 bp, human
gaaagctggtgtggagggagaagcgagtgtggtccggagaaagaaggcgtggagaagagggagggagcgagagcgagagaataaatatataaataaatacgagaacgaaatccactccgcagtctccgggctcggaaactttggccccgagcgccagagcgccagagcgcgagagcgcggcgctcgccactctgaggctggcggcctcgattccggccgcgttcccccggcccccctccgtccgcggggcctggtctccgggttctgccaggcgcatcagcccgcacaacttctggccgaggccagccggcagaggcggacttggggttggagtgtttgtttgtttgaacttcctcgtcgtcgccaccttccctccccccaacctccaccccacctcacccccctccccagcttctggacgcgtttgactgcagccaggggtggggggtgggggtagggagtgtgtgtggaggggagggagaagaggttaaaaaaaagaagacgaagaagacggaaagaaagagatcgcagcaggggtgaagggagcggacgggaagcgatttttgccgactttggattcgtccccggcgtgcgcaagaatggcggcccttcccggcacggtaccgagaatgatgcggccggctccggggcagaactacccccgcacgggattccctttggaagtgtccaccccgcttggccaaggccgggtcaatcagctgggaggggtcttcatcaatgggcgacccctgcctaaccacatccgccacaagatagtggagatggcccaccatggcatccggccctgtgtcatctcccgacagctgcgtgtctcccacggctgcgtctccaagattctttgccgctaccaggagaccgggtccatccggcctggggccatcggcggcagcaagcccagacaggtggcgactccggatgtagagaaaaagattgaggagtacaagagggaaaacccaggcatgttcagctgggagatccgggacaggctgctgaaggatgggcactgtgaccgaagcactgtgccctcaggtttagtgagttcgattagccgcgtgctcagaatcaagttcgggaagaaagaggaggaggatgaagcggacaagaaggaggacgacggcgaaaagaaggccaaacacagcatcgacggcatcctgggcgacaaagggaaccggctggacgagggctcggatgtggagtcggaacctgacctcccactgaagcgcaagcagcgacgcagtcggaccacattcacggccgagcagctggaggagctggagaaggcctttgagaggacccactacccagacatatacacccgcgaggagctggcgcagaggaccaagctgacagaggcgcgtgtgcaggtctggttcagtaaccgccgcgcccgttggcgtaagcaggcaggagccaaccagctggcggcgttcaaccaccttctgccaggaggcttcccacccaccggcatgcccacgctgcccccctaccagctgccggactccacctaccccaccaccaccatctcccaagatgggggcagcactgtgcaccggcctcagcccctgccaccgtccaccatgcaccagggcgggctggctgcagcggctgcagccgccgacaccagctctgcctacggagcccgccacagcttctccagctactctgacagcttcatgaatccggcggcgccctccaaccacatgaacccggtcagcaacggcctgtctcctcaggtgatgagcatcttgggcaaccccagtgcggtgcccccgcagccacaggctgacttctccatctccccgctgcatggcggcctggactcggccacctccatctcagccagctgcagccagcgggccgactccatcaagccaggggacagcctgcccacctcccaggcctactgcccacccacctacagcaccaccggctacagcgtggaccccgtggccggctatcagtacggccagtacggccagagtgagtgcctggtgccctgggcgtcccccgtccccattccttctcccacccccagggcctcctgcttgtttatggagagctacaaggtggtgtcagggtggggaatgtccatttcacagatggaaaaattgaagtccagccagatggaacagttcacctaaaatgacactgagttgggcaaaacccaggacatctcctggctaagcctctgcttccgtactatggctccaacagaaataaaatacacagcacaaatatcaaaaaaaaaaaa

SEQ ID NO: 376 - DNA, 4041 bp, human
agttctggaaagtcattgacaggggattaacctagaacatcaattataaacaggcagcaggcctcaggcccagacttgggtgttacaggaacagtgtggcctctctggaactctgcagaccacctgccgtgatgctgaagttccgaacagtccatgggggcctgaggctcctgggaatccgccgaacctccaccgcccccgctgcctccccaaatgtccggcgcctggagtataagcccatcaagaaagtcatggtggccaacagaggtgagattgccatccgtgtgttccgggcctgcacggagctgggcatccgcaccgtagccatctactctgagcaggacacgggccagatgcaccggcagaaagcagatgaagcctatctcatcggccgcggcctggcccccgtgcaggcctacctgcacatcccagacatcatcaaggtggccaaggagaacaacgtagatgcagtgcaccctggctacgggttcctctctgagcgagcggacttcgcccaggcctgccaggatgcaggggtccggtttattgggccaagcccagaagtggtccgcaagatgggagacaaggtggaggcccgggccatcgccattgctgcgggtgttcccgttgtccctggcacagatgcccccatcacgtccctgcatgaggcccacgagttctccaacacctacggcttccccatcatcttcaaggcggcctatgggggtggagggcgtggcatgagggtggtgcacagctacgaggagctggaggagaattacacccgggcctactcagaggctctggccgcctttgggaatggggcgctgtttgtggagaagttcatcgagaagccacggcacatcgaggtgcagatcttgggggaccagtatgggaacatcctgcacctgtacgagcgagactgctccatccagcggcggcaccagaaggtggtcgagattgcccccgccgcccacctggacccgcagcttcggactcggctcaccagcgactctgtgaaactcgctaaacaggtgggctacgagaacgcaggcaccgtggagttcctggtggacaggcacggcaagcactacttcatcgaggtcaactcccgcctgcaggtggagcacacggtcacagaggagatcaccgacgtagacctggtccatgctcagatccacgtgtctgagggcaggagcctacccgacctgggcctgcggcaggagaacatccgcatcaacgggtgtgccatccagtgccgggtcaccaccgaggaccccgcgcgcagcttccagccggacaccggccgcattgaggtgttccggagcggagagggcatgggcatccgcctggataatgcttccgccttccaaggagccgtcatctcgccccactacgactccctgctggtcaaagtcattgcccacggcaaagaccaccccacggccgccaccaagatgagcagggcccttgcggagttccgcgtccgaggtgtgaagaccaacatcgccttcctgcagaatgtgctcaacaaccagcagttcctggcaggcactgtggacacccagttcatcgacgagaacccagagctgttccagctgcggcctgcacagaaccgggcccaaaagctgttgcactacctcggccatgtcatggtaaacggtccaaccaccccgattcccgtcaaggccagccccagccccacggaccccgttgtccctgcagtgcccataggcccgcccccggctggtttcagagacatcctgctgcgagaggggcctgagggctttgctcgagctgtgcggaaccacccggggctgctgctgatggacacgaccttcagggacgcccaccagtcactgctggccactcgtgtgcgcacccacgatctcaaaaagatcgccccctatgttgcccacaacttcagcaagctcttcagcatggagaactggggaggagccacgtttgacgtcgccatgcgcttcctgtatgagtgcccctggcggcggctgcaggagctccgggagctcatccccaacatccctttccagatgctgctgcggggggccaatgctgtgggctacaccaactacccagacaacgtggtcttcaagttctgtgaagtggccaaagagaatggcatggatgtcttccgtgtgtttgactccctcaactacttgcccaacatgctgctgggcatggaggcggcaggaagtgccggaggcgtggtggaggctgccatctcatacacgggcgacgtggccgaccccagccgcaccaagtactcactgcagtactacatgggcttggccgaagagctggtgcgagctggcacccacatcctgtgcatcaaggacatggccgggctgctgaagcccacggcctgcaccatgctggtcagctccctccgggaccggttccccgacctcccactgcacatccacacccacgacacgtcaggggcaggcgtggcagccatgctggcctgtgcccaggctggagctgatgtggtggatgtggcagctgattccatgtctgggatgacttcacagcccagcatgggggccctggtggcctgtaccagagggactcccctggacacagaggtgcccatggagcgcgtgtttgactacagtgagtactgggagggggctcggggactgtacgcggccttcgactgcacggccaccatgaagtctggcaactcggacgtgtatgaaaatgagatcccagggggccagtacaccaacctgcacttccaggcccacagcatggggcttggctccaagttcaaggaggtcaagaaggcctatgtggaggccaaccagatgctgggcgatctcatcaaggtgacgccctcctccaagatcgtgggggacctggcccagtttatggtgcagaatggattgagccgggcagaggccgaagctcaggcggaagagctgtcctttccccgctccgtggtggagttcctgcagggctacatcggtgtcccccatggggggttccccgaaccctttcgctctaaggtactgaaggacctgccaagggtggaggggcggcctggagcctccctccctcccctggatctgcaggcactggagaaggagctggtagaccggcatggggaggaggtgacgccggaagatgtgctctcagcagctatgtaccccgatgtgtttgcccacttcaaggacttcactgccacctttggccccctggatagcctgaatactcgcctcttcctgcagggacccaagatcgcagaggagtttgaggtggagctggagcggggcaagacgctgcacatcaaagccctggccgtgagcgacctgaaccgggccggccagaggcaggtcttctttgagctcaatgggcagctgcggtccatcttggtcaaggacacccaggccatgaaggagatgcacttccaccccaaggccctaaaggacgtgaagggccagatcggggcgcccatgcctgggaaggtgatagacatcaaagtggtggcaggggccaaggtggccaagggccagcccctgtgtgtgctcagtgccatgaagatggagactgtggtgacctcacccatggagggtactgtccgcaaggttcatgtgaccaaggacatgacactggaaggtgacgacctcatcctggagatcgagtgatcttgccccagaccggcagcctggccatccccaagccttcaacagaagctgtgctgccacggcaggcccaggccagccagtgcccgaggccaggaaggccgggccgtggaggtcctgtccacagctggacaggagagacaccgcctgcggtggttcattcctttcagccatcgtcctttcctccggcggacagctgcttacatgttcatctcttgccaaataagggtcccctcctcactggagactacaagtggtgggtcaggtggtcctaggacccaggggaggtttaggggtcctatctcctgggggaaggggagatctaagatgtcccaggtcctgggaagtttactcaataaagctggctttcccctgc

SEQ ID NO: 377 - DNA, 2688 bp, human
tttaaagctgggaggttctgccaccaagcacggccttcccactgggaacacaaacttgctggcgggaagagcccggaaagaaacctgtggatctcccttcgagatcatccaaagagaagaaaggtgacctcacattcgtgccccttagcagcactctgcagaaatgcctcctcagctgcaaaacggcctgaacctctcggccaaagttgtccagggaagcctggacagcctgccccaggcagtgagggagtttctcgagaataacgctgagctgtgtcagcctgatcacatccacatctgtgacggctctgaggaggagaatgggcggcttctgggccagatggaggaagagggcatcctcaggcggctgaagaagtatgacaactgctggttggctctcactgaccccagggatgtggccaggatcgaaagcaagacggttatcgtcacccaagagcaaagagacacagtgcccatccccaaaacaggcctcagccagctcggtcgctggatgtcagaggaggattttgagaaagcgttcaatgccaggttcccagggtgcatgaaaggtcgcaccatgtacgtcatcccattcagcatggggccgctgggctcgcctctgtcaaagatcggcatcgagctgacggattcaccctacgtggtggccagcatgcggatcatgacgcggatgggcacgcccgtcctggaagcactgggcgatggggagtttgtcaaatgcctccattctgtggggtgccctctgcctttacaaaagcctttggtcaacaactggccctgcaacccggagctgacgctcatcgcccacctgcctgaccgcagagagatcatctcctttggcagtgggtacggcgggaactcgctgctcgggaagaagtgctttgctctcaggatggccagccggctggccaaggaggaagggtggctggcagagcacatgctggttctgggtataaccaaccctgagggtgagaagaagtacctggcggccgcatttcccagcgcctgcgggaagaccaacctggccatgatgaaccccagcctccccgggtggaaggttgagtgcgtcggggatgacattgcctggatgaagtttgacgcacaaggtcatttaagggccatcaacccagaaaatggctttttcggtgtcgctcctgggacttcagtgaagaccaaccccaatgccatcaagaccatccagaagaacacaatctttaccaatgtggccgagaccagcgacgggggcgtttactgggaaggcattgatgagccgctagcttcaggtgtcaccatcacgtcctggaagaataaggagtggagctcagaggatggggaaccttgtgcccaccccaactcgaggttctgcacccctgccagccagtgccccatcattgatgctgcctgggagtctccggaaggtgttcccattgaaggcattatctttggaggccgtagacctgctggtgtccctctagtctatgaagctctcagctggcaacatggagtctttgtgggggcggccatgagatcagaggccacagcggctgcagaacataaaggcaaaatcatcatgcatgacccctttgccatgcggcccttctttggctacaacttcggcaaatacctggcccactggcttagcatggcccagcacccagcagccaaactgcccaagatcttccatgtcaactggttccggaaggacaaggaaggcaaattcctctggccaggctttggagagaactccagggtgctggagtggatgttcaaccggatcgatggaaaagccagcaccaagctcacgcccataggctacatccccaaggaggatgccctgaacctgaaaggcctggggcacatcaacatgatggagcttttcagcatctccaaggaattctgggagaaggaggtggaagacatcgagaagtatctggaggatcaagtcaatgccgacctcccctgtgaaatcgagagagagatccttgccttgaagcaaagaataagccagatgtaatcagggcctgagtgctttacctttaaaatcattccctttcccatccataaggtgcagtaggagcaagagagggcaagtgttcccaaattgacgccaccataataatcatcaccacaccgtgagcagatctgaaaggcacactttgatttttttaaggataagaaccacagaacactgggtagtagctaatgaaattgagaagggaaatcttagcatgcctccaaaaattcacatccaatgcatagtttgttcaaatttaaggttactcaggcattgatcttttcagtgttttttcactttagctatgtggattagctagaatgcacaccaaaaaaatacttgagctgtatatatatatgtgtgtgtgtgtgtgtgtgtgtgtgtgtgtgtgtgcatgtatgtgcacatgtgtctgtgtggtatatttgtgtatgtgtatttgtatgtactgttattgaaaatatatttaatacctttggaaaaatcttgggcaagatgacctactagttttccttgaaaaaaagttgctttgttattaatattgtgcttaaattatttttatacaccattgttccttacctttacataattgcaatatttcccccttactacttcttggaaaaaaattacaaaatgaagttttatagaaaagatgg

SEQ ID NO: 378 - DNA, 1501 bp, human
atagaggacacgaccaagatggcggcggtgtctggcttggtgcggagaccccttcgggaggtctccgggctgctgaagaggcgctttcactggaccgcgccggctgcgctgcaggtgacagttcgtgatgctataaatcagggtatggatgaggagctggaaagagatgagaaggtatttctgcttggagaagaagttgcccagtatgatggggcatacaaggttagtcgagggctgtggaagaaatatggagacaagaggattattgacactcccatatcagagatgggctttgctggaattgctgtaggtgcagctatggctgggttgcggcccatttgtgaatttatgaccttcaatttctccatgcaagccattgaccaggttataaactcagctgccaagacctactacatgtctggtggccttcagcctgtgcctatagtcttcaggggacccaatggtgcctcagcaggtgtagctgcccagcactcacagtgctttgctgcctggtatgggcactgcccaggcttaaaggtggtcagtccctggaattcagaggatgctaaaggacttattaaatcagccattcgggataacaatccagtggtggtgctagagaatgaattgatgtatggggttccttttgaatttctcccggaagctcagtcaaaagattttctgattcctattggaaaagccaaaatagaaaggcaaggaacacatataactgtggtttcccattcaagacctgtgggccactgcttagaagctgcagcagtgctatctaaagaaggagttgaatgtgaggtgataaatatgcgtaccattagaccaatggacatggaaaccatagaagccagtgtcatgaagacaaatcatcttgtaactgtggaaggaggctggccacagtttggagtaggagctgaaatctgtgccaggatcatggaaggtcctgcgttcaatttcctggatgctcctgctgttcgtgtcactggtgctgatgtccctatgccttatgcaaagattctagaggacaactctatacctcaggtcaaagacatcatatttgcaataaagaaaacattaaatatttagtttggacttgaatatcaagtcgttgaaatttatttgaaatacttgctggcactgcacctggatttgtactgcaagacctgactattcataaaggaaaacgatttctaaagcaacagcaggtatttttgtacagggaagtttaaatgtgtttgtgtatggaaaactctccactctcctcccctagatgccatgcttccttttgtctgttacggttgccatgttctttgaataacaaattatatcacattttatcctctctcaccacaaggacaaagtatggatgtggcagagtcctgatgaaagatgtatccaaacaagataacttatatgtataaaattaaagcatataatacacatttactgttagtttgttttgataaggaataaaggaatttctaacatg

SEQ ID NO: 379 - DNA, 1599 bp, human
gtggtgcgccgcccgggcgaggatgcggctgttccggtggctgctgaagcagccggtgcccaagcagatcgagcgctactcgcgcttttcgccgtcgccgctctccatcaaacaattcctggacttcgggagagataatgcatgtgagaaaacttcatatatgtttctacgaaaggaacttcctgtgcggctggctaacacaatgagagaagttaatcttctgccggataatttacttaaccgcccttcagtgggattggttcagagttggtatatgcagagttttcttgaacttttagaatatgaaaataagagccctgaggatccacaggtcttggataactttctacaagttctgattaaagtcagaaatagacacaatgatgtggttcctacaatggcacaaggagtgattgaatacaaggagaagtttgggtttgatcctttcattagcactaacatccaatattttctggatcggttttataccaaccgcatctctttccgcatgcttattaatcagcacacacttctgtttgggggtgacactaatcctgttcatcctaaacacataggaagtatcgatcccacctgtaacgtggcggatgtggtgaaagatgcatatgaaacagccaagatgctgtgtgaacagtattacctggtagctccagagctggaagttgaagaattcaatgccaaagcgccagacaaacctattcaggtggtttatgtgccctcacatctgtttcatatgctatttgagttgttcaagaactcaatgagagcgacagttgaactctatgaagacagaaaagagggctaccctgctgttaaaaccctcgttactttgggtaaagaagacttatccattaagatcagtgacctaggtggtggtgtcccacttcgaaaaatagatcgtctttttaactacatgtattctactgctcctaggcccagcctggagcctaccagagctgcccctttggctggatttggttatggtttgccaatttcccgtctgtatgctagatattttcaaggagatctgaaactgtattccatggaaggagtgggtactgatgctgtcatttatttgaaggctctttcaagtgagtcatttgagagacttccagtttttaataagtccgcatggcgccattacaagaccacgcctgaagccgatgattggagcaatcccagcagtgaacccagggatgcttcaaaatacaaagcaaaacagtaatataccaccttgatttccattacaaagtatctgatttgtctgaataaaggtgtcccactcactgttccaggaattcttgcagtgtagaggtattcacaacagcaagcagggatttggcctgccatcaattttatttaaaaagcaattaagtttgcagtttgtcctcataaacgttgtaggttgaaactgaaaaataagttaaaatgatcaatcaagataaaaggtgatctatccatccaatggaatattatttggccttaaaaaggaaggacatctgatatgtgctgcaacatgggtgaatcttgaagtcattatgctaagtgaaataaaccagacataaaaggacaaatacatcg

SEQ ID NO: 380 - DNA, 2006 bp, human
ggggcggcgggcgacggggcgggcgcaggatgagggcggccattgctggggctccgcttcggggaggaggacgctgaggaggcgccgagccgcgcagcgctgcgggggaggcgcccgcgccgacgcggggcccatggccaggaccaccagccagctgtatgacgccgtgcccatccagtccagcgtggtgttatgttcctgcccatccccatcaatggtgaggacccagactgagtccagcacgccccctggcattcctggtggcagcaggcagggccccgccatggacggcactgcagccgagcctcggcccggcgccggctccctgcagcatgcccagcctccgccgcagcctcggaagaagcggcctgaggacttcaagtttgggaaaatccttggggaaggctctttttccacggttgtcctggctcgagaactggcaacctccagagaatatgcgaccagggccaactcattcgtgggaacagcgcagtacgtttctccagagctgctcacggagaagtccgcctgtaagagttcagacctttgggctcttggatgcataatataccagcttgtggcaggactcccaccattccgagctggaaacgagtatcttatatttcagaagatcattaagttggaatatgactttccagaaaaattcttccctaaggcaagagacctcgtggagaaacttttggttttagatgccacaaagcggttaggctgtgaggaaatggaaggatacggacctcttaaagcacacccgttcttcgagtccgtcacgtgggagaacctgcaccagcagacgcctccgaagctcaccgcttacctgccggctatgtcggaagacgacgaggactgctatggcaattatgacaatctcctgagccagtttggctgcatgcaggtgtcttcgtcctcctcctcacactccctgtcagcctccgacacgggcctgccccagaggtcaggcagcaacatagagcagtacattcacgatctggactcgaactcctttgaactggacttacagttttccgaagatgagaagaggttgttgttggagaagcaggctggcggaaacccttggcaccagtttgtagaaaataatttaatactaaagatgggcccagtggataagcggaagggtttatttgcaagacgacgacagctgttgctcacagaaggaccacatttatattatgtggatcctgtcaacaaagttctgaaaggtgaaattccttggtcacaagaacttcgaccagaggccaagaattttaaaactttctttgtccacacgcctaacaggacgtattatctgatggaccccagcgggaacgcacacaagtggtgcaggaagatccaggaggtttggaggcagcgataccagagccacccggacgccgctgtgcagtgacgtggcctgcggccgggctgcccttcgctgccaggacacctgccccagcgcggcttggccgccatccgggacgcttccagaccacctgccagccatcacaaggggaacgcagaggcggaaaccttgcagcatttttatttaaaagaaaagaagaaaaaaaacacccaaccacacaaagaacaaaaccagtaacaaacacaaaggaattcagggtcgctttgcttgctctctgtgctccgtggaggcctccgtgtgccctcgttgccgtggggacccagctccatgcacgtcaacccagtcccgcccagactagtggacagacctggtgtcaccagtttttcctagcatcagtccgaaccatgcgcccgccctgccccaactgtgtgctggtcctgctgtggccgaggggaccgggtgtgtttggctctttatgcccctcccgctgtggtcctggaactcttcaccagggagggagccctgcgggggccgcagctttgtggagggagccgccgtgcttctgtcacctgctccctttcttgcgtctccctgtgatgggcccttaggcctggctgggcccattaca

SEQ ID NO: 381 - DNA, 4656 bp, human
ggctggagcggcggcgggcaggcgtgcggaggacactcctgcgaccaggtactggctgtgatcgaacttctcaaccctcagagacttagatcttccacctcactccctcagccaagcctccaggccccctcgtgcatccgtggtggcctctctgccttctctgttctgttctccccatggcccagacatgagtggccccctagaaggggctgatgggggaggggaccccaggcctggggaatcattttgtcctgggggcgtcccatcccctgggcccccacagcaccggccttgcccaggccccagcctggccgatgacaccgatgccaacagcaatggttcaagtggcaatgagtccaacgggcatgagtctagaggcgcatctcagcggagctcacacagctcctcctcaggcaacggcaaggactcagccctgctggagaccactgagagcagcaagagcacaaactctcagagcccatccccacccagcagttccattgcctacagcctcctgagtgccagctcagagcaggacaacccgtccaccagtggctgcagcagtgaacagtcagcccgggcaaggactcagaaggaactcatgacagcacttcgagagctcaagcttcgactgccgccagagcgccggggcaagggccgctctgggaccctggccacgctgcagtacgcactggcctgtgtcaagcaggtgcaggccaaccaggaatactaccagcagtggagcctggaggagggcgagccttgctccatggacatgtccacctataccctggaggagctggagcacatcacgtctgagtacacacttcagaaccaggataccttctcagtggctgtctccttcctgacgggccgaatcgtctacatttcggagcaggcagccgtcctgctgcgttgcaagcgggacgtgttccggggtacccgcttctctgagctcctggctccccaggatgtgggagtcttctatggttccactgctccatctcgcctgcccacctggggcacaggggcctcagcaggttcaggcctcagggactttacccaggagaagtccgtcttctgccgtatcagaggaggtcctgaccgggatccagggcctcggtaccagccattccgcctaaccccgtatgtgaccaagatccgggtctcagatggggcccctgcacagccgtgctgcctgctgattgcagagcgcatccattcgggttacgaagctccccggataccccctgacaagaggattttcactacgcggcacacacccagctgcctcttccaggatgtggatgaaagggctgcccccctgctgggctacctgccccaggacctcctgggggccccagtgctcctgttcctgcatcctgaggaccgacccctcatgctggctatccacaagaagattctgcagttggcgggccagccctttgaccactcccctatccgcttctgtgcccgcaacggggagtatgtcaccatggacaccagctgggctggctttgtgcacccctggagccgcaaggtagccttcgtgttgggccgccacaaagtacgcacggcccccctgaatgaggacgtgttcactcccccggcccccagcccagctccctccctggacactgatatccaggagctgtcagagcagatccaccggctgctgctgcagcccgtccacagccccagccccacgggactctgtggagtcggcgccgtgacatccccaggccctctccacagccctgggtcctccagtgatagcaacgggggtgatgcagaggggcctgggcctcctgcgccagtgactttccaacagatctgtaaggatgtgcatctggtgaagcaccagggccagcagctttttattgagtctcgggcccggcctcagtcccggccccgcctccctgctacaggcacgttcaaggccaaggcccttccctgccaatccccagacccagagctggaggcgggttctgctcccgtccaggccccactagccttggtccctgaggaggccgagaggaaagaagcctccagctgctcctaccagcagatcaactgcctggacagcatcctcaggtacctggagagctgcaacctccccagcaccactaagcgtaaatgtgcctcctcctcctcctataccacctcctcagcctctgacgacgacaggcagaggacaggtccagtctctgtggggaccaagaaagatccgccgtcagcagcgctgtctggggagggggccaccccacggaaggagccagtggtgggaggcaccctgagcccgctcgccctggccaataaggcggagagtgtggtgtccgtcaccagtcagtgtagcttcagctccaccatcgtccatgtgggagacaagaagcccccggagtcggacatcatcatgatggaggacctgcctggtctagccccaggcccagcccccagcccagcccccagccccacagtagcccctgacccagccccagacgcctaccgtccagtggggctgaccaaggccgtgctgtccctgcacacgcagaaggaagagcaagccttcctcagccgcttccgagacctgggcaggctgcgtggactcgacagctcttccacagctccctcagcccttggcgagcgaggctgccaccacggccccgcacccccaagccgccgacaccactgccgatccaaagccaagcgctcacgccaccaccagaaccctcgggctgaagcgccctgctatgtctcacacccctcacccgtgccaccctccaccccctggcccaccccaccagccactacccccttcccagcggttgtccagccctaccctctcccagtgttctctcctcgaggaggcccccagcctcttccccctgctcccacatctgtgcccccagctgctttccccgcccctttggtgaccccaatggtggccttggtgctccctaactatctgttcccaaccccatccagctatccttatggggcactccagacccctgctgaagggcctcccactcctgcctcgcactccccttctccatccttgcccgccctccccccgagtcctcctcaccgcccggactctccactgttcaactcgagatgcagctctccactccagctcaatctgctgcagctggaggagctcccccgtgctgagggggctgctgttgcaggaggccctgggagcagtgccgggcccccacctcccagtgcggaggctgctgagccagaggccagactggcggaggtcactgagtcctccaatcaggacgcactttccggctccagtgacctgctcgaacttctgctgcaagaggactcgcgctccggcacaggctccgcagcctcgggctccttgggctctggcttgggctctgggtctggttcaggctcccatgaagggggcagcacctcagccagcatcactcgcagcagccagagcagccacacaagcaaatactttggcagcatcgactcttccgaggctgaggctggggctgctcggggcggggctgagcctggggaccaggtgattaagtacgtgctccaggatcccatttggctgctcatggccaatgctgaccagcgcgtcatgatgacctaccaggtgccctccagggacatgacctctgtgctgaagcaggatcgggagcggctccgagccatgcagaagcagcagcctcggttttctgaggaccagcggcgggaactgggtgctgtgcactcctgggtccggaagggccaactgcctcgggctcttgatgtgatggcctgtgtggactgtgggagcagcacccaagatcctggtcaccctgatgacccactcttctcagagctggatggactggggctggagcccatggaagagggtggaggcgagcagggcagcagcggtggcggcagtggtgagggagagggctgcgaggaggcccaaggcggggccaaggcttcaagctctcaggacttggctatggaggaggaggaagaaggcaggagctcatccagtccagccttacctacagcaggaaactgcaccagctagactccattctgggaccatctccaggagtccatgagaggctttcttctcctatgtcccaattctcagaactcagatgtggctagaccaaccagtgggaaactgccccagcttctcccaccatagggggccggacccccatcaccagcctaggatccaggggctgcctctggcctcttagggagcagagagcagaactccgcagcccagcccagaggagtgtcacctcccacctttggagaggaatccttccctcccctggacaaagttgctgacaagctgctgaagtggcctctccatattccagctgagcctgaatctgactcttgagggttggggctgcacttatttattgcggggagacagctctctctcccacctcctccccagatgggaggagagcctgaggcccaagcaggacccgggggttccagcccctagctgctctggagtgggggaggttggtggaccatggagtccctggtgctgcccctcaggtgggacccaggggttctcagctgtaccctctgccgatggcatttgtgtttttgatatttgtgtctgttactacttttttaatacaaaaagataaaaacgcc

SEQ ID NO: 382 - DNA, 4343 bp, human
ccgggtcccgggtcctttgcggcgctagggtgggcgaacccagagggacgctccgggacgatgtggggcagcgatcgcctggcgggtgctgggggaggcggggcggcagtgactgtggccttcaccaacgctcgcgactgcttcctccacctgccgcggcgtctcgtggcccagctgcatctgctgcagaatcaagctatagaagtggtctggagtcaccagcctgcattcttgagctgggtggaaggcaggcattttagtgatcaaggtgaaaatgtggctgaaattaacagacaagttggtcaaaaacttggactctcaaatgggggacaggtatttctcaagccatgttcccatgtggtatcttgtcaacaagttgaggtggaacccctctcagcagatgattgggagatactggagctgcatgctgtttcccttgaacaacatcttctagatcaaattcgaatagtttttccaaaagccatttttcctgtttgggttgatcaacaaacgtacatatttatccaaattgttgcactaataccagctgcctcttatggaaggctggaaactgacaccaaactccttattcagccaaagacacgccgagccaaagagaatacattttcaaaagctgatgctgaatataaaaaacttcatagttatggaagagaccagaaaggaatgatgaaagaacttcaaaccaagcaacttcagtcaaatactgtgggaatcactgaatctaatgaaaacgagtcagagattccagttgactcatcatcagtagcaagtttatggactatgataggaagcattttttcctttcaatctgagaagaaacaagagacatcttggggtttaactgaaatcaatgcattcaaaaatatgcagtcaaaggttgttcctctagacaatattttcagagtatgcaaatctcaacctcctagtatatataacgcgtcagcaacctctgtttttcataaacactgtgccattcatgtatttccatgggaccaggaatattttgatgtagagcccagctttactgtgacatatggaaagctagttaagctactttctccaaagcaacagcaaagtaaaacaaaacaaaatgtgttatcacctgaaaaagagaagcagatgtcagagccactagatcaaaaaaaaattaggtcagatcataatgaagaagatgagaaggcctgtgtgctacaagtagtctggaatggacttgaagaattgaacaatgccatcaaatataccaaaaatgtagaagttctccatcttgggaaagtctggattccagatgacctgaggaagagactaaatatagaaatgcatgccgtagtcaggataactccagtggaagttacccctaaaattccaagatctctaaagttacaacctagagagaatttacctaaagacataagtgaagaagacataaaaactgtattttattcatggctacagcagtctactaccaccatgcttcctttggtaatatcagaggaagaatttattaagctggaaactaaagatggactgaaggaattttctctgagtatagttcattcttgggaaaaagaaaaagataaaaatatttttctgttgagtcccaatttgctgcagaagactacaatacaagtccttctagatcctatggtaaaagaagaaaacagtgaggaaattgactttattcttccttttttaaagctgagctctttgggaggagtgaattccttaggcgtatcctccttggagcacatcactcacagcctcctgggacgccctttgtctcggcagctgatgtctcttgttgcaggacttaggaatggagctcttttactcacaggaggaaagggaagtggaaaatcaactttagccaaagcaatctgtaaagaagcatttgacaaactggatgcccatgtggagagagttgactgtaaagctttacgaggaaaaaggcttgaaaacatacaaaaaaccctagaggtggctttctcagaggcagtgtggatgcagccatctgttgtcctgctggatgaccttgacctcattgctggactgcctgctgtcccggaacatgagcacagtcctgatgcggtgcagagccagcggcttgctcatgctttgaatgatatgataaaagagtttatctccatgggaagtttggttgcactgattgccacaagtcagtctcagcaatctctacatcctttacttgtttctgctcaaggagttcacatatttcagtgcgtccaacacattcagcctcctaatcaggaacaaagatgtgaaattctgtgtaatgtaataaaaaataaattggactgtgatataaacaagttcaccgatcttgacctgcagcatgtagctaaagaaactggagggtttgtggctagagattttacagtacttgtggatcgagccatacattctcgactctctcgtcagagtatatccaccagagaaaaattagttttaacaacattggacttccaaaaggctctccgcggatttcttcctgcgtctttgcgaagtgtcaacctgcataaacctagagacctgggttgggacaagattggtgggttacatgaagttaggcagatactcatggatactatccagttacctgccaagtatccagaattatttgcaaacttgcccatacgacaaagaacaggaatactgttgtatggtccgcctggaacaggaaaaaccttactagctggggtaattgcacgagagagtagaatgaattttataagtgtcaaggggccagagttactcagcaaatacattggagcaagtgaacaagctgttcgggatatttttattagagcacaggctgcaaagccctgcattcttttctttgatgaatttgaatccattgctcctcggcggggtcatgataatacaggagttacagaccgagtagttaaccagttgctgactcagttggatggagtagaaggcttacagggtgtttatgtattggctgctactagtcgccctgacttgattgaccctgccctgcttaggcctggtcgactagataaatgtgtatactgtcctcctcctgatcaggtgtcacgtcttgaaattttaaatgtcctcagtgactctctacctctggcagatgatgttgaccttcagcatgtagcatcagtaactgactcctttactggagctgatctgaaagctttactttacaatgcccaattggaggccttacatggaatgctgctctcgagtggactccaggatggaagttccagctctgatagtgacctaagtctgtcttcaatggtctttcttaaccatagcagtggctctgacgattcagctggagatggagaatgtggcttagatcagtcccttgtttctttagagatgtccgagatccttccagatgaatcaaaattcaatatgtaccggctctactttggaagctcttatgaatcagaacttggaaatggaacctcttctgatttgagctcacaatgtctctctgcaccaagctccatgactcaggatttgcctggagttcctgggaaagaccagttgttttcacagcctccagtgttaaggacagcttcacaagagggttgccaagaacttacacaagaacaaagagatcaactgagggcagatatcagtattatcaaaggcagataccggagccaaagtggagaggacgaatccatgaaccaaccaggaccaatcaaaaccagactggctattagtcagtcacatttaatgactgcacttggtcacacaagaccatccattagtgaagatgactggaagaattttgctgagctatatgaaagctttcaaaatccaaagaggagaaaaaatcaaagtggaacaatgtttcgacctggacagaaagtaactttagcataaaatatacttctttttgatttggttctgttaagttttttgatggcttttccatatgttgtaacaggaaaaaaatggtgtctatgaatttcttcttaatttaacaaatttggttaatttataaaatcacagattggtaaatgctataattatgtaatgatcaggattgagattaatactgtagtataaattgggacattataacagattccatattttatttcctaaaatctaaattcagtctttaatgaaataatattagccaaatggtggaactaatttatttcttttgaggaaaagataataaagaatgtaattaaatttaaatttcttggaattcccagttgtatattcatcacctttgtagcatttgacaaattttatgcttagcagcttcttcactgttttgaaataaaatatcctattacctactg

SEQ ID NO: 383 - DNA, 1741 bp, human
gaattccggacaggtagtaagataggaagtgaggccaggtaccttgtgggcagtgatgtcattcggtgcgactcctaagatgtctccagagatgggagagctcacccaaaccaggttgcagaagatctggattccacacagcagcggcagcagcaggctgcaacggagaaggggctcatccataccccagtttaccaattcccccacaatggtgatcatggtgggtttaccagctcgaggcaagacctatatctccacaaagctcacacgatatctcaactggataggaacaccaactaaagtgtttaatttaggccagtatcgacgagaggcagtgagctacaagaactatgaattctttcttccagacaacatggaagccctgcaaatcaggaagcagtgcgccctggcagccctgaaggatgttcacaactatctcagccatgaggaaggtcatgttgcggtttttgatgccaccaacactaccagagaacgacggtcactgatcctgcagtttgcaaaagaacatggttacaaggtgtttttcattgagtccatttgtaatgaccctggcataattgcagaaaacatcaggcaagtgaaacttggcagccctgattatatagactgtgaccgggaaaaggttctggaagactttctaaagagaattgagtgctatgaggtcaactaccaacccttggatgaggaactggacagccacctgtcctacatcaagatcttcgacgtgggcacacgctacatggtgaaccgagtgcaggatcacatccagagccgcacagtctactacctcatgaatatccatgtcacacctcgctccatctacctttgccgacatggcgagagtgaactcaacatcagaggccgcatcggaggtgactctggcctctcagttcgcggcaagcagtatgcctatgccctggccaacttcattcagtcccagggcatcagctccctgaaggtgtggaccagtcgcatgaagaggaccatccagacagctgaggccctgggtgtcccctatgagcagtggaaggccctgaatgagattgatgcgggtgtctgtgaggagatgacctatgaagaaatccaggaacattaccctgaagaatttgcactgcgagaccaagataaatatcgctaccgctatcccaagggagagtcctatgaggatctggttcagcgtctggagccagtgataatggagctagaacgacaggagaatgtactggtgatctgccaccaggctgtcatgcggtgcctcctggcctatttcctggataaaagttcagatgagcttccatatctcaagtgccctctgcacacagtgctcaaactcactcctgtggcttatggctgcaaagtggaatccatctacctgaatgtggaggccgtgaacacacaccgggagaagcctgagaatgtggacatcacccgggaacctgaggaagccctggatactgtcccagcccactactgagccctttccaagaagtcaaactgcctgtgtcctcatcgccttccacctttaggaaatgctatctttgctcttctcctactctgccttggcctcactgaggcaccccacttccagtgaagaagtcctccgcaactcccaaacaagcctcgcttgctggccgcaaccaaggagctatctagctctggaggaaactttctttcttaattcctattctctgacgaataaagacttactgcctacaagagg

SEQ ID NO: 384 - DNA, 4953 bp, human
gcatccccttgattaaatgtttttcctcctatgcaatcaccattagctgtttggctcccattctgtattcttctgaagcagccctgcattgcaaatcaatatctttctgaaaagacagtgtgttgtgaattgccttgacagcatatgcacggttactttggctgcaatgctgctgcagagcccggttactctgccttcgtgggaactccacagatatgtgtcacaaagatgtctacacggaactgccagggaatggactcagtgatcaaacccctggacacaattcctgaggataaaaaagtcagagttcagaggacacagagcacttttgacccatttgagaaaccagctaatcaagtaaagagggtgcattctgagaacaatgcttgcattaactttaagacctcctccactggcaaagagtcacctaaagttaggcggcactccagccccagctcgccaacaagtcccaaatttggaaaagctgactcatatgaaaagctggaaaaactaggggaaggatcttatgctacagtatacaaagggaaaagcaaggtaaatgggaagttggtagctctgaaggtgatcaggctgcaggaagaagaagggacacctttcacagctatcagggaagcttctcttttaaaaggactaaaacatgctaacatagtgctacttcatgacatcatccataccaaggagacgctgacacttgtgtttgaatatgtgcacactgatttatgtcagtacatggacaagcaccctggggggctgcatccagataatgtgaagttgtttttatttcagttgctgcgaggtctgtcttacatccaccagcgttatattttgcacagagacctgaaaccacagaaccttctgatcagtgacacgggggagttaaagctggcagatttcggtcttgcaagagcaaaatccgtccctagccacacatactccaacgaagtggttaccttgtggtacagacctccagatgtccttctaggctcaacagaatattccacctgccttgacatgtggggagtaggttgcatctttgttgaaatgatccaaggagttgctgcttttccaggaatgaaagacattcaggatcaacttgaacgaatatttctggttcttggaacaccaaatgaggacacatggcctggagttcattctttaccacattttaagccagaacgctttaccctgtacagctctaaaaaccttagacaagcatggaataagctcagctatgtgaaccatgcagaggacctggcctccaagctcctacaatgttccccaaagaacagactgtcggcacaggctgccttgagccacgagtattttagtgacctgccgccacggctatgggaactcaccgacatgtcttctatttttactgtcccaaatgtgagattgcaaccagaagctggagaaagcatgcgggcctttgggaaaaacaatagttatggcaaaagtctatcaaacagcaagcactgacaagcagcacattctcaagagcacacaggattaagttgtcatcattctgggaagaaaaaaaaaacattaatgaagaggccaataatatgaagggaatcatggatcagttttctttcgctccctgtggtggatttcacttacaagaaaattgaagctggcaagaccctgttttctctgcaatttatttaaaaccttgcacgcatttggataccttgtgatttccaagaactacgtgaagattaagctttgcttactgatacatggcatgtattcttttcagtcttttgtgtttgattttgtttgatttccctctgcagcacagcgtctctgtaaaggtttttatgctttcaccagccatgtcttaaatacattaagacaacacatttggtgttcacacttcttcagtaatgtctgaacttgaaagccacagagtggcataaaacaatgtgtgttttctttgagagcagtgcacattttgcaaccactaggaaggaaattttctgctaaagcaaacccctgttctctgacttgacaacttggccccggactgtggggccccacctgttgcttaccttttgaggtaattttgcaaatgtggtttttttacttggaaataactgcacatttatatataggatattggactctgcttagcattttcaagccacatagcatgactgttttttgaataggttggaattgaaaaaacaattatcaaacgttaagaacaaagacagggataaattgcttacatttcaacctctagagattgaggtaactttttgtgtctgggtcttgtcaacatctaatttttttccatccattctgttacactttgtattttctaactggagaaaagagtgaggaacagaatgttttaaatctggtgcaaaagaactatatctgctggatgagccttgaaagcagtcttggcctgttagggcttacaaagtaaattacaaagtgatccagttcaaagtttgcttagttacaacaaagcacctttaaaaaaaatacattttaaaaaaacattccaagccaattggaagacatcattgggttcttactttaagacatctcctggaataactgttcaaatgcaggttttagaaacaatgcaggaatcttgctttaaagatgaaaaagggaatgggccagcttcccttactcaaggagttgagggaccttggaggatgaaggcgagtatgtgacactggagaaaagtggaccaggcatgtcttttgctttgatctggagggagggctgcctgatgcaggccggctcccagtggggcaggcctcgctgcagaatgcccagtagtactgcggccaaggggacagttaggagacttcatctaaagcatgaaacctagctcctctacacacaaattcctatggaaatacctttgtgtacagtgtcttacattttcctattagtcagaaagaaggagagaatgagtgagtgcttgaaatgtgtcatactgttttaggatcaagactaggaattaggagccaggttgacaaggactttttctgagagttgggtgagggtaaagcttttctataatcaagctcaatacaccaaggaaactggatccagaattcctaaactttaaaatggtactgtctgcggagtggagtatggatggttatgtcaaagtcatagttcatcctatccagatgtagcattcatggtaaacttttaagtgctaagcaaggaattatttactgattggttttaaagagagcagaaaacacccaagtgtagaatgtctactgtttgctacctagaaatcttttccattcctctttcatacattccaacccactggaagtctttagaggtattttgatttaaagtatacttaaattaggatttcttaaagaaaacatagggagaaaactttacatgcaattaaaaatggactttcctgtgatttgtttttaatcattcatttggagaagaggcatgacctttgtatttcactaagtttaaagcaagagcaactgatgattaaatgttgctttttaataaggtttttaacttgaaaatttgaaaatatttaatgttgaaagacttcaattagggctattagagttatatctccctgtcgtaggcagcttcttcggagaagtgaaatataacattactcagtggacggagaagtctgttttgttacagagacatgcctctcagaaggtcaggaggttttgagtacctatccttgccacccatacaggaaatccaaagtttggtgtctctctctctctgtctctttctttctctttctccccccaaacccctctcactccctccctccctctctccttcccctatttgcaatcatattctccctctgcttcttttctcttctgccctccttgtgggcagtcatgaaaatcaattcagactgtgttcattagcagatttattattctattgagaaagcactggaatgttttgtgagattatttttatatgaaggaatagcctgaactcaaacagatggtaagaatagtacaaacaccttagcacatcactgcacacacagtattctgaaaggagatttgacacttaattcccattttcttaaaataacagttttgttgacttaaaaatatgagatacataggatgtgaaaaaaaatgtttgcagtactcagcaaaaaatagggtacataaagcagggtggctgtccatccactgattctggggtgagaagcgatttctacctcgcaagagtgactagaaagtttctaggagcacctccaggcttgcaaagaaagtgaggcctcttggtatcctttcctcagtgtgtatatgacagccagtataatcaataccctaggttatgcgtctatatgatactcatctgtgaatattattggttttgtaatctttgttatataagaggatgtttaggctgtatatactggggtagattattgcctgccccttatacataggaatatgctgcataattgcgcataacttccatctcccttactggcttgtaggcagaggaaactgtatatgttactgccttgtacttttctcatacaccaaaaacacaccaaaaaaatcaataaaataagcaatcttctattctcattccttttcccacagcagcatattttagaggcacatacaaaacctacattctctagttgggagtggatttttaaagttttccttttatcttttatttttttttgtatgatgcactgagatgtgtactttctaacaggggattggtacctaagaaatgtggtagcattattcagaaaactattatactttcaaatgacacatagtaaggagaatggaataatacatgttgcatatttgttaccagttgtaatttgtctgtattatgaaagatgtaatggtttgtcagctgtcactgttgttttcttgtaacatgatatggaataaagtatagcagaatctccgt

SEQ ID NO: 385 - DNA, 1387 bp, human
tctccctcgagttgggacccgggaagaaccatgaagtggctgctgctgctgggtctggtggcgctctctgagtgcatcatgtacaaggtccccctcatcagaaagaagtccttgaggcgcaccctgtccgagcgtggcctgctgaaggacttcctgaagaagcacaacctcaacccagccagaaagtacttcccccagtgggaggctcccaccctggtagatgaacagcccctggagaactacctggatatggagtacttcggcactatcggcatcggaactcctgcccaggatttcaccgtcgtctttgacaccggctcctccaacctgtgggtgccctcagtctactgctccagtcttgcctgcaccaaccacaaccgcttcaaccctgaggattcttccacctaccagtccaccagcgagacagtctccatcacctacggcaccggcagcatgacaggcatcctcggatacgacactgtccaggttggaggcatctctgacaccaatcagatcttcggcctgagcgagacggaacctggctccttcctgtattatgctcccttcgatggcatcctggggctggcctaccccagcatttcctcctccggggccacacccgtctttgacaacatctggaaccagggcctggtttctcaggacctcttctctgtctacctcagcgccgatgacaagagtggcagcgtggtgatctttggtggcattgactcttcttactacactggaagtctgaactgggtgcctgttaccgtcgagggttactggcagatcaccgtggacagcatcaccatgaacggagagaccatcgcctgtgctgagggctgccaggccattgttgacaccggcacctctctgctgaccggcccaaccagccccattgccaacatccagagcgacatcggagccagcgagaactcagatggcgacatggtggtcagctgctcagccatcagcagcctgcccgacatcgtcttcaccatcaatggagtccagtaccccgtgccacccagtgcctacatcctgcagagcgaggggagctgcatcagtggcttccagggcatgaacgtccccaccgaatctggagagctttggatcctgggtgatgtcttcatccgccagtactttaccgtcttcgacagggcaaacaaccaggtcggcctggcccctgtggcttaagcctaagtctcttcagccacctcccaggaagatctggcctccgtcctatgcccactttagatgtatctaattctcctgactgttcttcccaggggagtgtgaaggtcttggccctgttccctgtcctaccaataacgtagaataaaaacataacccactgaaaaaaaaaaaaaaaaaaaaaaaaaaaaaa

SEQ ID NO: 386 - DNA, 1366 bp, human
cgcagaactcagagctgctcttcctctgtggccagttggggaccagcatcatgaagtggatggtggtggtcttggtctgcctccagctcttggaggcagcagtggtcaaagtgcccctgaagaaatttaagtctatccgtgagaccatgaaggagaagggcttgctgggggagttcctgaggacccacaagtatgatcctgcttggaagtaccgctttggtgacctcagcgtgacctacgagcccatggcctacatggatgctgcctactttggtgagatcagcatcgggactccaccccagaacttcctggtcctttttgacaccggctcctccaacttgtgggtgccctctgtctactgccagagccaggcctgcaccagtcactcccgcttcaaccccagcgagtcgtccacctactccaccaatgggcagaccttctccctgcagtatggcagtggcagcctcaccggcttctttggctatgacaccctgactgtccagagcatccaggtccccaaccaggagttcggcttgagtgagaatgagcctggtaccaacttcgtctatgcgcagtttgatggcatcatgggcctggcctaccctgctctgtccgtggatgaggccaccacagctatgcagggcatggtgcaggagggcgccctcaccagccccgtcttcagcgtctacctcagcaaccagcagggctccagcgggggagcggttgtctttgggggtgtggatagcagcctgtacacggggcagatctactgggcgcctgtcacccaggaactctactggcagattggcattgaagagttcctcatcggcggccaggcctccggctggtgttctgagggttgccaggccatcgtggacacaggcacctctctgctaactgtgccccagcagtacatgagtgctcttctgcaggccacaggggcccaggaggatgagtatggacagtttctcgtgaactgtaacagcattcagaatctgcccagcttgaccttcatcatcaatggtgtggagttccctctgccaccttcctcctatatcctcagtaacaacggctactgcaccgtgggagtcgagcccacctacctgtcctcccagaacggccagcccctgtggatcctcggggatgtcttcctcaggtcctactattccgtctacgacttgggcaacaacagagtaggctttgccactgccgcctagacttgctgcctcgacacgtgggctcccctcttcctcttgaccctgcaccctcctagggcattgtatctgtctttccactctggattcagccttctttttctggactctggactttctctaataataaatagttcttctaaaaaaaaaaa

SEQ ID NO: 387 - DNA, 1937 bp, human
ggccgcagtttctggagggagccgctgcgggtctttccctcactcgtcctccgcgcgtcgccgctcttcggttctgctctgtccgccgccatggcccaagctgacatcgcgctgatcggattggccgtcatgggccagaacttaattctgaacatgaatgaccacggctttgtggtctgtgcttttaataggactgtctccaaagttgatgatttcttggccaatgaggcaaagggaaccaaagtggtgggtgcccagtccctgaaagagatggtctccaagctgaagaagccccggcggatcatcctcctggtgaaggctgggcaagctgtggatgatttcatcgagaaattggtaccattgttggatactggtgacatcatcattgacggaggaaattctgaatatagggacaccacaagacggtgccgagacctcaaggccaagggaattttatttgtggggagcggagtcagtggtggagaggaaggggcccggtatggcccatcgctcatgccaggagggaacaaagaagcgtggccccacatcaagaccatcttccaaggcattgctgcaaaagtgggaactggagaaccctgctgtgactgggtgggagatgagggagcaggccacttcgtgaagatggtgcacaacgggatagagtatggggacatgcagctgatctgtgaggcataccacctgatgaaagacgtgctgggcatggcgcaggacgagatggcccaggcctttgaggattggaataagacagagctagactcattcctgattgaaatcacagccaatattctcaagttccaagacaccgatggcaaacacctgctgccaaagatcagggacagcgcggggcagaagggcacagggaagtggaccgccatctccgccctggaatacggcgtacccgtcaccctcattggagaagctgtctttgctcggtgcttatcatctctgaaggatgagagaattcaagctagcaaaaagctgaagggtccccagaagttccagtttgatggtgataagaaatcattcctggaggacattcggaaggcactctacgcttccaagatcatctcttacgctcaaggctttatgctgctaaggcaggcagccaccgagtttggctggactctcaattatggtggcatcgccctgatgtggagagggggctgcatcattagaagtgtattcctaggaaagataaaggatgcatttgatcgaaacccggaacttcagaacctcctactggacgacttctttaagtcagctgttgaaaactgccaggactcctggcggcgggcagtcagcactggggtccaggctggcattcccatgccctgttttaccactgccctctccttctatgacgggtacagacatgagatgcttccagccagcctcatccaggctcagcgggattacttcggggctcacacctatgaactcttggccaaaccagggcagtttatccacaccaactggacaggccatggtggcaccgtgtcatcctcgtcatacaatgcctgatcatgctgctcctgtcaccctccacgattccacagaccaggacattccatgtgcctcatggcactgccacctggccctttgccctattttctgttcagttttttaaaagtgttgtaagagactcctgaggaagacacacagtttatttgtaaagtagctctgtgagagccaccatgccctctgcccttgcctcttgggactgaccaggagctgctcatgtgcgtgagagtgggaaccatctccttgcggcagtggcttccgcgtgccccgtgtgctggtgcggttcccatcacgcagacaggaagggtgtttgcgcactctgatcaactggaacctctgtatcatgcggctgaattccctttttcctttactcaataaaagctacatcacactga

SEQ ID NO: 388 - DNA, 2451 bp, human
cctgccaggaggtgggctggcgcggagggagggccctgtcccctgtccctttaaggaggagggccaaacgccggcctagagtgcggcgtagcccccacccgccgtgccctcaccccagagcagctgcagcctcagccggccgcccctccgccagccaagtccgccgctctgacccccggcagcaagtcgccaccatggtgaagatcgtgacagttaagacccaggcgtaccaggaccagaagccgggcacgagcgggctgcggaagcgggtgaaggtgttccagagcagcgccaactacgcggagaacttcatccagagtatcatctccaccgtggagccggcgcagcggcaggaggccacgctggtggtgggcggggacggccggttctacatgaaggaggccatccagctcatcgctcgcatcgctgccgccaacgggatcggtcgcttggttatcggacagaatggaatcctctccacccctgctgtatcctgcatcattagaaaaatcaaagccattggtgggatcattctgacagccagtcacaacccagggggccccaatggagattttggaatcaaattcaatatttctaatggaggtcctgctccagaagcaataactgataaaattttccaaatcagcaagacaattgaagaatatgcagtttgccctgacctgaaagtagaccttggtgttctgggaaagcagcagtttgacttggaaaataagttcaaacccttcacagtggaaattgtggattcggtagaagcttatgctacaatgctgagaagcatctttgatttcagtgcactgaaagaactactttctgggccaaaccgactgaagatccgtattgatgctatgcatggagttgtgggaccgtatgtaaagaagatcctctgtgaagaactcggtgcccctgcgaactcggcagttaactgcgttcctctggaggactttggaggccaccaccctgaccccaacctcacctatgcagctgacctggtggagaccatgaagtcaggagagcatgattttggggctgcctttgatggagatggggatcgaaacatgattctgggcaagcatgggttctttgtgaacccttcagactctgtggctgtcattgctgccaacatcttcagcattccgtatttccagcagactggggtccgcggctttgcacggagcatgcccacgagtggtgctctggaccgggtggctagtgctacaaagattgctttgtatgagaccccaactggctggaagttttttgggaatttgatggacgcgagcaaactgtccctttgtggggaggagagcttcgggaccggttctgaccacatccgtgagaaagatggactgtgggctgtccttgcctggctctccatcctagccacccgcaagcagagtgtggaggacattctcaaagatcattggcaaaagtatggccggaatttcttcaccaggtatgattacgaggaggtggaagctgagggcgcaaacaaaatgatgaaggacttggaggccctgatgtttgatcgctcctttgtggggaagcagttctcagcaaatgacaaagtttacactgtggagaaggccgataactttgaatacagcgacccagtggatggaagcatttcaagaaatcagggcttgcgcctcattttcacagatggttctcgaatcgtcttccgactgagcggcactgggagtgccggggccaccattcggctgtacatcgatagctatgagaaggacgttgccaagattaaccaggacccccaggtcatgttggccccccttatttccattgctctgaaagtgtcccagctgcaggagaggacgggacgcactgcacccactgtcatcacctaagaagacaggcctgatgtggtacgtccctccacccccggacccatccaagtcatctgattgaagagcatgacagaaacaaaatgtattcaccaagcattttaggatttgactttttcactaaccagttgacgagcagtgcatttacaaggcactgccaaacaagatgcccttgggagctgtgagggaaagaggacctgcgggcttagatcaatctcaattccttttcatgccctcctgcattgctgctgcgtgggtatttgtctccttagccatcaggtacagtttacactacaatgtaagctataggtggagcatcagcagtgagtgaggccattcttcatccttaggatgtggcaatgaaatgatggtgcaagttcctttctcttttgtgaatctttccccccatttcctgtttacatgtaacccaacaaaatgcaatttctagtgccttctgtccaatcagttctttcctctgagtgagacgtacttggctacagatttctgccttgttttgcgacattgtcccattcacacagatattttgggataataaaggaaaataagctac

SEQ ID NO: 389 - DNA, 5785 bp, human
atctctatccttcttctggtccttcctagaaaatcaggtggagatgatagtggcttgcatgatggtggtagagctggaggtgcagggcaaaggtcagattctgaatatattttgaaagtaaaggcaacaagatttcctgacagattgattatggtgtgtcaaagaaagagaggaatgcaggatgattccagtgtttttgttgacaactataagtctggagctgccaactggatgcagaagttcactggagggcccagcctggggaaaggatcaggagcaggttaggcatgttaagcttgagatgtctgttaaacatccagataggaatgtcaaagatgcacttgtgtttaagagtcaggaatgcaagagggaattttaggctagaaacaaaaagttagaaattattcgatacagatggtatttaaagctgtgtgactgactgacatgacagaagtggcgagaatagactgagaagtccaaggaatgagccttggaccactccagtgttaggtaagtagttgaaaaaaagagagagagagaaggcatcaaaggagactgaggaagagtgatcaggaaagcataggaaaatccgagaaacatatggtgtcctggaatctatatgaaaaagatatattcagaaagacagagtgataaatctgtcaaattattgaatttgtcaggtaaaataagaacagagaattgatctttggacttagcaaagcagagattatcagtgacttttataaaaatagtttcggtagtgtggaaagatcaaacttctgtttagagtgggtttcagagagaacaacaggaattgaagaagtaataaactttgccaaccagtttagctccaaaggaaaagagggaaatatgatggtagctggcaggggaagtgtggtcaagagaggttttttgtttgtttttcaagatggaagaaataacagtatgtatgtaagctcacaggagggatccagcaggcatggggaaattgatgatataggacagaaagggaagaatggctccttgtgaaagtgaaaggggatgggatctacaggatgaacatgcaaacaaagactggctgcaaagagaggcatgaatagttcatttacagaaacagcaaaggcagagtgttggtacagatgctggtaagtggaaaaatatcatggtaggaggttatggagttccattctaaacacttcaacttcatcagtgaaataagcacggtaatttagcagaatgtgaagatgtaaaagaacagaatttgagaaaacagacgatatgaaataattattagaaaagcagagactgaagaaactgtcatctccttatgtgctaatgagtttaataatgtcctccagtcaccacaagccttctttcaaactacacaattccaactgcttccgtctcagagtatcttgaaataatgatctgaccgcctgttagaccagtgaagggaaggaatttgggttgatttaagaagagaatcctcatggtcatggtagactgatatggagagaaaacattttgaggaaaaatactcaactaaattcatttctactccagcatgcagtttcaagtcaagttccaccttagctccaggtggcaggcagagcaggatgcagaggcacagcacaagtaagggatccaatgactgagtcaagaattacataacctggccagacagctggtacatgggaaagtgctaagagggcaccaacagcgttcctcctccccaaggagcataatgtgatggttcctgccggccctggctgactctcgccgtccttggagataattgggttcagtgccacctggaccagaactggggatgcggaagcaacctgccagacacgcgcgaggttcgaggctgagatggatcttgaggcggcaaagaacggaacagcctggcgccccacgagcgcggagggcgactttgaactgggcatcagcagcaaacaaaaaaggaaaaaaacgaagacagtgaaaatgattggagtattaacattgtttcgatactccgattggcaggataaattgtttatgtcgctgggtaccatcatggccatagctcacggatcaggtctccccctcatgatgatagtatttggagagatgactgacaaatttgttgatactgcaggaaacttctcctttccagtgaacttttccttgtcgctgctaaatccaggcaaaattctggaagaagaaatgactagatatgcatattactactcaggattgggtgctggagttcttgttgctgcctatatacaagtttcattttggactttggcagctggtcgacagatcaggaaaattaggcagaagttttttcatgctattctacgacaggaaataggatggtttgacatcaatgacaccactgaactcaatacgcggctaacagatgacatctccaaaatcagtgaaggaattggtgacaaggttggaatgttctttcaagcagtagccacgttttttgcaggattcatagtgggattcatcagaggatggaagctcacccttgtgataatggccatcagccctattctaggactctctgcagccgtttgggcaaagatactctcggcatttagtgacaaagaactagctgcttatgcaaaagcaggcgccgtggcagaagaggctctgggggccatcaggactgtgatagctttcgggggccagaacaaagagctggaaaggtatcagaaacatttagaaaatgccaaagagattggaattaaaaaagctatttcagcaaacatttccatgggtattgccttcctgttaatatatgcatcatatgcactggccttctggtatggatccactctagtcatatcaaaagaatatactattggaaatgcaatgacagtttttttttcaatcctaattggagctttcagtgttggccaggctgccccatgtattgatgcttttgccaatgcaagaggagcagcatatgtgatctttgatattattgataataatcctaaaattgacagtttttcagagagaggacacaaaccagacagcatcaaagggaatttggagttcaatgatgttcacttttcttacccttctcgagctaacgtcaagatcttgaagggcctcaacctgaaggtgcagagtgggcagacggtggccctggttggaagtagtggctgtgggaagagcacaacggtccagctgatacagaggctctatgaccctgatgagggcacaattaacattgatgggcaggatattaggaactttaatgtaaactatctgagggaaatcattggtgtggtgagtcaggagccggtgctgttttccaccacaattgctgaaaatatttgttatggccgtggaaatgtaaccatggatgagataaagaaagctgtcaaagaggccaacgcctatgagtttatcatgaaattaccacagaaatttgacaccctggttggagagagaggggcccagctgagtggtgggcagaagcagaggatcgccattgcacgtgccctggttcgcaaccccaagatccttctgctggatgaggccacgtcagcattggacacagaaagtgaagctgaggtacaggcagctctggataaggccagagaaggccggaccaccattgtgatagcacaccgactgtctacggtccgaaatgcagatgtcatcgctgggtttgaggatggagtaattgtggagcaaggaagccacagcgaactgatgaagaaggaaggggtgtacttcaaacttgtcaacatgcagacatcaggaagccagatccagtcagaagaatttgaactaaatgatgaaaaggctgccactagaatggccccaaatggctggaaatctcgcctatttaggcattctactcagaaaaaccttaaaaattcacaaatgtgtcagaagagccttgatgtggaaaccgatggacttgaagcaaatgtgccaccagtgtcctttctgaaggtcctgaaactgaataaaacagaatggccctactttgtcgtgggaacagtatgtgccattgccaatggggggcttcagccggcattttcagtcatattctcagagatcatagcgatttttggaccaggcgatgatgcagtgaagcagcagaagtgcaacatattctctttgattttcttatttctgggaattatttctttttttactttcttccttcagggtttcacgtttgggaaagctggcgagatcctcaccagaagactgcggtcaatggcttttaaagcaatgctaagacaggacatgagctggtttgatgaccataaaaacagtactggtgcactttctacaagacttgccacagatgctgcccaagtccaaggagccacaggaaccaggttggctttaattgcacagaatatagctaaccttggaactggtattatcatatcatttatctacggttggcagttaaccctattgctattagcagttgttccaattattgctgtgtcaggaattgttgaaatgaaattgttggctggaaatgccaaaagagataaaaaagaactggaagctgctggaaagattgcaacagaggcaatagaaaatattaggacagttgtgtctttgacccaggaaagaaaatttgaatcaatgtatgttgaaaaattgtatggaccttacaggaattctgtgcagaaggcacacatctatggaattacttttagtatctcacaagcatttatgtatttttcctatgccggttgttttcgatttggtgcatatctcattgtgaatggacatatgcgcttcagagatgttattctggtgttttctgcaattgtatttggtgcagtggctctaggacatgccagttcatttgctccagactatgctaaagctaagctgtctgcagcccacttattcatgctgtttgaaagacaacctctgattgacagctacagtgaagaggggctgaagcctgataaatttgaaggaaatataacatttaatgaagtcgtgttcaactatcccacccgagcaaacgtgccagtgcttcaggggctgagcctggaggtgaagaaaggccagacactagccctggtgggcagcagtggctgtgggaagagcacggtggtccagctcctggagcggttctacgaccccttggcggggacagtgtttgtggactttggttttcagcttctcgatggtcaagaagcaaagaaactcaatgtccagtggctcagagctcaactcggaatcgtgtctcaggagcctatcctatttgactgcagcattgccgagaatattgcctatggagacaacagccgggttgtatcacaggatgaaattgtgagtgcagccaaagctgccaacatacatcctttcatcgagacgttaccccacaaatatgaaacaagagtgggagataaggggactcagctctcaggaggtcaaaaacagaggattgctattgcccgagccctcatcagacaacctcaaatcctcctgttggatgaagctacatcagctctggatactgaaagtgaaaaggttgtccaagaagccctggacaaagccagagaaggccgcacctgcattgtgattgctcaccgcctgtccaccatccagaatgcagacttaatagtggtgtttcagaatgggagagtcaaggagcatggcacgcatcagcagctgctggcacagaaaggcatctatttttcaatggtcagtgtccaggctgggacacagaacttatgaacttttgctacagtatattttaaaaataaattcaaattattctacccatttt

SEQ ID NO: 390 - DNA, 4215 bp, human
gccgccgggcgccaggcctgagcggtgggagggctctgcggggcctggtgttcaggcgtcccaccacgagggtggagcagcgttggatacttgttccttagggaccgaagctccggtggcacccgggctatttctcagaggacaattagtaacgtgtcgccatgaggagccggagtaactccggggtccggctggacggctacgctcgactggtgcaacagaccatcctgtgccatcagaatccagtgactggcttgcttccagccagctatgatcagaaagatgcttgggtccgagataatgtgtacagcatcttggctgtgtggggtttgggcctggcctatcggaagaatgcagaccgggatgaggataaggcaaaggcctatgaattggagcagagtgtagtgaagctgatgagaggactactgcactgcatgatcagacaggtggataaagtagaatccttcaaatatagtcagagtactaaggatagcctccatgcaaagtacaacaccaaaacctgtgccactgtagtgggtgatgatcaatggggacacctgcagttggatgctacctctgtgtacctgctcttcttagcccaaatgactgcctcaggactccatatcatccacagcctagatgaagtcaatttcatacagaaccttgtgttttacattgaagctgcatataaaactgctgacttcgggatatgggaacgtggagacaagaccaaccaagggatctcagagttgaatgccagttcagttggaatggcaaaggcagccctggaagcattagatgaactggatctgtttggtgtgaaaggtgggcctcaatcagttatccatgtcctggctgatgaagtacagcactgccagtctatcctaaattcactactgccccgtgcttcaacatcaaaagaggttgatgctagtctactctcagtggtttccttccctgcctttgcagtagaggatagccagttggtggagctcacaaaacaggaaatcatcaccaagcttcagggtcgttatggttgctgtcgctttctacgagatggatataaaactcctaaagaggatcccaatcgtctgtactatgaaccagctgagctgaagctatttgaaaacattgagtgtgaatggccattgttctggacatactttattcttgatggggtcttcagtggcaatgcagaacaggttcaagaatataaagaggctcttgaagcagtcctcatcaagggcaaaaatggagtcccacttctgccagagctgtacagtgttcctcctgacagggtcgatgaagaatatcagaatcctcacactgtggaccgagtccccatggggaaattgcctcacatgtggggtcagtctctatacattttaggaagcttgatggcagagggatttttagcccctggagaaattgatcccctgaatcgcaggttttctactgtaccgaagcccgatgttgtggttcaagtctccattctagctgaaacagaagaaatcaagaccattttgaaggacaagggaatttacgtggagaccattgctgaggtataccccatcagagtacaaccagctcgtattctcagccacatttattccagcctaggatgcaacaatagaatgaaactcagtggacgaccctacagacacatgggagtgcttggaacttcaaaactctatgacattcggaaaactatctttactttcactccacagtttatagaccagcaacagttctacctggctctggacaacaagatgatagtggaaatgcttagaacagacctctcctacctctgtagccgctggcggatgacaggccagcccaccatcaccttccccatctcatacagcatgcttgatgaagatggaacaagcttgaattcaagtatcctggcagcactccgaaaaatgcaagatgggtattttggtggggcaagggttcaaacaggtaaattgtcagagtttttgacaacatcttgttgcacacacttgagcttcatggaccctggacctgagggtaagctgtacagtgaagattatgatgacaactatgattacctggaatctggcaactggatgaatgattatgattcaaccagtcatgctcgctgtggtgatgaagttgctcgttatttagatcaccttttggcgcacactgctccccatcctaaactagcccctacctcacagaagggagggctagatcggttccaagctgctgtgcaaacaacctgcgacttaatgtccttggtgaccaaggccaaggaactgcatgtacagaatgttcacatgtatcttcctacgaagttatttcaggcttcccggccttcattcaacttacttgattcacctcatccccgacaggagaaccaggttccctctgttcgtgtagaaatacatcttcctagagaccagtctggggaggtggactttaaagcactggttttacagttgaaggagacctcaagcttacaggaacaagctgatatcctctatatgctgtatactatgaaaggacctgactggaacactgaattgtataatgaacggagtgctacagtgagagagcttcttaccgagctgtatggcaaagtgggagaaattcgtcactggggcctgatccgatacatttctgggatcttaaggaagaaagtggaagcacttgatgaggcctgcacagaccttctctcccaccagaaacatttgacagtaggacttcctccagaacctcgagaaaagactatctctgcacctctgccctatgaggcgctcactcagctgatagatgaagccagtgaaggggatatgagcatttcaatccttacacaggaaataatggtatatctagccatgtatatgcgaacccagcctggcctctttgctgaaatgtttcgacttcgaattggtctgatcatacaagttatggcaacagaactggcccactcccttcgatgctcagctgaggaagccacagagggcctgatgaatctcagtccttcggccatgaagaatctcctgcatcacattctcagcggcaaggagtttggagtggaacgaagcgttcgtcccactgattcaaatgtcagtcctgctatttctatccacgagattggtgctgttggagcaaccaaaacagaacgaactgggatcatgcagttaaaaagtgagataaagcaggtggaatttcgtagactgtcaatctcagctgagagtcagtcacctggaacctctatgactccaagtagtgggtcctttcctagtgcatatgatcagcagtcatctaaagatagtcgtcaaggtcaatggcaacgccgaagaaggctggatggggcactgaatagagttccagttggattttatcagaaagtatggaaagttttgcagaagtgtcacggactttctgttgaagggtttgtccttccttcctctaccactagagagatgactccaggtgagattaaattctctgttcatgtggagtctgtcctgaatcgtgtacctcagccagagtaccgtcagctgctggttgaagccatccttgtcctcaccatgctggcagatattgaaattcatagcatcggaagcatcattgctgtggaaaaaatagtgcatattgccaatgacttgttccttcaagaacagaaaacccttggcgcagatgataccatgttggcaaaggatcccgcatctggcatctgtactcttctgtatgacagtgcacccagtggcaggtttggcaccatgacctacctctccaaggcagccgccacctacgtgcaggagttcctgccccacagcatctgtgccatgcaatgagggctttggttcctggcttctgggagccttttgacagctggtccctgcctcggttgattgtgcatggaactaaaatgttattgcctaatcactccaaccctgcccctttctgtcccatccttcccaagaagagagaactttttcgataaactaactactgtagaagaagtgaacacttacctggaggctcaccttgcagaaccagtgacaatcttatgagtataatgaacactcagccaggcctgtcatgattggctttatttctttcatcattcataaaagtttgcatgtgtttttattctctagatctgttaccaatatagttttctaactcctgtttggggagcaagtgttaataataacttattcctaaaaaaaaaaa

SEQ ID NO: 391 - DNA, 1559 bp, human
gcggagcacagtccgccgagcacaagctccagcatcccgtcaggggttgcaggtgtgtgggaggcttgaaactgttacaatatggctttccttggactcttctctttgctggttctgcaaagtatggctacaggggccactttccctgaggaagccattgctgacttgtcagtgaatatgtataatcgtcttagagccactggtgaagatgaaaatattctcttctctccattgagtattgctcttgcaatgggaatgatggaacttggggcccaaggatctacccagaaagaaatccgccactcaatgggatatgacagcctaaaaaatggtgaagaattttctttcttgaaggagttttcaaacatggtaactgctaaagagagccaatatgtgatgaaaattgccaattccttgtttgtgcaaaatggatttcatgtcaatgaggagtttttgcaaatgatgaaaaaatattttaatgcagcagtaaatcatgtggacttcagtcaaaatgtagccgtggccaactacatcaataagtgggtggagaataacacaaacaatctggtgaaagatttggtatccccaagggattttgatgctgccacttatctggccctcattaatgctgtctatttcaaggggaactggaagtcgcagtttaggcctgaaaatactagaaccttttctttcactaaagatgatgaaagtgaagtccaaattccaatgatgtatcagcaaggagaattttattatggggaatttagtgatggctccaatgaagctggtggtatctaccaagtcctagaaataccatatgaaggagatgaaataagcatgatgctggtgctgtccagacaggaagttcctcttgctactctggagccattagtcaaagcacagctggttgaagaatgggcaaactctgtgaagaagcaaaaagtagaagtatacctgcccaggttcacagtggaacaggaaattgatttaaaagatgttttgaaggctcttggaataactgaaattttcatcaaagatgcaaatttgacaggcctctctgataataaggagatttttctttccaaagcaattcacaagtccttcctagaggttaatgaagaaggctcagaagctgctgctgtctcaggaatgattgcaattagtaggatggctgtgctgtatcctcaagttattgtcgaccatccatttttctttcttatcagaaacaggagaactggtacaattctattcatgggacgagtcatgcatcctgaaacaatgaacacaagtggacatgatttcgaagaactttaagttactttatttgaataacaaggaaaacagtaactaagcacattatgtttgcaactggtatatatttaggatttgtgttttacagtatatcttaagataatatttaaaatagttccagataaaaacaatatatgtaaattataagtaacttgtcaaggaatgttatcagtattaagctaatggtcctgttatgtcattgtgtttgtgtgctgttgtttaaaataaaagtacctattgaacatgtg

SEQ ID NO: 392 - DNA, 5061 bp, human
atggctcagatatttagcaacagcggatttaaagaatgtccattttcacatccggaaccaacaagagcaaaagatgtggacaaagaagaagcattacagatggaagcagaggctttagcaaaactgcaaaaggatagacaagtgactgacaatcagagaggctttgagttgtcaagcagcaccagaaaaaaagcacaggtttataacaagcaggattatgatctcatggtgtttcctgaatcagattcccaaaaaagagcattagatattgatgtagaaaagctcacccaagctgaacttgagaaactattgctggatgacagtttcgagactaaaaaaacacctgtattaccagttactcctattctgagcccttccttttcagcacagctctattttagacctactattcagagaggacagtggccacctggattacctgggccttccacttatgctttaccttctatttatccttctacttacagtaaacaggctgcattccaaaatggcttcaatccaagaatgcccacttttccatctacagaacctatatatttaagtcttccgggacaatctccatatttctcatatcctttgacacctgccacaccctttcatccacaaggaagcttacctatctatcgtccagtagtcagtactgacatggcaaaactatttgacaaaatagctagtacatcagaatttttaaaaaatgggaaagcaaggactgatttggagataacagattcaaaagtcagcaatctacaggtatctccaaagtctgaggatatcagtaaatttgactggttagacttggatcctctaagtaagcctaaggtggataatgtggaggtattagaccatgaggaagagaaaaatgtttcaagtttgctagcaaaggatccttgggatgctgttcttcttgaagagagatcgacagcaaattgtcatcttgaaagaaaggtgaatggaaaatccctttctgtggcaactgttacaagaagccagtctttaaatattcgaacaactcagcttgcaaaagcccagggccatatatctcagaaagacccaaatgggaccagtagtttgccaactggaagttctcttcttcaagaagttgaagtacagaatgaggagatggcagctttttgtcgatccattacaaaattgaagaccaaatttccatataccaatcaccgcacaaacccaggctatttgttaagtccagtcacagcgcaaagaaacatatgcggagaaaatgctagtgtgaaggtctccattgacattgaaggatttcagctaccagttacttttacgtgtgatgtgagttctactgtagaaatcattataatgcaagccctttgctgggtacatgatgacttgaatcaagtagatgttggcagctatgttctaaaagtttgtggtcaagaggaagtgctgcagaataatcattgccttggaagtcatgagcatattcaaaactgtcgaaaatgggacacagaaattagactacaactcttgaccttcagtgcaatgtgtcaaaatctggcccgaacagcagaagatgatgaaacacccgtggatttaaacaaacacctgtatcaaatagaaaaaccttgcaaagaagccatgacgagacaccctgttgaagaactcttagattcttatcacaaccaagtagaactggctcttcaaattgaaaaccaacaccgagcagtagatcaagtaattaaagctgtaagaaaaatctgtagtgctttagatggtgtcgagactcttgccattacagaatcagtaaagaagctaaagagagcagttaatcttccaaggagtaaaactgctgatgtgacttctttgtttggaggagaagacactagcaggagttcaactaggggctcacttaatcctgaaaatcctgttcaagtaagcataaaccaattaactgcagcaatttatgatcttctcagactccatgcaaattctggtaggagtcctacagactgtgcccaaagtagcaagagtgtcaaggaagcatggactacaacagagcagctccagtttactatttttgctgctcatggaatttcaagtaattgggtatcaaattatgaaaaatactacttgatatgttcactgtctcacaatggaaaggatctttttaaacctattcaatcaaagaaggttggcacttacaagaatttcttctatcttattaaatgggatgaactaatcatttttcctatccagatatcacaattgccattagaatcagttcttcaccttactctttttggaattttaaatcagagcagtggaagttcccctgattctaataagcagagaaagggaccagaagctttgggcaaagtttctttacctctttgtgactttagacggtttttaacatgtggaactaaacttctatatctttggacttcatcacatacaaattctgttcctggaacagttaccaaaaaaggatatgtcatggaaagaatagtgctacaggttgattttccttctcctgcatttgatattatttatacaactcctcaagttgacagaagcattatacagcaacataacttagaaacactagagaatgatataaaagggaaacttcttgatattcttcataaagactcatcacttggactttctaaagaagataaagcttttttatgggagaaacgttattattgcttcaaacacccaaattgtcttcctaaaatattagcaagcgccccaaactggaaatggggtaatcttgccaaaacttactcattgcttcaccagtggcctgcattgtacccactaattgcattggaacttcttgattcaaaatttgctgatcaggaagtaagatccctagctgtgacctggattgaggccattagtgatgatgagctaacagatcttcttccacagtttgtacaagctttgaaatatgaaatttacttgaatagttcattagtgcaattccttttgtccagggcattgggaaatatccagatagcacacaatttatattggcttctcaaagatgccctgcatgatgtacagtttagtacccgatacgaacatgttttgggtgctctcctgtcagtaggaggaaaacgacttagagaagaacttctaaaacagacgaaacttgtacagcttttaggaggagtagcagaaaaagtaaggcaggctagtggatcagccagacaggttgttctccaaagaagtatggaacgagtacagtccttttttcagaaaaataaatgccgtctccctctcaagccaagtctagtggcaaaagaattaaatattaagtcgtgttccttcttcagttctaatgctgtccccctaaaagtcacaatggtgaatgctgaccctctgggagaagaaattaatgtcatgtttaaggttggtgaagatcttcggcaagatatgttagctttacagatgataaagattatggataagatctggcttaaagaaggactagatctgaggatggtaattttcaaatgtctctcaactggcagagatcgaggcatggtggagctggttcctgcttccgataccctcaggaaaatccaagtggaatatggtgtgacaggatcctttaaagataaaccacttgcagagtggctaaggaaatacaatccctctgaagaagaatatgaaaaggcttcagagaactttatctattcctgtgctggatgctgtgtagccacctatgttttaggcatctgtgatcgacacaatgacaatataatgcttcgaagcacgggacacatgtttcacattgactttggaaagtttttgggacatgcacagatgtttggcagcttcaaaagggatcgggctccttttgtgctgacctctgatatggcatatgtcattaatgggggtgaaaagcccaccattcgttttcagttgtttgtggacctctgctgtcaggcctacaacttgataagaaagcagacaaacctttttcttaacctcctttcactgatgattccttcagggttaccagaacttacaagtattcaagatttgaaatacgttagagatgcacttcaaccccaaactacagacgcagaagctacaattttctttactaggcttattgaatcaagtttgggaagcattgccacaaagtttaacttcttcattcacaaccttgctcagcttcgtttttctggtcttccttctaatgatgagcccatcctttcattttcacctaaaacatactcctttagacaagatggtcgaatcaaggaagtctctgtttttacatatcataagaaatacaacccagataaacattatatttatgtagtccgaattttgtgggaaggacagattgaaccatcatttgtcttccgaacatttgtcgaatttcaggaacttcacaataagctcagtattatttttccactttggaagttaccaggctttcctaataggatggttctaggaagaacacacataaaagatgtagcagccaaaaggaaaattgagttaaacagttacttacagagtttgatgaatgcttcaacggatgtagcagagtgtgatcttgtttgtactttcttccaccctttacttcgtgatgagaaagctgaagggatagctaggtctgcagatgcaggttccttcagtcctactccaggccaaataggaggagctgtgaaattatccatctcttaccgaaatggtactcttttcatcatggtgatgcatatcaaagatcttgttactgaagatggagctgacccaaatccatatgtcaaaacatacctacttccagataaccacaaaacatccaaacgtaaaaccaaaatttcacgaaaaacgaggaatccgacattcaatgaaatgcttgtatacagtggatatagcaaagaaaccctaagacagcgagaacttcaactaagtgtactcagtgcagaatctctgcgggagaattttttcttgggtggagtaaccctgcctttgaaagatttcaacttgagcaaagagacggttaaatggtatcagctgactgcggcaacatacttgtaa

SEQ ID NO: 393 - DNA, 7618 bp, human
aagaatcagaagacatttgtgctttggggagcagaggccctcagggtatagagaaggaagaagagagaggttcactgtagtcctgaagcagaaataagacctgtggctgaaggaagccttagcaattcactccttcctcttcctgagaactctctgtaggaagtctcacctagcagaggcttcacagtatttcagagaagccaaagattgtttgcctctttggaaactgttatccttccatcatgactgtgtcactcctgccactgttccaccatagagatggcgtcctttgcagcaaaccgtaagttataaggatgagggaagaagagtagagggccaaaaggattccattttgaggaaaaactacagtttgccttgccaggtagaagaatcaggcgcccagacaccatgtcacaaccctccagaactgacgttggcaggaagtagagactttgttgcctgtgtcccccatcctcaccatgtcttcgactcaggacaatggggaacactggaagtccctggagtctgtgggcatcagccgcaaagaactagcgatggccgaagccctgcagatggagtatgatgccctgtcccggctccggcatgacaaggaggagaacagagccaagcagaacgcagacccctctctcatcagctgggatgagcctggggtagacttttacagcaagccagcaggaaggcggaccgacctcaagctgttacgcggtctctctggctctgatcctacccttaactacaactcactatccccacaggaagggccgcccaaccactctacctcccaagggccacagcctggctcagatccctggcccaaaggctccctgtctggagactatctctacatttttgatggttcagatgggggagtctcttcgtccccaggaccaggggacatagagggctcttgcaagaaactatccccacctcctctgcctccccgagcttctatctgggatacccctcccctgcctcccagaaaggggtccccctcatcctccaagatctcccagcccagtgacatcaacactttctctttggtcgaacaattgccaggcaaactgctagagcatcggatcctagaagaggaagaggtgctgggaggtgggggtcaggggcgcctactggggtctgtggactatgatggtatcaatgatgcaattactaggctcaacttgaaatcgacctatgatgcggagatgttgcgggatgccaccaggggctggaaggagggccgagggccgctggacttcagcaaagacacctctggaaaacccgtggccaggagcaagactatgccccctcaggtgcccccccgcacctatgcctcccgctatggcaaccgaaagaatgcgacgcctggcaagaaccgccggatttctgcagccccggtgggctcccggccccacactgttgccaatggccatgagttgtttgaggtctcagaagagagagatgaggaggttgctgcattttgccacatgctggatatccttcgatctggctctgacatccaagactacttcctcactggctatgtctggagtgctgtcacccctagcccagagcacctcggggatgaggtcaacctgaaggtgactgtgttgtgtgacaggcttcaagaggcactcactttcacctgcaactgttcctccactgtagacttgcttatctaccagaccctgtgctacacccatgatgacctgaggaatgtggacgtgggtgactttgtgctaaagccctgcgggctggaggagttcctgcagaacaagcatgccttgggcagtcatgagtacatccaatactgccgcaagtttgacattgacattcggctacagctgatggagcagaaggttgtgcgcagtgacctggcccggacggtgaatgatgaccagagcccctccaccttgaactacctcgtccatctccaagagaggcctgtcaagcagaccatcagcaggcaggccctgagtcttctgttcgacacttaccacaatgaggtggatgccttcctgctggctgatggagacttcccactgaaggctgacagggtggtccagtccgtcaaggccatctgcaacgccctggccgccgtggaaacccctgagatcaccagtgctctcaaccagctgcccccctgcccctcccgcatgcagcctaaaattcagaaggatcccagtgtcttggctgtgagggaaaaccgagagaaggtcgtggaagccctgaccgctgccatcttggacctggtggagctgtactgcaacacattcaacgcagacttccagacggcagtgcccgggagccgcaagcatgacctggtccaggaggcctgccatttcgccaggtccctggccttcactgtctatgccacccaccgcatccccatcatctgggctaccagctatgaagatttctacctctcctgctccctcagccatggcggcaaggagctgtgcagccccctgcagacccgaagagctcacttctccaagtacctcttccacctcatcgtctgggaccagcagatctgcttcccagtgcaggtgaaccggctgcctcgggagacactgctgtgtgccactctctatgctctgcccatccccccaccggggagctcctcagaggccaataagcagcggcgggtgcctgaagccctgggctgggtcactaccccactcttcaacttcaggcaggtcctgacctgtggccggaagcttctgggtttgtggccagcaacacaggaaaatcccagcgcccgttggagtgcacctaatttccaccagccagacagtgtcatcctgcagattgacttccccacctcggcctttgacatcaagttcaccagcccccctggagacaagttcagcccccgctatgagtttggcagcctccgggaagaagaccagcgcaagcttaaagacatcatgcagaaagagtccttgtactggctcactgatgctgacaagaagcgcctgtgggagaagcgatattactgccactcggaggtgagctcgctccccctggtgctcgccagcgcccccagctgggagtgggcttgcctgcctgacatctatgttctcctgaagcagtggacccacatgaaccaccaggatgccctggggctcctgcatgccaccttcccggaccaggaggtgcgtcgtatggctgtgcagtggattggctcactctcagatgctgagctgctagactacctgccccagctggtacaggccctgaagtatgaatgctacctggacagcccgttggtgcgcttcctcctgaaacgagctgtgtctgacttgagagtgactcactacttcttctggttactgaaggacggcctcaaggactctcagttcagcatccgctaccagtatctgctggcagccttactgtgctgctgtggcaaggggctgagagaagagtttaaccgccagtgctggcttgtcaatgccctggccaaactggcccagcaggtccgggaggcagccccatctgcaaggcagggaatcctccgcacgggcctggaggaggtgaagcagttctttgccctcaatggctcgtgccgcttgccactcagccccagtctgctggttaagggaattgtgcccagggactgttcctacttcaactccaatgctgtccccctcaaactctccttccaaaatgtggatcccctgggtgagaacatccgtgtcatcttcaagtgtggggacgaccttcgccaggacatgctaacgctgcagatgattcgcatcatgagcaagatctgggtccaggaggggctggacatgcgcatggtcatcttccgctgcttctccaccggccggggcagagggatggtggagatgatccctaatgctgagaccctgcgtaagatccaggtggagcatggggtgaccggctcgttcaaggaccggcccctggcagactggctgcagaaacacaaccctggggaggacgagtatgagaaggctgtggagaactttatctactcctgcgctggctgctgcgtggccacgtacgtcttgggcatctgtgaccgacataatgacaacatcatgctgaagaccactggtcacatgttccacattgattttggccgcttcctgggccatgcccagatgtttggcaacatcaagcgggaccgtgccccctttgtcttcacctcggacatggcgtatgtcatcaacgggggtgacaagccttccagccgcttccatgattttgttgacctttgctgccaagcctacaacctcattcgcaagcacacccacctcttcctcaaccttctgggcctgatgttgtcctgtgggatccctgaactctcagacctggaggacctcaagtatgtgtacgatgccctgaggcctcaggatacagaggccaatgccactacctacttcactaggttgattgagtccagcctgggcagtgtagccacaaagctcaattttttcatccataatctggctcagatgaagttcacgggctcagatgaccggctgaccctctcctttgcctcccgaacacacactctcaagagctctggccgaatcagtgatgttttcctctgccgccatgagaagatcttccaccccaacaaaggctatatatatgtggtaaaggtgatgcgagagaacactcacgaggccacctacatccagcggacctttgaggagttccaggaattacacaataagttgcggctgctcttcccttcttcccacttgcccagcttccctagtcgcttcgtgatcggccgctcccggggagaggcggtggccgagcggcggagggaggagctaaacggttacatctggcacttgatccacgcaccccctgaggtggccgagtgtgatttggtgtacaccttcttccacccactgccccgggatgagaaggctatgggcaccagcccagctcctaagtcctcagatggcacatgggcccggcccgtcggaaaggtgggaggggaggtgaagctgtccatctcctacaaaaacaataaactcttcatcatggtgatgcatattcggggcttgcaactgctccaggatggaaatgaccctgacccctatgtgaaaatttacctccttcctgaccctcagaaaaccactaagaggaaaaccaaagtggcccggaaaacctgcaatcctacctacaatgagatgttggtatatgatgggatccccaagggtgacctgcagcagcgggagctccagctgagcgtgctgagtgagcagggattctgggagaacgtcctcctcggtgaggtgaacatccgcctgcgagagctggacctggctcaggagaagaccggctggttcgccctgggatctcgaagtcatggcaccttgtgagcccagcagagccaccacccagcatcccaggctggtggcaggagctgggggagaggactctcccctgtgagactcctccttgtgaagggccagggccctgggcaggcctccagctcggtccaggtgattctggcctctgtggtaggaggcagggagagtaagacatgctctgctgtctcttcctctggagactgaacttgggttggttgtgatgagcagccccttggaggctgtgaggttgcagcaaagttttaagtttaccttgtgtcaagggagcaatgcttggtttggggagtgtgtggggtgggctgtatgaagtagcattttgggggtgggtgggtggatatcttaatttttatttttaaaaaatgaaatagtgatgttgtcctaactgggacaggaagccttgcgagaagggacgtacctatgccccagaaggcaagagaggaagactatttggactttttgtatgattaaggttcttattggacttttccctaggttttttttttttgttattgttgttgttgtttcgttttctagctataggaactatctggggaggggcccagtgggtcctcggccagagccctctctaaggacaggttggggagggttggggagggctgcctgtgctggactgaggcttgtgccactgggcctttctgattttgcctccaaaggagagcgctgtgatacctacatgtgtaaggaagggccttccgtattggggttctgccaaggacccgtattcagggacccatgctcttttggggggacttttcctcttgtcttccctactttattaggacttgccctgaataccattttctaccccttgcccctccattctcctggcccttctgggggtcagctggtctctatgaatatgctgggggtgcttccccataggtctctcccttcatttgtctctggtgggacaaaatactgactcagtccttagatgtagtttcacccaagagcatcttggccctgggaagaggtccctaggctgcagatgctactgactgcttgctaggtagcctctggaaagcattccccatccatcactccccacttctttctgctgtgctgcttccctcccaaactccatttctgtcaccctttttataagacttttcctcattctgtggggccataaacctatttagtctggagccaaagggatgccctatctgaaggaaaggggcatggggtgggggattccatcaaaactgttgttttttgccccatgatttttctttggtcagtaggaggctggattggagtggtgattattcccctggagctaagctcaggagcccgaagggagagactgagactgactcccttatctcttcatattctttattccctaccagatggatttttttttttttttttggagacggagtctcgccctgtcgccaggctggagtgtagtggcatgatctcgactcactgcaaaatctgcctcccgggttcaagcgattctcctacctcagcctcccgagtagctgggattacaggcatgtgccaccacgccaagctaatttttgtatttttagtagagacggggtttcaccatgttggccaggatggtctcgatctcttgacctcgtgatctgcctgccttggcctcccaaagtgctgggattacaggcgtgagccaccatgccccgccccagatggattttacatttgctcttttgtgtttcgctccaaagggttgtcttcctcgccaaaaggagggagggactttgaatttgatatgaatctttaaaaccagaattggctggatatttcccatgattgggaaaagagtgaaatgaggacattctgtaaactgtccctccctaattccaaggatcagaaactccccgttttgctgactcattccataactggagaaagaagctccattgaccgaagccacagggcagcatggaagtttaaattttctctaaaattaaaatgccaaggataaagctggctgcttccaggagggggaagaggagtggggagtgggcggtgaaacttttccagatgaacggaccataaatgtgttactggctttgtgcctgtagctcattttattatgacctatatgctcctgatttaaagagatctgtgtactgtttacttcccacttcccagaatcccttgtatctcctttctcgggaattgtattttctaataaatgacatttgagaaaaaaaaaaaaaaaaaaaaaa

SEQ ID NO: 394 - DNA, 3083 bp, human
atgttgtttttcctgtacctaagttcccgctgtaggtggtacctttgcagacggtgcgatgggggaagcagagaagtttcactacatctatagttgtgacctggatatcaacgtccagcttaagataggaagcttggaagggaagagagaacaaaagagttataaagctgtcctggaagacccaatgttgaagttctcaggactatatcaagagacatgctctgatctttatgttacttgtcaagtttttgcagaagggaagcctttggccttgccagtgagaacatcctacaaagcatttagtacaagatggaactggaatgaatggctgaaactaccagtaaaataccctgacctgcccaggaatgcccaagtggccctcaccatatgggatgtgtatggtcccggaaaagcagtgcctgtaggaggaacaacggtttcgctctttggaaaatacggcatgtttcgccaagggatgcatgacttgaaagtctggcctaatgtagaagcagatggatcagaacccacaaaaactcctggcagaacaagtagcactctctcagaagatcagatgagccgtcttgccaagctcaccaaagctcatcgacaaggacacatggtgaaagtagattggctggatagattgacatttagagaaatagaaatgataaatgagagtgaaaaacgaagttctaatttcatgtacctgatggttgaatttcgatgtgtcaagtgtgatgataaggaatatggtattgtttattatgaaaaggacggtgatgaatcatctccaattttaacaagttttgaattagtgaaagttcctgacccccagatgtctatggagaatttagttgagagcaaacaccacaagcttgcccggagtttaagaagtggaccttctgaccacgatctgaaacccaatgctgccacgagagatcagttaaatattattgtgagttatccaccaaccaagcaacttacatatgaagaacaagatcttgtttggaagtttagatattatcttacgaatcaagaaaaagccttgacaaaattcttgaaatgtgttaattgggatctacctcaagaggccaaacaggccttggaacttctgggaaaatggaagccgatggatgtagaggactccttggagctgttatcctctcattacaccaacccaactgtgaggcgttatgctgttgcccggttgcgacaggccgatgatgaggatttgttgatgtacctattacaattggtccaggctctcaaatatgaaaattttgatgatataaagaatggattggaacctaccaagaaggatagtcagagttcagtgtcagaaaatgtgtcaaattctggaataaattctgcagaaatagatagctcccaaattataaccagcccccttccttcagtctcttcacctcctcctgcatcaaaaacaaaagaagttccagatggcgaaaatctggaacaagatctctgtaccttcttgatatcgagagcctgcaaaaactcaacactggctaattatttatactggtatgtgatagtggaatgtgaagatcaagatactcagcagagagatccaaagacccatgagatgtacttgaacgtaatgagaagattcagccaagcattgttgaagggtgataagtctgtcagagttatgcgttctttgctggctgcacaacagacatttgtagatcggttggtgcatctaatgaaggcagtacaacgcgaaagtggaaatcgtaagaaaaagaatgagagactacaggcattgcttggagataatgaaaagatgaatttgtcagatgtggaacttatcccgttgcctttagaaccccaagtgaaaattagaggaataattccggaaacagctacactgtttaaaagtgcccttatgcctgcacagttgttttttaagacggaagatggaggcaaatatccagttatatttaagcatggagatgatttacgtcaagatcaacttattcttcaaatcatttcactcatggacaagctgttacggaaagaaaatctggacttgaaattgacaccttataaggtgttagccaccagtacaaaacatggcttcatgcagtttatccagtcagttcctgtggctgaagttcttgatacagagggaagcattcagaacttttttagaaaatatgcaccaagtgagaatgggccaaatgggattagtgctgaggtcatggacacttacgttaaaagctgtgctggatattgcgtgatcacctatatacttggagttggagacaggcacctggataaccttttgctaacaaaaacaggcaaactcttccacatagactttggatatattttgggtcgggatccaaagcctcttcctccaccaatgaagctgaataaagaaatggtagaaggaatggggggcacacagagtgagcagtaccaagagttccgtaaacagtgttacacggctttcctccacctgcgaaggtattctaatctgattttgaacttgttttccttgatggttgatgcaaacattccagatattgcacttgaaccagataaaactgtgaaaaaggttcaggataaattccgcttagacctgtcggatgaagaggctgtgcattacatgcagagtctgattgatgagagtgtccatgctctttttgctgcagtggtggaacagattcacaagtttgcccagtactggagaaaatgaaactgggattgacccatcaagatgcttggctcaataagaaaaccacgttaggagcaacctttgtatattggagacttcagagtaaccagcaaggaagagaaatcttaatcttcaagttaccatattttccaaatattacatggtacctgagttctgcttccttggatgtcattgcttaaatatagtcttgaagggcttgttttgaaatattgtatatattttttcaaatgtatacattgttaataaattaagaaatgagaaacattcttatttatgtacatgttatgagagttctggaggaagtaatatgttgaaatagtaaaacattttagtttttgagtttaaaaaaaaaaaaaaaaaa

SEQ ID NO: 395 - DNA, 3213 bp, human
atgtgcttcagtttcataatgcctcctgctatggcagacatccttgacatctgggcggtggattcacagatagcatctgatggctccatacctgtggatttccttttgcccactgggatttatatccagttggaggtacctcgggaagctaccatttcttatattaagcagatgttatggaagcaagttcacaattacccaatgttcaacctccttatggatattgactcctatatgtttgcatgtgtgaatcagactgctgtatatgaggagcttgaagatgaaacacgaagactctgtgatgtcagaccttttcttccagttctcaaattagtgacaagaagttgtgacccaggggaaaaattagactcaaaaattggagtccttataggaaaaggtctgcatgaatttgattccttgaaggatcctgaagtaaatgaatttcgaagaaaaatgcgcaaattcagcgaggaaaaaatcctgtcacttgtgggattgtcttggatggactggctaaaacaaacatatccaccagagcatgaaccatccatccctgaaaacttagaagataaactttatgggggaaagctcatcgtagctgttcattttgaaaactgccaggacgtgtttagctttcaagtgtctcctaatatgaatcctatcaaagtaaatgaattggcaatccaaaaacgtttgactattcatgggaaggaagatgaagttagcccctatgattatgtgttgcaagtcagcgggagagtagaatatgtttttggtgatcatccactaattcagttccagtatatccggaactgtgtgatgaacagagccctgccccattttatacttgtggaatgctgcaagatcaagaaaatgtatgaacaagaaatgattgccatagaggctgccataaatcgaaattcatctaatcttcctcttccattaccaccaaagaaaacacgaattatttctcatgtttgggaaaataacaaccctttccaaattgtcttggttaagggaaataaacttaacacagaggaaactgtaaaagttcatgtcagggctggtctttttcatggtactgagctcctgtgtaaaaccatcgtaagctcagaggtatcagggaaaaatgatcatatttggaatgaaccactggaatttgatattaatatttgtgacttaccaagaatggctcgattatgttttgctgtttatgcagttttggataaagtaaaaacgaagaaatcaacgaaaactattaatccctctaaatatcagaccatcaggaaagctggaaaagtgcattatcctgtagcgtgggtaaatacgatggtttttgactttaaaggacaattgagaactggagacataatattacacagctggtcttcatttcctgatgaactcgaagaaatgttgaatccaatgggaactgttcaaacaaatccatatactgaaaatgcaacagctttgcatgttaaatttccagagaataaaaaacaaccttattattaccctcccttcgataagattattgaaaaggcagctgagattgcaagcagtgatagtgctaatgtgtcaagtcgaggtggaaaaaagtttcttcctgtattgaaagaaatcttggacagggatcccttgtctcaactgtgtgaaaatgaaatggatcttatttggactttgcgacaagactgccgagagattttcccacaatcactgccaaaattactgctgtcaatcaagtggaataaacttgaggatgttgctcagcttcaggcgctgcttcagatttggcctaaactgcccccccgggaggccctagagcttctggatttcaactatccagaccagtacgttcgagaatatgctgtaggctgcctgcgacagatgagtgatgaagaactttctcaatatcttttacaactggtgcaagtgttaaaatatgagccttttcttgattgtgccctctctagattcctattagaaagagcacttggtaatcggaggatagggcagtttctattttggcatcttaggtcagaagtgcacattcctgctgtctcagtacaatttggtgtcatccttgaagcatactgccggggaagtgtggggcacatgaaagtgctttctaagcaggttgaagcactcaataagttaaaaactttaaatagtttaatcaaactgaatgccgtgaagttaaacagagccaaagggaaggaggccatgcatacctgtttaaaacagagtgcttaccgggaagccctctctgacctgcagtcacccctgaacccatgtgttatcctctcagaactctatgttgaaaagtgcaaatacatggattccaaaatgaagcctttgtggctggtatacaataacaaggtatttggtgaggattcagttggagtgatttttaaaaatggtgatgatttacgacaggatatgttgacactccaaatgttgcgcttgatggatttactctggaaagaagctggtttggatcttcggatgttgccttatggctgtttagcaacaggagatcgctctggcctcattgaagttgtgagcacctctgaaacaattgctgacattcagctgaacagtagcaatgtggctgctgcagcagccttcaacaaagatgcccttctgaactggcttaaagaatacaactctggggatgacctggaccgagccattgaggaatttacactgtcctgtgctggctactgtgtagcttcttatgtccttgggattggtgacagacatagtgacaacatcatggtcaaaaaaactggccagctcttccacattgactttggacatattcttggaaatttcaaatctaagtttggcattaaaagggagcgagtgccttttattcttacctatgatttcatccatgtcattcaacaaggaaaaacaggaaatacagaaaagtttggccggttccgccagtgttgtgaggatgcatatctgattttacgacggcatgggaatctcttcatcactctctttgcgctgatgttgactgcagggcttcctgaactcacatcagtcaaagatatacagtatcttaaggactctcttgcattagggaagagtgaagaagaagcactcaaacagtttaagcaaaaatttgatgaggcgctcagggaaagctggactactaaagtgaactggatggcccacacagttcggaaagactacagatcttaa

SEQ ID NO: 396 - DNA, 3471 bp, human
cagattacacttggttgactactccggagcagccactaagagggatgaacaggcctgcgtggaaattgaatgagattcttggaagctcgaagtctggctgtggccatgggagatacagtagtggagcctgcccccttgaagccaacttctgagcccacttctggcccaccagggaataatggggggtccctgctaagtgtcatcacggagggggtcggggaactatcagtgattgaccctgaggtggcccagaaggcctgccaggaggtgttggagaaagtcaagcttttgcatggaggcgtggcagtctctagcagaggcaccccactggagttggtcaatggggatggtgtggacagtgagatccgttgcctagatgatccacctgcccagatcagggaggaggaagatgagatgggggccgctgtggcctcaggcacagccaaaggagcaagaagacggcggcagaacaactcagctaaacagtcttggctgctgaggctgtttgagtcaaaactgtttgacatctccatggccatttcatacctgtataactccaaggagcctggagtacaagcctacattggcaaccggctcttctgctttcgcaacgaggacgtggacttctatctgccccagttgcttaacatgtacatccacatggatgaggacgtgggtgatgccattaagccctacatagtccaccgttgccgccagagcattaacttttccctccagtgtgccctgttgcttggggcctattcttcagacatgcacatttccactcaacgacactcccgtgggaccaagctacggaagctgatcctctcagatgagctaaagccagctcacaggaagagggagctgccctccttgagcccggcccctgacacagggctgtctccctccaaaaggactcaccagcgctctaagtcagatgccactgccagcataagtctcagcagcaacctgaaacgaacagccagcaaccctaaagtggagaatgaggatgaggagctctcctccagcaccgagagtattgataattcattcagttcccctgttcgactggctcctgagagagaattcatcaagtccctgatggcgatcggcaagcggctggccacgctccccaccaaagagcagaaaacacagaggctgatctcagagctctccctgctcaaccataagctccctgcccgagtctggctgcccactgctggctttgaccaccacgtggtccgtgtaccccacacacaggctgttgtcctcaactccaaggacaaggctccctacctgatttatgtggaagtccttgaatgtgaaaactttgacaccaccagtgtccctgcccggatccccgagaaccgaattcggagtacgaggtccgtagaaaacttgcccgaatgtggtattacccatgagcagcgagctggcagcttcagcactgtgcccaactatgacaacgatgatgaggcctggtcggtggatgacataggcgagctgcaagtggagctccccgaagtgcataccaacagctgtgacaacatctcccagttctctgtggacagcatcaccagccaggagagcaaggagcctgtgttcattgcagcaggggacatccgccggcgcctttcggaacagctggctcataccccgacagccttcaaacgagacccagaagatccttctgcagttgctctcaaagagccctggcaggagaaagtacggcggatcagagagggctccccctacggccatctccccaattggcggctcctgtcagtcattgtcaagtgtggggatgaccttcggcaagagcttctggcctttcaggtgttgaagcaactgcagtccatttgggaacaggagcgagtgcccctttggatcaagccatacaagattcttgtgatttcggctgatagtggcatgattgaaccagtggtcaatgctgtgtccatccatcaggtgaagaaacagtcacagctctccttgctcgattacttcctacaggagcacggcagttacaccactgaggcattcctcagtgcacagcgcaattttgtgcaaagttgtgctgggtactgcttggtctgctacctgctgcaagtcaaggacagacacaatgggaatatccttttggacgcagaaggccacatcatccacatcgactttggcttcatcctctccagctcaccccgaaatctgggctttgagacgtcagcctttaagctgaccacagagtttgtggatgtgatgggcggcctggatggcgacatgttcaactactataagatgctgatgctgcaagggctgattgccgctcggaaacacatggacaaggtggtgcagatcgtggagatcatgcagcaaggttctcagcttccttgcttccatggctccagcaccattcgaaacctcaaagagaggttccacatgagcatgactgaggagcagctgcagctgctggtggagcagatggtggatggcagtatgcggtctatcaccaccaaactctatgacggcttccagtacctcaccaacggcatcatgtgacacgctcctcagcccaggagtggtggggggtccggggcaccctccctagagggcccttgtctgagaaaccccaaaccaggaaaccccacctacccaaccatccacccaagggaaatggaaggcaagaaacacgaaggatcatgtggtaactgcgagagcttgctgaggggtgggagagccagctgtggggtccagacttgttggggcttccctgcccctcctggtctgtgtcagtattaccaccagactgactccaggactcactgccctccagaaaacagaggtgacaaatgtgagggacactggggcctttcttctccttgtaggggtctctcagaggttctttccacaggccatcctcttattccgttctggggcccaggaagtggggaagagtaggttctcggtacttaggacttgatcctgtggttggccactggccatgctgctgcccagctctacccctcccagggacctacccctcccagggaccgacccctggcccaagctccccttgctggcgggcgctgcgtgggccctgcacttgctgaggttccccatcatgggcaaggaagggaattcccacagccctccagtgtactgagggtactggcctagccatgtggaattccctaccctgactccttccccaaacccagggaaaagagctctcaattttttatttttaatttttgtttgaaataaagtccttagttagccacttgtgtcatttccaggttttctgggggagtgcagggggagatgggtgatgaggtatgaacggatgcctcagtgtccaagatacaaaaggcaccacatagaagtttgctttttccctgcctgtcttggtcactaccacctcttccctgagaagggcgggccttccatgttctctcacccgcttcaactccacat

SEQ ID NO: 397 - DNA, 3705 bp, human
atggcgggcgcccagcccggcgtccacgcgctgcagttggagccgcccaccgtggtggagaccctgcggcgcgggagtaagttcatcaaatgggacgaggagacctccagtcggaacctggtgaccctgcgtgtggaccccaatggcttcttcttgtactggacgggccccaacatggaggtggacacactggacatcagttccatcagggacacacggacaggccggtacgcccgcctgcccaaggaccccaagatccgggaagttctgggctttgggggtcccgatgcccggctggaggagaagctgatgacggtggtgtctgggccagacccggtgaacacagtgttcttgaacttcatggccgtgcaggatgacacagccaaggtctggtctgaggagctattcaagctggctatgaacatcctggctcagaacgcctcccggaacaccttcctgcgcaaagcatacacgaagctgaagctgcaggtgaaccaggatggtcggatccccgtcaagaacatcctgaagatgttctcagcagacaagaagcgggtggagactgcgctggaatcctgtggcctcaaattcaaccggagtgagtccatccggcctgatgagttttccttggaaatctttgagcggttcctgaacaagctgtgtctgcggccggacattgacaagatcctgctggagataggcgccaagggcaagccatacctgacgctggagcagctcatggacttcatcaaccagaagcaacgcgacccgagactcaacgaagtgctgtacccgcccctgcggccctcccaggcccggctgctcatcgaaaagtatgagcccaaccagcagtttctggagcgagaccagatgtccatggagggctttagccgctacctgggaggcgaggagaatggcatcctgcccctggaagccctggatctgagcacggacatgacccagccactgagtgcctacttcatcaactcctcgcataacacctatctcactgcggggcagctggctgggacctcgtcggtggagatgtaccgccaggcactactatggggctgccgctgcgtggagctggacgtgtggaagggacggccgcctgaggaggaacccttcattacccacggcttcaccatgaccacagaggtgcctctgcgcgacgtgctggaggccattgccgagactgccttcaagacctcgccctaccccgtcatcctctccttcgagaaccatgtggactcggcaaagcaacaggcaaagatggctgagtactgccgctccatctttggagacgcgctactcatcgagcctctggacaagtacccgctggccccaggcgttcccctgcccagcccccaggacctgatgggccgtatcctggtgaagaacaagaagcggcaccgacccagcgcaggtggcccagacagcgccgggcgcaagcggcccctggagcagagcaattctgccctgagcgagagctccgcggccaccgagccctcctccccgcagctggggtctcccagctctgacagctgcccaggcctgagcaatggggaggaggtagggcttgagaagcccagcctggagcctcagaagtctctgggtgacgagggcctgaaccgaggcccctatgttcttggacctgctgaccgtgaggatgaggaggaagatgaggaagaggaggaacagacagaccccaaaaagccaactacagatgagggcacagccagcagcgaggtgaatgccactgaggagatgtccacgcttgtcaactacatcgaacctgtcaagttcaagtcctttgaggctgctcgaaagaggaacaaatgcttcgagatgtcgtcctttgtggagaccaaggccatggagcaactgaccaagagccccatggagtttgtggaatacaacaagcagcagctcagccgcatctaccccaagggcacccgcgtggactcctccaactacatgccccagctcttctggaacgtagggtgccagcttgttgcgctcaacttccagaccctcgatgtggcgatgcagctcaacgcgggcgtttttgagtacaacgggcgcagcgggtacctgctcaagccggagttcatgcggcggccggacaagtccttcgaccccttcactgaggtcatcgtggatggcatcgtggccaatgccttgcgggtcaaggtgatctcagggcagttcctgtccgacaggaaggtgggcatctacgtggaggtggacatgtttggcctccctgttgatacgcggcgcaagtaccgcacccggacctctcaggggaactcgttcaaccccgtgtgggacgaagagcccttcgacttccccaaggtggtgctgcccacgctggcttcacttcgcattgcagcctttgaggaggggggtaaattcgtagggcaccggatcctgcctgtctctgccatccgctccggataccactacgtctgcctgcggaacgaggccaaccaaccgctgtgcctgccggccctgctcatctacaccgaagcctcggactacattcctgacgaccaccaggactatgcggaggccctgatcaaccccattaagcacgtcagcctgatggaccagagggcccggcagctggccgccctcattggggagagtgaggctcaggctggccaagagacgtgccaggacacccagtctcagcagctggggtctcagccgtcctcaaaccccacccccagcccactggatgcctccccccgccggccccctggccccaccacctcccctgccagcacctccctcagcagcccagggcagcgtgatgatctcatcgccagcatcctctcagaggtggcccccaccccgctggatgagctccgaggtcacaaggctctggtcaagctccggagccggcaagagcgagacctgcgggagctgcgcaagaagcatcagcggaaggcagtcaccctcacccgccgcctgctggatggcctggctcaggcacaggctgagggcaggtgccggctgcggccaggtgccctaggtggggccgctgatgtggaggacacgaaggagggggaggacgaggcaaagcggtatcaggagttccagaacagacaggtgcagagcctgctggagctgcgggaggcccaggtggacgcagaggcccagcggaggctggaacacctgagacaggctctgcagcggctcagggaggtcgtccttgatgcaaacacaactcagttcaagaggctgaaagagatgaacgagagggagaagaaggagctgcagaagatcctggacagaaagcgccataacagcatctcggaggccaagatgagggacaagcataagaaggaggcggaactgacggagattaaccgtcggcacatcactgagtcagtcaactccatccgtcggctggaggaggcccagaagcagcggcatgaccgtcttgtggctgggcagcagcaggtcctgcaacagctggcagaagaggagcccaagctgctggcccagctggcccaggagtgtcaggagcagcgggcgaggctcccccaggagatccgccggagcctgctgggcgagatgccggaggggctgggggacgggcctctggtggcctgtgccagcaacggtcacgcacccgggagcagcgggcacctgtcgggcgctgactcggagagccaggaggagaacacgcagctctga

SEQ ID NO: 398 - DNA, 2204 bp, human
gagcggtgcggaggctctgctcggatcgaggtctgcagcgcagcttcgggagcatgagtgctgcagtgactgcagggaagctggcacgggcaccggccgaccctgggaaagccggggtccccggagttgcagctcccggagctccggcggcggctccaccggcgaaagagatcccggaggtcctagtggacccacgcagccggcggcgctatgtgcggggccgctttttgggcaagggcggctttgccaagtgcttcgagatctcggacgcggacaccaaggaggtgttcgcgggcaagattgtgcctaagtctctgctgctcaagccgcaccagagggagaagatgtccatggaaatatccattcaccgcagcctcgcccaccagcacgtcgtaggattccacggctttttcgaggacaacgacttcgtgttcgtggtgttggagctctgccgccggaggtctctcctggagctgcacaagaggaggaaagccctgactgagcctgaggcccgatactacctacggcaaattgtgcttggctgccagtacctgcaccgaaaccgagttattcatcgagacctcaagctgggcaaccttttcctgaatgaagatctggaggtgaaaataggggattttggactggcaaccaaagtcgaatatgacggggagaggaagaagaccctgtgtgggactcctaattacatagctcccgaggtgctgagcaagaaagggcacagtttcgaggtggatgtgtggtccattgggtgtatcatgtataccttgttagtgggcaaaccaccttttgagacttcttgcctaaaagagacctacctccggatcaagaagaatgaatacagtattcccaagcacatcaaccccgtggccgcctccctcatccagaagatgcttcagacagatcccactgcccgcccaaccattaacgagctgcttaatgacgagttctttacttctggctatatccctgcccgtctccccatcacctgcctgaccattccaccaaggttttcgattgctcccagcagcctggaccccagcaaccggaagcccctcacagtcctcaataaaggcttggagaaccccctgcctgagcgtccccgggaaaaagaagaaccagtggttcgagagacaggtgaggtggtcgactgccacctcagtgacatgctgcagcagctgcacagtgtcaatgcctccaagccctcggagcgtgggctggtcaggcaagaggaggctgaggatcctgcctgcatccccatcttctgggtcagcaagtgggtggactattcggacaagtacggccttgggtatcagctctgtgataacagcgtgggggtgctcttcaatgactcaacacgcctcatcctctacaatgatggtgacagcctgcagtacatagagcgtgacggcactgagtcctacctcaccgtgagttcccatcccaactccttgatgaagaagatcaccctccttaaatatttccgcaattacatgagcgagcacttgctgaaggcaggtgccaacatcacgccgcgcgaaggtgatgagctcgcccggctgccctacctacggacctggttccgcacccgcagcgccatcatcctgcacctcagcaacggcagcgtgcagatcaacttcttccaggatcacaccaagctcatcttgtgcccactgatggcagccgtgacctacatcgacgagaagcgggacttccgcacataccgcctgagtctcctggaggagtacggctgctgcaaggagctggccagccggctccgctacgcccgcactatggtggacaagctgctgagctcacgctcggccagcaaccgtctcaaggcctcctaatagctgccctcccctccggactggtgccctcctcactcccacctgcatctggggcccatactggttggctcccgcggtgccatgtctgcagtgtgccccccagccccggtggctgggcagagctgcatcatccttgcaggtgggggttgctgtgtaagttatttttgtacatgttcgggtgtgggttctacagccttgtccccctccccctcaaccccaccatatgaattgtacagaatatttctattgaattcggaactgtcctttccttggctttatgcacattaaacagatgtgaatattcaaaaaaaaaaaaaaaaaaaaaaaaaaaaaaaaaaa

SEQ ID NO: 399 - DNA, 1486 bp, human
atgctgcccccttggaccctcggccttctcctgctggccacagtcagaggaaaagaggtctgctacggacaacttggctgcttttctgatgaaaaaccatgggcaggaacccttcagcgacctgtaaaattacttccctggtcccccgaggacattgacacccgctttcttctgtacacaaatgaaaatccaaacaacttccaactaatcactggcacggaaccagacaccattgaggcttcaaacttccaactggaccgcaagacacgcttcatcatccatggcttcttagacaaggcggaggacagctggccatcggacatgtgcaagaaaatgtttgaagtggagaaggtgaactgcatctgtgtggactggaggcacgggtcccgggcaatgtacacccaagccgtgcaaaacattcgggttgttggggcggagacagctttcttaatacaagcactgtcgacgcagctggggtacagccttgaggacgtgcatgtcatcggccacagcctgggcgcgcacacggccgcggaggcgggcaggaggctggggggccgcgtgggcaggatcacagggctggatccagcagggccgtgcttccaggatgaacctgaggaggttcggttggatccatctgacgccgtgtttgtggatgtgattcacacagattcttctcccatagttccttccctaggtttcggaatgagccaaaaggtgggccatctggatttctttccaaatggaggaaaggaaatgcccggatgtaagaaaaatgtcctttcaaccattactgatattgatggaatatgggaaggaattggtggctttgtgtcttgcaatcacctaagaagcttcgagtattactcaagcagcgtcctcaaccctgatggcttcctgggctatccctgtgcctcctacgatgagtttcaggagagtaagtgtttcccttgtccagctgaaggatgccccaaaatggggcactatgctgaccaatttaaggggaaaacaagtgctgtggaacaaacctttttcctgaacacaggagagagtggtaactttactagttggagatataaggtatcagtcacactttctggaaaagagaaagtgaatgggtacatcaggattgctttgtatggaagtaatgaaaactcgaaacaatatgagattttcaaaggatccctcaaaccagatgcaagtcacacgtgtgctattgatgtggattttaatgttggaaaaatacagaaagttaaattcctctggaacaaacgtgggataaatctatctgagcccaaactgggggcttcccaaatcacagtgcaaagtggtgaagatgggactgagtataatttttgtagcagcgacactgtggaagaaaacgtcttgcaatctctttacccttgttaaaaacgtggtgcggctattgcggtaataaaatctttaatgcactcagaaaaaaaaaaaaaaaaaaaaaaaaaaaaaa

SEQ ID NO: 400 - DNA, 6912 bp, human
cgccaaatttctcccctgaagcagaggtggtagccaacggctccatgtctctgaggagcggcgggcggcggcgcgcggacccaggcgcggatggcgaggccagcagggatgatggcgccacttcctcagtttcggcactcaagcgcctggaacggagtcagtggacggataagatggatttgcggtttggttttgagcggctgaaggagcctggtgagaagacaggctggctcattaacatgcatcctaccgagattttagatgaagataagcgcttaggcagtgcagtggattactactttattcaagatgacggaagcagatttaaggtggctttgccctataaaccgtatttctacattgcgaccagaaagggttgtgagcgagaagtttcatcttttctctccaagaagtttcagggcaaaattgcaaaagtggagactgtccccaaagaggatctggacttgccaaatcacttggtgggtttgaagcgaaattacatcaggctgtccttccacactgtggaggatcttgtcaaagtgaggaaggagatctcccctgccgtgaagaagaacagggagcaggatcacgccagcgacgcgtacacagctctgctttccagtgttctgcagaggggcggtgtcattactgatgaagaggaaacctctaagaagatagctgaccagttggacaacattgtggacatgcgcgagtacgatgttccctaccacatccgcctctccattgacctgaagatccacgtggctcattggtacaatgtcagataccgaggaaatgcttttccggtagaaatcacccgccgagatgaccttgttgaacgacctgaccctgtggttttggcatttgacattgagacgaccaaactgcccctcaagtttcctgatgctgagacagaccagattatgatgatttcctacatgatcgatggccagggctacctcatcaccaacagggagattgtttcagaagatattgaagattttgagttcacccccaagccagaatatgaaggccccttttgtgtcttcaatgaacccgatgaggctcatctgatccaaaggtggtttgaacacgtccaggagaccaaacccaccatcatggtcacctacaacggggacttttttgactggccatttgtggaggcccgggcagcagtccacggtctgagcatgcagcaggagataggcttccagaaggacagccagggggagtacaaggcgccccagtgcatccacatggactgcctcaggtgggtgaagagggacagttaccttcctgtgggcagtcataatctcaaggcggccgccaaggccaagctaggctatgatcccgtggagctagacccggaggacatgtgccggatggccacggagcagccccagactctggccacgtattctgtgtcagatgctgtcgccacttactacctgtacatgaagtacgtccacccattcatctttgctctgtgcaccattattcccatggagcccgacgaggtgctgcggaagggctctggcactctgtgtgaggccttgctgatggtgcaggccttccacgccaacatcatcttccccaacaagcaagagcaggagttcaataagctgacggacgacggacacgtgctggactctgagacctacgtcgggggccacgtggaggccctcgagtctggggttttccgcagcgatatcccttgccggtttaggatgaatcctgccgcctttgacttcctgctgcagcgggttgagaagaccttgcgccacgcccttgaggaagaggagaaagtgcctgtggagcaagtcaccaactttgaagaggtgtgtgatgagattaagagcaagcttgcctccctgaaggacgttcccagccgcatcgagtgtccactcatctaccacctggacgtgggggccatgtaccccaacatcatcctgaccaaccgcctgcagccctctgccatggtggacgaagccacctgtgctgcctgtgacttcaataagcctggagcaaactgccagcggaagatggcctggcagtggaggggcgagttcatgccagccagtcgcagcgaataccatcggatccagcaccagctggagtcagagaagttcccccccttgttcccagaggggccagctcgggcctttcatgaactgtcccgcgaggaacaggcgaaatacgagaagagaaggctggcggattactgccggaaagcctacaagaagatccacatcaccaaggtggaagagcgtctcaccaccatctgccagcgggaaaactccttctacgtggacaccgtgcgtgccttccgggacaggcgttacgagttcaaagggctccacaaggtgtggaaaaagaagctctcggcggccgtggaggtgggcgacgcggctgaggtgaagcgctgcaagaacatggaggtgctgtatgactcgctgcagctggcccacaagtgcatcctgaactccttctatggctatgtcatgcgcaagggggctcgctggtactccatggagatggctggcatcgtctgcttcacaggggccaacatcatcacccaggcacgggagctgatcgagcagattgggaggcccttagagctggacacagatggtatatggtgcgtcctgcccaacagcttcccagaaaattttgtcttcaagacgaccaatgtgaagaagcccaaagtgaccatctcctacccaggcgccatgttgaacatcatggtcaaggaaggcttcaccaatgaccagtaccaggagctggctgagccgtcctcactcacctacgtcacccgctcagagaacagcatcttttttgaggttgatgggccctaccttgccatgattcttccagcctccaaggaagaaggcaagaaattgaagaagaggtatgctgtgttcaatgaagacggttctctggctgagctcaagggctttgaggtcaaacgccgcggggaactgcagctgattaagatcttccaatcctcggtgtttgaggccttcctcaagggcagcacgctggaagaggtgtatggctctgtagccaaggtggctgactactggctggacgtgctgtacagcaaggcagccaacatgcctgactctgagctattcgagctcatctctgagaaccgttccatgtctcggaagctggaagattacggggagcagaagtctacatccatcagcacagcaaagcgcctggccgagttcctgggagaccagatggtcaaggatgcagggctgagttgccgctacatcatctcccgcaagcccgagggctcccctgtcacggagagggccatcccacttgccattttccaagcagagcccacggtgaggaagcactttctccggaaatggctcaagagctcttcccttcaagactttgatattcgagcaattctggattgggactactacattgagcggctgggaagcgccatccagaagatcatcaccatccctgcggccctgcagcaggtaaagaacccagtgccacgtgtcaaacaccccgactggctgcacaaaaaactgctggagaagaatgatgtctacaagcagaagaagatcagtgagctcttcaccctggagggcaggagacaggtcacgatggccgaggcctcagaagacagtccgaggccaagtgctcctgacatggaggacttcggcctcgtaaagctgcctcacccagcagcccctgtcactgtgaagaggaagcgagttctttgggagagccaggaggagtcccaggacctcacgccgactgtgccctggcaggaaatcttggggcagcctcccgccctgggaaccagccaggaggaatggcttgtctggctccggttccacaagaagaagtggcagctgcaggcccggcagcgcctcgcccgcaggaagaggcagcgtctggagtcggcagagggtgtgctcaggcccggggccatccgggatggtcctgccacggggctggggagcttcttgcgaagaactgcccgcagcatcctggaccttccgtggcagattgtgcagatcagcgagaccagccaggccggcctgttcaggctgtgggcgctcgttggcagtgacttgcactgcatcaggctgagcatcccccgtgtgttctacgtgaaccagcgagtcgctaaagcggaggagggtgcttcgtatcgcaaggtaaatcgggtccttcctcgctccaacatggtctacaatctctatgagtattcagtgccagaggacatgtaccaggaacacatcaacgagatcaacgctgagctgtcagcgccagacatcgagggcgtatatgagactcaggttccgttactgttccgggccctggtgcacctgggctgtgtgtgtgtggtcaataaacagctggtgaggcacctttcaggctgggaagcagagacctttgctcttgagcacctggagatgcgctctctggcccagttcagctacctggaaccagggagtatccgccatatctacctgtaccaccacgcacaggcccacaaagcgctcttcgggatcttcatcccctcacagcgcagggcatccgtctttgtgctggacactgtgcgcagcaaccagatgcccagccttggcgccctgtactcagcagagcacggcctcctcctggagaaggtgggccctgagctcctgccaccccccaaacacaccttcgaagttcgggcagaaactgacctgaagaccatctgcagagccatccagcgattcctgctcgcctacaaggaggagcgccgggggcccacactcatcgctgttcagtccagctgggagctgaagaggctggccagtgaaattcctgtcttggaggaattcccactggtgcctatctgtgtggctgacaagatcaactatggggtcctggactggcagcgccatggagcccggcgcatgatccgtcactacctcaacctggacacctgcctgtcgcaggccttcgagatgagcaggtactttcacattcccattgggaacctaccagaggacatctccacattcggctccgacctcttctttgcccgccacctccagcgccacaaccacctgctctggctgtcccctacagcccgccctgacctgggtggaaaggaggctgatgacaactgtcttgtcatggagttcgatgaccaagccactgttgagatcaacagttcaggctgttactccacagtgtgtgtggagctggaccttcagaacctggccgtcaacaccattctccagtctcaccatgtcaacgacatggagggggccgacagcatggggatcagcttcgacgtgatccagcaggcctccctggaggacatgatcacgggtggtcaggctgccagtgccccggccagctacgatgagacagccctgtgctctaacaccttcaggatcctgaagagcatggtcgtgggctgggtgaaggagatcacccagtaccacaacatctatgcagacaaccaggtgatgcacttctaccgctggcttcggtcgccatcctctctgcttcatgaccctgccctgcaccgcacactccacaacatgatgaagaagctcttcctgcagctcatcgctgagttcaagcgcctggggtcatcagtcatctacgccaacttcaaccgcatcatcctctgtacaaagaagcgccgtgtggaagatgccatcgcttacgtggagtacatcaccagcagcatccattcaaaggagaccttccattctctgacaatttctttctctcgatgctgggaatttcttctctggatggatccatctaactatggcggaatcaaaggaaaagtttcatctcgtattcactgtggactgcaagactcccagaaagcagggggagcagaggatgagcaggaaaatgaggacgatgaggaggaaagagatggggaggaggaggaagaggcggaggaatccaacgtggaggatttactggaaaacaactggaacattttgcagtttttgccacaggcagcctcctgccagaactacttcctcatgattgtttcagcgtacatcgtggccgtgtaccactgcatgaaggacgggctgaggcgcagtgctccagggagcacccccgtgaggaggaggggggccagccagctctcccaggaggccgagggggcggtcggagcccttcccggaatgatcaccttctctcaggattatgtcgcaaatgagctcactcagagcttcttcaccatcactcagaagattcagaagaaagtcacaggctctcggaactccactgagctctcagagatgtttcctgtcctccccggttcccacttgctgctcaataaccctgccctggagttcatcaaatacgtgtgcaaggtgctgtccctggacaccaacatcacaaaccaggtgaataagctgaaccgagacctgcttcgcctggtggatgtcggcgagttctccgaggaggcccagttccgagacccctgccgctcctacgtgcttcctgaggtcatctgccgcagctgtaacttctgccgcgacctggacctgtgtaaagactcttccttctcagaggatggggcggtcctgcctcagtggctctgctccaactgtcaggcgccctacgactcctctgccatcgagatgacgctggtggaagttctacagaagaagctgatggccttcaccctgcaggacctggtctgcctgaagtgccgcggggtgaaggagaccagcatgcctgtgtactgcacgtgcgcgggagacttcgccctcaccatccacacccaggtcttcatggaacagatcggaatattccggaacattgcccagcactacggcatgtcgtacctcctggagaccctggagtggctgctgcagaagaacccacagctgggccattagccagccc

SEQ ID NO: 401 - DNA, 4465 bp, human
gcggaccggccgggtggaggccacacgctaccccgaggctgcgtaggccgcgcgaagggggacgccgtgccgtgggcctggggtcgggggagcagcagaccgggaagcaccgtgaggaccgaggatttggggtggaaggcaggcatggtcaaacccatttcactgacaggagagcagagacaggacgtgtctctctccacgtcttccagccagtaaaagaagccaagctggagcccaaagccaggtgttctgactcccagcgtgggggtccctgcaccaaccatgagccgcctgctctggaggaaggtggccggcgccaccgtcgggccagggccggttccagctccggggcgctgggtctccagctccgtccccgcgtccgaccccagcgacgggcagcggcggcggcagcagcagcagcagcagcagcagcagcagcaacagcagcctcagcagccgcaagtgctatcctcggagggcgggcagctgcggcacaacccattggacatccagatgctctcgagagggctgcacgagcaaatcttcgggcaaggaggggagatgcctggcgaggccgcggtgcgccgcagcgtcgagcacctgcagaagcacgggctctgggggcagccagccgtgcccttgcccgacgtggagctgcgcctgccgcccctctacggggacaacctggaccagcacttccgcctcctggcccagaagcagagcctgccctacctggaggcggccaacttgctgttgcaggcccagctgcccccgaagcccccggcttgggcctgggcggagggctggacccggtacggccccgagggggaggccgtacccgtggccatccccgaggagcgggccctggtgttcgacgtggaggtctgcttggcagagggaacttgccccacattggcggtggccatatccccctcggcctggtattcctggtgcagccagcggctggtggaagagcgttactcttggaccagccagctgtcgccggctgacctcatccccctggaggtccctactggtgccagcagccccacccagagagactggcaggagcagttagtggtggggcacaatgtttcctttgaccgagctcatatcagggagcagtacctgatccagggttcccgcatgcgtttcctggacaccatgagcatgcacatggccatctcagggctaagcagcttccagcgcagtctgtggatagcagccaagcagggcaaacacaaggtccagccccccacaaagcaaggccagaagtcccagaggaaagccagaagaggcccagcgatctcatcctgggactggctggacatcagcagtgtcaacagtctggcagaggtgcacagactttatgtaggggggcctcccttagagaaggagcctcgagaactgtttgtgaagggcaccatgaaggacattcgtgagaacttccaggacctgatgcagtactgtgcccaggacgtgtgggccacccatgaggttttccagcagcagctaccgctcttcttggagaggtgtccccacccagtgactctggccggcatgctggagatgggtgtctcctacctgcctgtcaaccagaactgggagcgttacctggcagaggcacagggcacttatgaggagctccagcgggagatgaagaagtcgttgatggatctggccaatgatgcctgccagctgctctcaggagagaggtacaaagaagacccctggctctgggacctggagtgggacctgcaagaatttaagcagaagaaagctaagaaggtgaagaaggaaccagccacagccagcaagttgcccatcgagggggctggggcccctggtgatcccatggatcaggaagacctcggcccctgcagtgaggaggaggagtttcaacaagatgtcatggcccgcgcctgcttgcagaagctgaaggggaccacagagctcctgcccaagcggccccagcaccttcctggacaccctggatggtaccggaagctctgcccccggctagacgaccctgcatggaccccgggccccagcctcctcagcctgcagatgcgggtcacacctaaactcatggcacttacctgggatggcttccctctgcactactcagagcgtcatggctggggctacttggtgcctgggcggcgggacaacctggccaagctgccgacaggtaccaccctggagtcagctggggtggtctgcccctacagagccatcgagtccctgtacaggaagcactgtctcgaacaggggaagcagcagctgatgccccaggaggccggcctggcggaggagttcctgctcactgacaatagtgccatatggcaaacggtagaagaactggattacttagaagtggaggctgaggccaagatggagaacttgcgagctgcagtgccaggtcaacccctagctctgactgcccgtggtggccccaaggacacccagcccagctatcaccatggcaatggaccttacaacgacgtggacatccctggctgctggtttttcaagctgcctcacaaggatggtaatagctgtaatgtgggaagcccctttgccaaggacttcctgcccaagatggaggatggcaccctgcaggctggcccaggaggtgccagtgggccccgtgctctggaaatcaacaaaatgatttctttctggaggaacgcccataaacgtatcagctcccagatggtggtgtggctgcccaggtcagctctgccccgtgctgtgatcaggcaccccgactatgatgaggaaggcctctatggggccatcctgccccaagtggtgactgccggcaccatcactcgccgggctgtggagcccacatggctcaccgccagcaatgcccggcctgaccgagtaggcagtgagttgaaagccatggtgcaggccccacctggctacacccttgtgggtgctgatgtggactcccaagagctgtggattgcagctgtgcttggagacgcccactttgccggcatgcatggctgcacagcctttgggtggatgacactgcagggcaggaagagcaggggcactgatctacacagtaagacagccactactgtgggcatcagccgtgagcatgccaaaatcttcaactacggccgcatctatggtgctgggcagccctttgctgagcgcttactaatgcagtttaaccaccggctcacacagcaggaggcagctgagaaggcccagcagatgtacgctgccaccaagggcctccgctggtatcggctgtcggatgagggcgagtggctggtgagggagttgaacctcccagtggacaggactgagggtggctggatttccctgcaggatctgcgcaaggtccagagagaaactgcaaggaagtcacagtggaagaagtgggaggtggttgctgaacgggcatggaaggggggcacagagtcagaaatgttcaataagcttgagagcattgctacgtctgacataccacgtaccccggtgctgggctgctgcatcagccgagccctggagccctcggctgtccaggaagagtttatgaccagccgtgtgaattgggtggtacagagctctgctgttgactacttacacctcatgcttgtggccatgaagtggctgtttgaagagtttgccatagatgggcgcttctgcatcagcatccatgacgaggttcgctacctggtgcgggaggaggaccgctaccgcgctgccctggccttgcagatcaccaacctcttgaccaggtgcatgtttgcctacaagctgggtctgaatgacttgccccagtcagtcgcctttttcagtgcagtcgatattgaccggtgcctcaggaaggaagtgaccatggattgtaaaaccccttccaacccaactgggatggaaaggagatacgggattccccagggtgaagcgctggatatttaccagataattgaactcaccaaaggctccttggaaaaacgaagccagcctggaccatagcactgcctggaggctctgtatttgctcccgtggagcttcatcggggtggtgcaggctcccaaactcaggctttcagctgtgctttttgcaaaagggcttgcctaaggccagccatttttcagtagcaggacctgccaagaagattccttctaactgaaggtgcagttgaattcagtgggttcagaaccaagatgccaacatcggtgtggactacaggacaaggggcattgttgcttgttgggtaaaaatgaagcagaagccccaaagttcacattaactcaggcatttcatttattttttccttttcttcttggctggttctttgttctgtcccccatgctctgatgcagtgccctagaaggggaaagaattaatgctctaacgtgataaacctgctccaaggcagtggaaataaaaagaaggaaaaaaaagaaaaaaaaaaaaaaaaaaaaaaaaaaaaaat

SEQ ID NO: 402 - DNA, 596 bp, human
gtggcggcggcggcggacccttggggtctggacgcaacggcggcgggagcatgaacgcccctccagccttcgagtcgttcttgctcttcgagggcgagaagaagatcaccattaacaaggacaccaaggtacccaatgcctgtttattcaccatcaacaaagaagaccacacactgggaaacatcattaaatcacaactcctaaaagacccgcaagtgctatttgctggctacaaagtcccccaccccttggagcacaagatcatcatccgagtgcagaccacgccggactacagcccccaggaagcctttaccaacgccatcaccgacctcatcagtgagctgtccctgctggaggagcgctttcgggtggccataaaagacaagcaggaaggaattgagtaggggccagagggggctctgctcggcctgtgagccccgttcctacctgtgcctgaccctccgctccaggtaccacaccgaggagagcggccggtcccagccatggcccgccttgtggccacccctcaccctgacaccgacgtgtcctgtacatagattaggttttatattcctaataaagtatagcgggagaga

SEQ ID NO: 403 - DNA, 927 bp, human
agtctgggacgcgccgccgccatgatcatccctgtacgctgcttcacttgtggcaagatcgtcggcaacaagtgggaggcttacctggggctgctgcaggccgagtacaccgagggggacgcgctggatgccctgggcctgaagcgctactgctgccgccggatgctgctggcccacgtggacctgatcgagaagctgctcaattatgcacccctggagaagtgaccacgctgaaacccacccacccgctgtgctgaccatgggccctgagcgtcctaccccgaattcacgaggctgaggcatccgggagctggcgtaatgcctggccgcagtgtgtgtgtatcccataccccactctggaaggaaccatccagtaaaggtctttcagaaccactaaggtcccagccctcactaggatgtcaggagccaggtctaggcccagctttcacactgtggcagcccagtgaagcagactgggccatgaactctcctagccctggggccagcctgttccacaggcacccctgcaggaggcgctgccaggagagccttccatctcggggctctttgaggttccctccttctgggtgttcttcaggctgagcagagaggctcctgtaccctctctctcggaatctgaagagccagatttaggccgggcaaaggggctcacccctataatcccaggactttgggaggccaaggcaggaggatcacttgagtccagaaattcaagacccgcctgggcatcataatgagaccccatctctacaacaaaatttaataaattagctgggcacagtgttcacacctgtagtcccggccactcagggggctgaggcaggaggatcactggaacctgggaggttgccactgcaaaaaaaaaaaaaaaaaaaaaaaaaaaaaaaaaaaaaaaaaaaaaaaaaa

SEQ ID NO: 404 - DNA, 2446 bp, human
ggctgccagcgtttcatgatcaacatgggagactcccacgtggacaccagctccaccgtgtccgaggcggtggccgaagaagtatctcttttcagcatgacggacatgattctgttttcgctcatcgtgggtctcctaacctactggttcctcttcagaaagaaaaaagaagaagtccccgagttcaccaaaattcagacattgacctcctctgtcagagagagcagctttgtggaaaagatgaagaaaacggggaggaacatcatcgtgttctacggctcccagacggggactgcagaggagtttgccaaccgcctgtccaaggacgcccaccgctacgggatgcgaggcatgtcagcggaccctgaggagtatgacctggccgacctgagcagcctgccagagatcgacaacgccctggtggttttctgcatggccacctacggtgagggagaccccaccgacaatgcccaggacttctacgactggctgcaggagacagacgtggatctctctggggtcaagttcgcggtgtttggtcttgggaacaagacctacgagcacttcaatgccatgggcaagtacgtggacaagcggctggagcagctcggcgcccagcgcatctttgagctggggttgggcgacgacgatgggaacttggaggaggacttcatcacctggcgagagcagttctggctggccgtgtgtgaacactttggggtggaagccactggcgaggagtccagcattcgccagtacgagcttgtggtccacaccgacatagatgcggccaaggtgtacatgggggagatgggccggctgaagagctacgagaaccagaagcccccctttgatgccaagaatccgttcctggctgcagtcaccaccaaccggaagctgaaccagggaaccgagcgccacctcatgcacctggaattggacatctcggactccaaaatcaggtatgaatctggggaccacgtggctgtgtacccagccaacgactctgctctcgtcaaccagctgggcaaaatcctgggtgccgacctggacgtcgtcatgtccctgaacaacctggatgaggagtccaacaagaagcacccattcccgtgccctacgtcctaccgcacggccctcacctactacctggacatcaccaacccgccgcgtaccaacgtgctgtacgagctggcgcagtacgcctcggagccctcggagcaggagctgctgcgcaagatggcctcctcctccggcgagggcaaggagctgtacctgagctgggtggtggaggcccggaggcacatcctggccatcctgcaggactgcccgtccctgcggccccccatcgaccacctgtgtgagctgctgccgcgcctgcaggcccgctactactccatcgcctcatcctccaaggtccaccccaactctgtgcacatctgtgcggtggttgtggagtacgagaccaaggccggccgcatcaacaagggcgtggccaccaactggctgcgggccaaggagcctgtcggggagaacggcggccgtgcgctggtgcccatgttcgtgcgcaagtcccagttccgcctgcccttcaaggccaccacgcctgtcatcatggtgggccccggcaccggggtggcacccttcataggcttcatccaggagcgggcctggctgcgacagcagggcaaggaggtgggggagacgctgctgtactacggctgccgccgctcggatgaggactacctgtaccgggaggagctggcgcagttccacagggacggtgcgctcacccagctcaacgtggccttctcccgggagcagtcccacaaggtctacgtccagcacctgctaaagcaagaccgagagcacctgtggaagttgatcgaaggcggtgcccacatctacgtctgtggggatgcacggaacatggccagggatgtgcagaacaccttctacgacatcgtggctgagctcggggccatggagcacgcgcaggcggtggactacatcaagaaactgatgaccaagggccgctactccctggacgtgtggagctaggggcctgcctgccccacccaccccacagactccggcctgtaatcagctctcctggctccctcccgtagtctcctgggtgtgtttggcttggccttggcatgggcgcaggcccagtgacaaagactcctctgggcctggggtgcatcctcctcagcccccaggccaggtgaggtccaccggcccctggcagcacagcccagggcctgcatgggggcaccgggctccatgcctctggaggcctctggccctcggtggctgcacagaagggctctttctctctgctgagctgggcccagcccctccacatgatttccagtgagtgtaaataattttaaataacctctggcccttggaataaagttctgttttctgtaaaaaaaaaaaaaaa

SEQ ID NO: 405 - DNA, 3110 bp, human
agacctcggcacccgttcagactgacagcagaggcggcgaaggagcgcgtagccgagatcaggcgtacagagtccggaggcggcggcgggtgagctcaacttcgcacagcccttcccagctccagccccggctggcccggcacttctcggagggtcccggcagccgggaccagtgagtgcctctacggaccagcgccccggcgggcgggaagatgatgatgatgtccctgaacagcaagcaggcgtttagcatgccgcacggcggcagcctgcacgtggagcccaagtactcggcactgcacagcacctcgccgggctcctcggctcccatcgcgccctcggccagctcccccagcagctcgagcaacgctggtggtggcggcggcggcggcggcggcggcggcggcggcggcggaggccgaagcagcagctccagcagcagtggcagcagcggcggcgggggctcggaggctatgcggagagcctgtcttccaaccccaccgagcaatatattcggcgggctggatgagagtctgctggcccgcgccgaggctctggcagccgtggacatcgtctcccagagcaagagccaccaccaccatccaccccaccacagccccttcaaaccggacgccacctaccacactatgaataccatcccgtgcacgtcggccgcctcttcttcatcggtgcccatctcgcacccttgcgcgttggcgggcacgcaccaccaccaccaccatcaccaccaccaccaccaccaaccgcaccaggcgctggagggcgagctgctggagcacctgagtcccgggctggccctgggcgctatggcgggccccgacggcgctgtggtgtccacgccggctcacgcgccgcacatggccaccatgaaccccatgcaccaagcagcgctcagcatggcccacgcgcacgggctgccgtcgcacatgggctgcatgagcgacgtggacgccgacccgcgggacctggaggcattcgccgagcgcttcaagcagcgacgcatcaagctgggggtgacccaggcagatgtgggctccgcgctggccaacctcaagatccccggcgtgggctcgcttagccagagcaccatctgcaggttcgagtccctcacactgtcccacaataatatgatcgcgctcaaacccatcctgcaggcatggctcgaggaggccgagaagtcccaccgcgagaagctcaccaagcctgaactcttcaatggcgcggagaagaagcgcaagcgcacgtccatcgctgcgccagagaagcgctcgctcgaagcctactttgccattcagcctcggccctcctctgaaaagatcgccgccatcgcggagaagctggacctgaagaaaaacgtggtgcgcgtctggttctgcaaccagaggcagaaacagaaaagaatgaaatattccgccggcatttagaagactcttggcctctccagagacgcccctttcctcgtccgctcttttctctcctctcttctgcctcttttcacttttggcgactagaaacaattccagtaaatgtgaatctcgacaaatcgaggactgaagagggagcgaacgagcgaacaactgagcccaagccggtgagaatgtgaaacagtttctcaaaggaaagaataacaaaagatggtatttgtctgttgtagcaaagttgtccctttgaaccccacctcggcttcttcagaggaagtgtggagatggctgtttgcaggaaggcagacgagacagtgtttaaaaagtccacaagaatgatcaagtaagatttgtttttattcttacagacatcacccgtgttcaagtttaaaagtacactttgcaactatttttcagaaatagaaattgattcaggactaaaactttaaactagagttgatgcttaatgtgatagagacatctctaaagtattttgaattttaaaaaaagatggcagattttctgcatttacactgtatattatatatatatttttattgtggttcttacccccttttccttctctgaagtgttaatgcttaagaaaagagttgcgcctgctgtgttcactgatcttgaaagctattattagattattgcagaacaaccctctgtaaattattaatttatctctctagcaacttaattttgtgcacattctaattaattaaacttcttccgtctaaaaaaagtgggggaaatgtatagctagtaacgttcaaaaaattttgtttgatgagtttaccgaatttttacagctttcctcctatactgtgttccttttgacccatttgtatattctcacttgaatgaagattgtttttttctttgtttttactggtagtgttctgatttgtgagtcgacactcagtaatggatgtcttaatcgtgtagacctgattcactgtctgaagtattgtttacttcgttacatatttaatggggattcccacattgtccccatgacacatgagcgctctcacttacccttacacacacacacacacacacacacacacctctaacagaagggaagaagcagttggaagcatgaccgatgcaccattttctagttttaggtgcatttgccacttggtgtttgcccttcagattttagatttcaccaaggtatttcagtcttccagttttcaattgctttgttggctacatgttaatatttataggaatacttcagtttttccttttggaggtttgtttgtagaaaaactaatttgaactataagaaagacagtgcactgcttgtaaattcacattgtttggaaaaattcttttggaacaaaaaattaggtacatgataactggtaccttatctactgtaaatatttcattaaaaatgatgcacacatagatatattcttacaaattttgctgtattgctgttctctttgaggctctccaaagtcttgagttctgtatatggcctggtttcttgtttttattaatagatggtttatttactatggtaatgtattaatttatttttggtgttgttcgattgtctttcattgaagagataattttaatgttttattggcaacgtatgctgctttttcattaaaatatgctattaaaattaaatggctttta

SEQ ID NO: 406 - DNA, 3756 bp, human
gactcggagggggaggagcagggctgagctggccacgccacctagggacagcgcgcgccgccgcagtagctggggccaccctcgggaaggaagagcctgtcgcgagcgcgagcttctgagctcgacgggccgagctggcagctggttggtgcttacaccttggccgcagcggcaggtccttccacgtgctttcggcggcgacatggagctggaggagttggggatccgagaggaatgtggcgtgttcgggtgcatcgcctcaggagagtggcccacgcagctggatgtaccgcatgtgatcactctgggactcgtggggctgcagcaccggggtcaggagagtgctggtattgtgactagtgatgggagttcggtgccaacattcaaatcacacaagggaatgggtcttgtaaatcacgtctttactgaagacaatttgaaaaaattatatgtttcaaatcttggaattggacacaccaggtatgccaccacaggaaaatgtgaactagaaaattgtcagcccttcgttgttgaaacacttcatgggaagatagctgtggcacataatggcgaattggtaaatgctgctcgattaaggaaaaagcttctgcgtcatggtattggtctgtctacaagttctgatagtgaaatgattacccagttactggcgtatacccctcctcaggaacaagatgacaccccagactgggtagccaggattaaaaacttgatgaaggaagcacccacagcatactccctgcttataatgcacagagatgttatttatgcagtacgagatccttatggaaatcgtcccttatgcattggtcgtcttattccagtgtctgatataaatgacaaagagaaaaaaacatcagaaacagaaggatgggtggtgtcttcagaatcttgtagcttcttatctattggtgcaagatattaccgtgaagtcttgcctggagaaattgtggaaatatccagacacaatgtccaaactcttgatattatatcaaggtctgaaggaaacccagtggctttttgtatctttgaatatgtttattttgcaagaccagacagtatgttcgaagaccaaatggtttatacagtaagataccgttgtggccagcagctagcgattgaagcacctgtggatgcagatttggttagcactgttccagaatctgctacgcctgctgctcttgcttacgcaggaaagtgtggacttccatatgtggaggtgctgtgtaaaaaccggtatgtagggagaaccttcattcagccaaacatgaggttaagacaacttggtgttgcaaaaaaatttggagtattgtcagacaactttaaaggcaaaagaattgttcttgtagatgattcaattgtcagaggcaataccatctcacctataataaaactgctcaaagaatctggtgcaaaagaggtacacattcgagtagcttcaccaccaattaaatatccatgcttcatgggaataaacattcctacaaaagaagagctcattgccaataaaccagaatttgatcaccttgcagaatatctaggagcaaacagtgttgtgtatctgtcagtagaaggactggtttcatctgtacaagaagggataaagtttaaaaaacagaaagagaaaaagcacgatattatgatccaagaaaatggaaatggtctggaatgttttgaaaagagtggtcattgtacagcttgtctcactggaaaatatcctgtagaattagaatggtagctggtagggttggatgtgtgtagtttcaagatagaaagttggtcaagaagttatagtggtcacacctcatctatttactgttactcagttggtacaatgtaaaatgccatgcttatgtttataagttttgagattttttttttttctgaaaaggataccaaagtgcgataactgaacatttccaattgcatataatacaacaatatgtggtgttcttttttttacacaagcattggctagcctttttaacctggtcagagaaggcaggtggtcactgacatttcccaagtccatgctttaaagggtttgcaagaagttagggttaaggagaggtgatgccaacaagacaggtgagttaaatataccatttcacacaaagtttgaatagaatacattatacctcataggtgtctagcctctacagttctggctgtagttatgaccttggcttccctgtctaactgtagacaaatctttaaaaaaaaataataataatctggtgcctcagtttccccacatgtgcaatgggatacttattaaataattaataagaatgtgaataagtgtcatacttttgtgatttgagccatcatttcacttctgattttaagacaactcatgattgttagctttcagaaagctaatgattgttaactttttgaaattagtttacaattaattaagatttcattatgatggaaggagacataattggcagatctttgccatctctctttgagatgtcctaaaaagggttgtaaaaatctgtgaaaaagtttttcctacatttgactagaaaatgtgatccatagtatttagtgccctgatactataagctcagcaagtaacctggtacatttgaaataaaaaccaaatttttagattcaaacaatccctttatccttaatttaattaattatcatatgctttttttaatgaagtgcttgatcacttgcaaacatatatacatgtagatgtacatatacatgtacacatacacataaatattattgcaattaagtgatcaagtacagacacaataggggccagttttgtttaaggatcaaagagacaaccactttggggaattagtatcaacttacaatccaagtccaagtatcatcttataatcacttttttctactatattaagatctaatgaatttgatttcttttttgaagttttttcttgtaacatctgagattagaagtttaagatgacttgaccccaaacctttgtttatgtaagaatttttaaacataaaagtgtttgtttctgttatgttaccataatttgatgtatatagtgtccagatccatttagaaatttaatatttattaataactgaaactgtttgtcttcctttggtatatagtctcgcatattatattatagcaggccaagataaaattttgacagctctttaagcccacatgcagcagtgggtcagataaccctgtggcagtgacacgggcaaattggcatttgaataaagccctgggaccacctcaacatgcgtagcctcttgtcttaaatgtactccccatggcagcatggaggaggcaagacctgtgggtcaattttgaactggccttactttgatttttaaaacaagagactcagggaaagtactaaaccaaaatctctgattttactttgcgttttctgtagtttttgttttactgagatgcttttgtaaaggaaaataatactgtgacagtttagtaattctacagattcttaatatttctccatcatggccttttacttcacaattttctgaagtctgaattcaattacaatttttttttaccaatttaatctcaaatgttgtttaactgctttaaattcatatacgtagagtattataaactgcagagatgaaaaatgtgttttcacgggatttatattgtgaactaaactaagcctactttttgtgacttatttgtgatgccttgttgataaatatgtgtaataagtatgtttaaaaaaaaaaaaa

SEQ ID NO: 407 - DNA, 1045 bp, human
actatccggcgccgagccggaggggggaaacggcgcccgccgcccgcccggagcccgcgagcaaccccagtcccccccacccgcgcgtggcggcgccggctccctagccaccgcggccccaccctcttccggcctcagctgtccgggctgctttcgcctccgcctgtggatgctgcgcctctccgaacgcaacatgaaggtgctccttgccgccgccctcatcgcggggtccgtcttcttcctgctgctgccgggaccttctgcggccgatgagaagaagaaggggcccaaagtcaccgtcaaggtgtattttgacctacgaattggagatgaagatgtaggccgggtgatctttggtctcttcggaaagactgttccaaaaacagtggataattttgtggccttagctacaggagagaaaggatttggctacaaaaacagcaaattccatcgtgtaatcaaggacttcatgatccagggcggagacttcaccaggggagatggcacaggaggaaagagcatctacggtgagcgcttccccgatgagaacttcaaactgaagcactacgggcctggctgggtgagcatggccaacgcaggcaaagacaccaacggctcccagttcttcatcacgacagtcaagacagcctggctagatggcaagcatgtggtgtttggcaaagttctagagggcatggaggtggtgcggaaggtggagagcaccaagacagacagccgggataaacccctgaaggatgtgatcatcgcagactgcggcaagatcgaggtggagaagccctttgccatcgccaaggagtagggcacagggacatctttctttgagtgaccgtctgtgcaggccctgtagtccgccacagggctctgagctgcactggccccggtgctggcatctggtggagcggacccactcccctcacattccacaggcccatggactcacttttgtaacaaactcctaccaacactgaccaataaaaaaaaatgtgggtttttttttttttaatataaaaaaaaaaaaaaaaaa

SEQ ID NO: 408 - DNA, 2373 bp, human
gtggttggggaggggggggtggggggactctagacagctgaggcgcgaaagcgatgagtcctcggctcttcctcctccttctccgggacccgctctctgcctccctctccaacgcccggatgatctgagccgcgagggcgccgacagccgggggcccggacgcagcccggctcctcccctcctccgccccttccccagcctgacctggcccgccgctgcagcggtgacccctcccccggctgccgccgtcgccgccgcggtgaccccctccccggctgccgccgccgccgcctcggccgaccagggacctgcccgcctgcggctgctccggattttaaataaacttggagccttttcttgaaagacagctggctgtggagagccttctaccaactgcagttttagatacgttttgaaaatttcatcacctgagacctagaggatcaagacataatgggagcatttttagacaagccaaagatggaaaagcataatgcccaggggcagggtaatgggttgcgatatgggctaagcagcatgcaaggctggcgtgttgaaatggaggatgcacatacggctgtgatcggtttgccaagtggacttgaatcgtggtcattctttgctgtgtatgatgggcatgctggttctcaggttgccaaatactgctgtgagcatttgttagatcacatcaccaataaccaggattttaaagggtctgcaggagcaccttctgtggaaaatgtaaagaatggaatcagaacaggttttctggagattgatgaacacatgagagttatgtcagagaagaaacatggtgcagatagaagtgggtcaacagctgtaggtgtcttaatttctccccaacatacttatttcattaactgtggagactcaagaggtttactttgtaggaacaggaaagttcatttcttcacacaagatcacaaaccaagtaatccgctggagaaagaacgaattcagaatgcaggtggctctgtaatgattcagcgtgtgaatggctctctggctgtatcgagggcccttggggattttgattacaaatgtgtccatggaaaaggtcctactgagcagcttgtctcaccagagcctgaagtccatgatattgaaagatctgaagaagatgatcagttcattatccttgcatgtgatggtatctgggatgttatgggaaatgaagagctctgtgattttgtaagatccagacttgaagtcactgatgaccttgagaaagtttgcaatgaagtagtcgacacctgtttgtataagggaagtcgagacaacatgagtgtgattttgatctgttttccaaatgcacccaaagtatcgccagaagcagtgaagaaggaggcagagttggacaagtacctggaatgcagagtagaaggtggatcatttaacaaaaaataagtagctttattaaagaaaaatcttcaacacaatcaaactttaacattttagcttttagatttttatgtgtctttgacagctagtgtctagtgtatgaaagtggaaaaggacatttctgtagtagctgttaagatgtatgcagttgtcctatcacagttatattagaaataacaactagtgtggaaagtaacccacattctgttcaggatacttttgttttaaaaggctaaaatgtttgtgtgctttaaaattcttaatgaattcactggcatgagtaattttatgccgggaaaatctgatttgtggtctatttaattacaaagagattgtgatggtgataatttgaataccatctttctatgaaaagctgtgtatattaattttaatctctagggccttttttcaataacttgaaaatcacagcctcatcattagcaactttatatacacagctttaaaaaatttgctttaaactgtttcagagcttcttccctaagccataaactgtctcacctaaacaagatagacctcaataaaagacataatatttctccacctggcagaaaagtaactgccaagtaagattaagaaataagttgagcatttctggagtatatttctcataattctgcagagacttccagtttattgcatatatgcagtaaagtgtatatattatgcagtttctctaagtggaaaaacttgacatgactttaatagtgttaaaacatgaaaatgctggtgagctgaggtagaaaaaaaacaagaaaaaaattttaaaaatagcgttaaaatgcattttaggctcctaatgtcgttaatttgcacgttaaagacctctaatcgcatgcaagcattgacctaccacacctacatcccactgtgcctgcattattgaaattactactcactttaattttttttcccctttttactgtttgatac

SEQ ID NO: 409 - DNA, 2265 bp, human
ggggtctggagcggcgccgtttccgcttccgctccctcacagctcccgtcccgttaccgcctcctggccggcctcgcgcctttcaccggcaccttgcgtcggtcgcgccgcggggcctgctcctgccgcgcgcacccccggggcttcggctccggcacgggtcgcgcccagctttcctgcacctgaggccgccggccagccgccgccatgggtgcctacctctcccagcccaacacggtgaagtgctccggggacggggtcggcgccccgcgcctgccgctgccctacggcttctccgccatgcaaggctggcgcgtctccatggaggatgctcacaactgtattcctgagctggacagtgagacagccatgttttctgtctacgatggacatggaggggaggaagttgccttgtactgtgccaaatatcttcctgatatcatcaaagatcagaaggcctacaaggaaggcaagctacagaaggctttagaagatgccttcttggctattgacgccaaattgaccactgaagaagtcattaaagagctggcacagattgcagggcgacccactgaggatgaagatgaaaaagaaaaagtagctgatgaagatgatgtggacaatgaggaggctgcactgctgcatgaagaggctaccatgactattgaagagctgctgacacgctacgggcagaactgtcacaagggccctccccacagcaaatctggaggtgggacaggcgaggaaccagggtcccagggcctcaatggggaggcaggacctgaggactcaactagggaaactccttcacaagaaaatggccccacagccaaggcctacacaggcttttcctccaactcggaacgtgggactgaggcaggccaagttggtgagcctggcattcccactggtgaggctgggccttcctgctcttcagcctctgacaagctgcctcgagttgctaagtccaagttctttgaggacagtgaggatgagtcagatgaggcggaggaagaagaggaagacagtgaggaatgcagcgaggaagaggatggctacagcagtgaggaggcagagaatgaggaagatgaggatgacaccgaggaggctgaagaggacgatgaagaagaagaagaagagatgatggtgccagggatggaaggcaaagaggagcctggctctgacagtggtacaacagcggtggtggccctgatacgagggaagcagttgattgtagccaacgcaggagactctcgctgtgtggtatctgaggctggcaaagctttagacatgtcctatgatcacaaaccagaggatgaagtagaactagcacgcatcaagaatgctggtggcaaggtcaccatggatgggcgagtcaacgggggcctcaacctctccagagccattggggaccacttctataagagaaacaagaacctgccacctgaggaacagatgatttcagcccttcctgacatcaaggtgctgactctcactgacgaccatgaattcatggtcattgcctgtgatggcatctggaatgtgatgagcagccaggaagttgtagatttcattcaatcaaagatcagccagcgtgatgaaaatggggagcttcggttattgtcatccattgtggaagagctgctggatcagtgcctggcaccagacacttctggggatggtacagggtgtgacaacatgacctgcatcatcatttgcttcaagccccgaaacacagcagagctccagccagagagtggcaagcgaaaactagaggaggtgctctctactgagggggctgaagaaaatggcaacagcgacaagaagaagaaggccaagcgagactagcagtcatccagacccctgcccacctagactgttttctgagccctccggacctgagactgagttttgtctttttcctttagccttagcagtgggtatgaggtgtgcagggggagctgggtggcttcactccgcccattccaaagagggctctccctccacactgcagccgggagcctctgctgtccttcccagccgcctctgctcctcgggctcatcaccggttctgtgcctgtgctctgttgtgttggagggaaggactggcggttctggtttttactctgtgaactttatttaaggacattcttttttattggcggctccatggccctcggccgcttgcacccgctctctgttgtacactttcaatcaacactttttcagactaaaggccaaaacctaatcgtaaaaaaaaaaaaa

SEQ ID NO: 410 - DNA, 4991 bp, human
ggcggcgcgcaagggacgtgcggagtgagtggcgctgcgggtggggccgtcggcggcgctggtgagctttgcggagctgggcggtgccgaggaggaggaggtggcggcctgggtctgacgcggccctgttcgagggggcctctcttgtttatttatttattttccgtgggtgcctccgagtgtgcgcgcgctctcgctacccggcggggagggggtggggggagggcccgggaaaagggggagttggagccggggtcgaaacgccgcgtgacttgtaggtgagagaacgccgagccgtcgccgcagcctccgccgccgagaagcccttgttcccgctgctgggaaggagagtctgtgccgacaagatggcggacggggagctgaacgtggacagcctcatcacccggctgctggaggtacgaggatgtcgtccaggaaagattgtgcagatgactgaagcagaagttcgaggcttatgtatcaagtctcgggagatctttctcagccagcctattcttttggaattggaagcaccgctgaaaatttgtggagatattcatggacaatatacagatttactgagattatttgaatatggaggtttcccaccagaagccaactatcttttcttaggagattatgtggacagaggaaagcagtctttggaaaccatttgtttgctattggcttataaaatcaaatatccagagaacttctttctcttaagaggaaaccatgagtgtgctagcatcaatcgcatttatggattctatgatgaatgcaaacgaagatttaatattaaattgtggaagaccttcactgattgttttaactgtctgcctatagcagccattgtggatgagaagatcttctgttgtcatggaggattgtcaccagacctgcaatctatggagcagattcggagaattatgagacctactgatgtccctgatacaggtttgctctgtgatttgctatggtctgatccagataaggatgtgcaaggctggggagaaaatgatcgtggtgtttcctttacttttggagctgatgtagtcagtaaatttctgaatcgtcatgatttagatttgatttgtcgagctcatcaggtggtggaagatggatatgaattttttgctaaacgacagttggtaaccttattttcagccccaaattactgtggcgagtttgataatgctggtggaatgatgagtgtggatgaaactttgatgtgttcatttcagatattgaaaccatctgaaaagaaagctaaataccagtatggtggactgaattctggacgtcctgtcactccacctcgaacagctaatccgccgaagaaaaggtgaagaaaggaattctgtaaagaaaccatcagatttgttaaggacatacttcataatatataagtgtgcactgtaaaaccatccagccatttgacaccctttatgatgtcacacctttaacttaaggagacgggtaaaggatcttaaatttttttctaatagaaagatgtgctacactgtattgtaataagtatactctgttatagtcaacaaagttaaatccaaattcaaaattatccattaaagttacatcttcatgtatcacaatttttaaagttgaaaagcatcccagttaaactagatgtgatagttaaaccagatgaaagcatgatgatccatctgtgtaatgtggttttagtgttgcttggttgtttaattattttgagcttgttttgtttttgtttgttttcactagaataatggcaaatacttctaatttttttccctaaacatttttaaaagtgaaatatgggaagagctttacagacattcaccaactattattttcccttgtttatctacttagatatctgtttaatcttactaagaaaactttcgcctcattacattaaaaaggaattttagagattgattgttttaaaaaaaaatacgcacattgtccaatccagtgattttaatcatacagtttgactgggcaaactttacagctgatagtgaatattttgctttatacaggaattgacactgatttggatttgtgcactctaatttttaacttattgatgctctattgtgcagtagcatttcatttaagataaggctcatatagtattacccaactagttggtaatgtgattatgtggtaccttggctttaggttttcattcgcacggaacaccttttggcatgcttaacttcctggtaacaccttcacctgcattggttttctttttcttttttctttctttttttttttttttttttttttgagttgttgtttgtttttagatccacagtacatgagaatccttttttgacaagccttggaaagctgacactgtctctttttcctccctctatacgaaggatgtatttaaatgaatgctggtcagtgggacattttgtcaactatgggtattgggtgcttaactgtctaatattgccatgtgaatgttgtatacgattgtaaggcttatgtcactaaagatttttattctgattttttcataatcaaaggtcatatgatactgtatagacaagctttgtagtgaagtatagtagcaataatttctgtacctgatcaagtttattgcagcctttcttttcctatttcttttttttaagggttagtattaacaaatggcaatgagtagaaaagttaacatgaagattttagaaggagagaacttacaggacacagatttgtgattctttgactgtgacactattggatgtgattctaaaagcttttattgagcattgtcaaatttgtaagcttcatagggatggacatcatatctataatgcccttctatatgtgctaccatagatgtgacatttttgaccttaatatcgtctttgaaaatgttaaattgagaaacctgttaacttacattttatgaattggcacattgtattacttactgcaagagatatttcattttcagcacagtgcaaaagttctttaaaatgcatatgtctttttttctaattccgttttgttttaaagcacattttaaatgtagttttctcatttagtaaaagttgtctaattgatatgaagcctgactgattttttttttccttacagtgagacatttaagcacacattttattcacatagatactatgtccttgacatattgaaatgattcttttctgaaagtattcatgatctgcatatgatgtattaggttaggtcacaaaggttttatctgaggtgatttaaataacttcctgattggagtgtgtaagctgagcgatttctaataaaattttagttgtacacttttagtagtcatagtgaagcaggtctagaaaataagcctttggcagggaaaaagggcaatgttgattaatctcagtattaaaccacattaatctgtatcccattgtctggcttttgtaaattcatccaggtcaagactaagtatgttggttaataggaatccttttttttttttttaaagactaaatgtgaaaaaataatcactacttaagctaattaatattggtcattaaatttaaaggatggaaatttatcatgtttaaaaattattcaagcactcttaaaaccacttaaacagcctccagtcataaaaatgtgttctttacaaatatttgcttggcaacacgacttgaaataaataaaactttgtttcttaggagaaaatgattctgtaattccagtgtcactaatttatattgttctttcctctgatttttttcaggttagtgatttttttgtatacaatttaatccaaatgttatgacattcagaaatcatgaaacacagtagatatctgttataatgtggtgtatcacatggattataaagcaaagttatggtcgatttctattcttgaaagaatcaactacagtgaatcctttgcatttgaagccttaacatgcattgctttaattttgcccagggacaaattttaataatcagcaagactggtttgtgcaaagcgttgagtcatcaggtatttagagcctagccagctacccagtatccatgctgccatatcccttcattgtaaaaagtacctaaacattcgtgaaatgattttttttagctgaaaaatgctggcaagaagaattttaaagcttaaaataggtggtaaatttgaagtatgagtgtgttcacgagaaacataggcttttcaaaaaaatttttattcaaggcaaagcaaggaacatcttgagatatgtctcaagaatataaagatgtattattttaagccaaggagctgaaatatatctcagtttataaattcaggtatattctttttgtctccatggcaaccataacttttgaaccaaaaaaaattgtttttacatctttatgctgaaaatgtgtttagattaggaatatggtcgggctgaatttgctgttgctccctaaccaaatccacctcttgttttccttgtgagtccatggctaaatcaaagctgcccctgagaagagacttaatccaagcctgattgtactagtggcatcacttagaagtaggctttccctcttcctagtagatctcaatgttttataattccttaaaacagctgaaaattgggacaacatactttacgcaatgaacagtagttaaataggaaataaactagttccatataagtatacacctagagttttaattacctttataatgtttcttaaaagtgaaacttagatacaattgtgattggatacttagatactaagtgaaacttagtgtaacaattttgatctgttaaattggattttacatgtacatttgaatgccagaatttctaaataaatcccctggttaggaaattttaaaagtcaaagcttgttttcttcaaccactaccttctacattggttgacttagaccgtaagctttttaagtttctcattgtaatttaccttctcatgcagattgctgatgttttattaaaccttatttttacaaaaatgaaaaaa

SEQ ID NO: 411 - DNA, 2263 bp, human
aggaagtagggagcggggtggcaggggggggacccgccgcggctgctgccaccgccgccaccaccgcctctgctcgtggcgtgggaaaggaggtgtgagtcccgggcgcgagccgcggcggcgccgctgcgggagggtcggcggtgggaaggcgatggcggatttagataaactcaacatcgacagcattatccaacggctgctggaagtgagagggtccaagcctggtaagaatgtccagcttcaggagaatgaaatcagaggactgtgcttaaagtctcgtgaaatctttctcagtcagcctatcctactagaacttgaagcaccactcaaaatatgtggtgacatccatggacaatactatgatttgctgcgactttttgagtacggtggtttcccaccagaaagcaactacctgtttcttggggactatgtggacaggggaaagcagtcattggagacgatctgcctcttactggcctacaaaataaaatatcctgagaatttttttcttctcagagggaaccatgaatgtgccagcatcaacagaatttatggattttatgatgaatgtaaaagaagatacaacattaaactatggaaaactttcacagactgttttaactgtttaccgatagcagccatcgtggatgagaagatattctgctgtcatggaggtttatcaccagatcttcaatctatggagcagattcggcgaattatgcgaccaactgatgtaccagatcaaggtcttctttgtgatcttttgtggtctgaccccgataaagatgtcttaggctggggtgaaaatgacagaggagtgtccttcacatttggtgcagaagtggttgcaaaatttctccataagcatgatttggatcttatatgtagagcccatcaggtggttgaagatggatatgaattttttgcaaagaggcagttggtcactctgttttctgcgcccaattattgcggagagtttgacaatgcaggtgccatgatgagtgtggatgaaacactaatgtgttcttttcagattttaaagcctgcagagaaaaagaagccaaatgccacgagacctgtaacgcctccaaggggtatgatcacaaagcaagcaaagaaatagatgtcgttttgacactgcctagtcgggacttgtaacatagagtatataaccttcatttttaagactgtaatgtgtactggtcagcttgctcagatagatctgtgtttgtgggggcccttccttccatttttgatttagtgaatggcatttgctggttataacagcaaatgaaagactcttcactccaaaaagaaaagtgttttgttttttaattctctgttccttttgcaaacaattttaatgatggtgttaaagctgtacaccccaggacagtttatcctgtctgaggagtaagtgtacaattgatcttttttaattcagtacaacccataatcatgtaaatgctcattttctttaggacataaagagagccctagggtgctctgaatctgtacatgttcttgtcataaaatgcatactgttgatacaaaccactgtgaacattttttatttgagaattttgtttcaaagggattgctttttcctctcattgtcttgttatgtacaaactagtttttatagctatcaacattaggagtaactttcaaccttgccagcatcactggtatgatgtatatttaattaaagcacacttttccccgaccgtatacttaaaatgacaaagccattcttttaaatatttgtgactctttcctaaagccaaagtttctgttgaattatgttttgacacacccctaagtacaaggtggtatggttgtatacacatgctgccttcttggggattcaaaaacaggtttttgattttgaatagcaattagtgatatagtgctgtttaagctactaacgataaaaggtaataacattttatacaatttccatatagtctattcattaagtaatctttttacagttgcatcaggcctgaacccgtccattcagaaagcttcaaattatagaaacaatactgttctatacgagtgaccgattatgctttctttggcctacattctttattctgcggtgaagttgaggcttataagttaaaacaaaggaactaacttactgtccaccagtttatacagaactcacagtacctatgacttttttaaactaagatctgttaaaaaagaaatctgtttcaacagatgaccgtgtacaataccgtgtggtgaaaat

SEQ ID NO: 412 - DNA, 2647 bp, human
gagataagcggcctctaggcgccgggccctcagtctctcccagcgaccgccgcgggggcaaggcctggagctgtggttcgaatttgtgcaggcagcgggtgctggcttttagggtccgccgcctctctgcctaatgagctgcaccagaatgatccaggttttagatccacgtcctttgacaagttcggtcatgcccgtggatgtggccatgaggctttgcttggcacattcaccacctgtgaagagtttcctgggcccgtacgatgaatttcaacgacgacattttgtgaataaattaaagcccctgaaatcatgtctcaatataaaacacaaagccaaatcacagaatgactggaagtgctcacacaaccaagccaagaagcgcgttgtgtttgctgactccaagggcctctctctcactgcgatccatgtcttctccgacctcccagaagaaccagcgtgggatctgcagtttgatctcttggaccttaatgatatctcctctgccttaaaacaccacgaggagaaaaacttgattttagatttccctcagccttcaaccgattacttaagtttccggagccactttcagaagaactttgtctgtctggagaactgctcgttgcaagagcgaacagtgacagggactgttaaagtcaaaaatgtgagttttgagaagaaagttcagatccgtatcactttcgattcttggaaaaactacactgacgtagactgtgtctatatgaaaaatgtgtatggtggcacagatagtgataccttctcatttgccattgacttaccccctgtcattccaactgagcagaaaattgagttctgcatttcttaccatgctaatgggcaagtcttttgggacaacaatgatggtcagaattatagaattgttcatgttcaatggaagcctgatggggtgcagacacagatggcaccccaggactgtgcattccaccagacgtctcctaagacagagttagagtcaacaatctttggcagtccgaggctggctagtgggctcttcccagagtggcagagctgggggagaatggagaacttggcctcttatcgatgaattaagcaacaatgtaactggtcttgacttgtcatattcccccatgcaatcctaggtctgtattgctcaattttaggaagcctttgctactccatcagtaggtttagatttgagcttttgagacctggctatggaaaagaaagacacttgagaatttagtgttggggtctgtacagatgatgctacccaatttggctttgaaggatcaagtaacaggttgaaaactatttttataaaggtaatactttttcagttcccttcttccttccctctcaatccactagctttcatgttgggcaaggaaaagttgaggaaggatggctgatggtgatggaaagctgtgttaatggtatgaggaatgtgtgaaaagtatacacaaagggctctgaagctcaagtcagaggagtgggaggtctgatcattgttggtggaaaaacgtaaggttattttgtgcttttaagttggttttacaattctttcctggggaaattatttctggaggggaaaaagatccattctacgtatccttgtggagaaaagctaaataacctttaagaatgtgggtggtattggagaaagaagatgaattatagctccggagaatcaagatcttaagtgaagcctttctgttcagatgtgatctataaataatcataatttggggaaagtttaagcaaatctggctttgtagtcctgatgttataagtgactttgtgatcaaactgtcaggcttgggttcttgttatagaatgcttggtatagaaaaaccatgccatcattaatggctaacaacacgtagggacttcatgtcatgtcaaagatagctctttgcaagtgccttgattaaaccagaaaactgtcatcgtttaacccaaatatctgaatggtcatctggtaactcatgggtttttggcctcataagatggtccactctgtacacaggcattcctcctgcaataatgttgtatctttgagaccgttgtcagtgtacacaactcacatccttcatattgaaggtgactcatttttctgcacacttttttgatgtgatgcttgacgtgaggcccgacactaggattctcaatgcaagaatccagtaccttgcacatagaagtagcaacccatcccttgcctattttcatcttgctgttttcttttttttaaaaaaatggatgtgacttgttttgaatgttttgtattatacttgtttttgtgtgtgcataaattcattctgtaggatcttaagaaaaagagtcccagaatgttgcttctattattgtgcacaaccattgagaggtgttacaagaatgcagttaattttaacatgtgtgatgtgccatggtggaaaagtactatcggaataactctgcagtgacagaatttgaagtttggctagcatccatacttttctactgtaaatatttcactctcctctagctatccttgatgagcttctcactttaagaataaatgtgtttgatataaaaaaaaaaaaaaaaaaaaaaaaaaaaaaaaaaaaaaaaaaaaaaaaaaaaaaaaaaaaaaaaaaaaaaaaaaaaa

SEQ ID NO: 413 - DNA, 2385 bp, human
gcgccattttgaaagtggagtcgcctgcccctgccgctgccgccgccgccgtcgctgtcgtagtcgccgccgccgctgccggagaaagagcacgagcggggaagccccagagtgaaatctagcatcctgccggctggtctgcccgcccctccttccttttccccccggcccccgtcccctccccccgcaggtgccatccgccgccatccgccctctctacccccccatccccaggtgaggggggtgagttcaggaagcggagaccccgaggaacccagcagggtcaccatttgcagcgcaacatggcaggagctggaggagggaatgatattcagtggtgtttttctcaggtgaaaggagcagtagatgatgatgtagcagaagcagatataatttctacagtagaatttaatcattctggagaattactagcaacaggagataaaggtggtagagttgtcatctttcaacaggagcaggagaacaaaatccagtctcatagcagaggagaatataatgtttacagcaccttccagagccatgaaccagagtttgactacttgaaaagtttagaaatagaagaaaagatcaacaaaattaggtggttaccccagaaaaatgctgctcagtttttattgtctaccaatgataaaacaataaaattatggaaaatcagtgaaagggacaaaagaccagaagggtataacttgaaagaggaggatggaaggtatagagatcctactacagttactacactacgagtgccagtctttaggcctatggatctaatggttgaggccagtccacgaagaatatttgccaatgctcatacatatcacatcaactcaatttctattaatagtgattatgaaacatatttatctgcagatgatttgcggattaatctttggcatctggaaattacagacaggagttttaacattgtggatatcaagcctgccaatatggaagagctaacagaggtgattacagcagcagaatttcatccaaacagctgtaacacatttgtatacagcagcagtaaaggaactattcggctatgtgacatgagggcatctgccctctgtgatagacattctaaattgtttgaagaacctgaagatcccagtaacaggtcatttttttccgaaatcatctcctctatttcggatgtaaaattcagccatagtggtcgatatatgatgactagagactatttgtcagtcaaaatttgggacttaaatatggaaaacaggcctgtggaaacataccaggtgcatgaatacctcagaagtaaactctgttcactgtatgaaaatgactgcatatttgacaaatttgaatgttgttggaatggatctgacagtgttgtcatgactggatcttacaataatttcttcagaatgtttgacagaaacacaaagcgagacataaccctagaagcatcgcgggaaaacaataagcctcgcacagttctgaagcctcgcaaagtctgtgcaagtggcaagcgaaagaaagatgaaataagtgttgacagcctagacttcaataagaaaatccttcacacagcctggcaccccaaggaaaatatcattgccgtagctactacaaacaatctgtatatatttcaagacaaagtgaattagggttggcattcctagcagaagaacccacttcctgcttagttgagatagttgaatctagcattcgttcctataaaagagagaggtccattgtggcgcccctttccagtgtttgacagtgtgccattcgacaacacattgttatagctacatggagaaagctctgtggattcatcactgtggtgttctccatgtctgctagccatttaggtaagggtagggcacttttaatttaaatgacttcttgcaccatcttgcctaatggactagattggactgtatcaacattgatttactccactttttatgccttccattgtgatgacgtcaaacacagtgaaagccttcagtcatgctatgggatttaattgtgtatcctcattactgtatcatttgtggggtacaccccttccccctttttttaaattaaatacagctcattcttactgtggcttgtagcattcctcctcttctggcctcctggactgctccccttcatctcttacccttgccccctccacccggtcttggtggtggtatattaaaaaaagaaagaatgaaagcacacaaaatgagtcagtttggggtcagtggtataaagggggtatatgttgcaaacaaatgttttagtaacagttggctgtaatcactcctcgccgtgtctggcactgaaaataaggaaaaaaaacctactactgaataaaagtgacaaagaatggaaaaaaaaaaaaaaaaaaaaaaa

SEQ ID NO: 414 - DNA, 4664 bp, human
ccagaaggctccatattctcaacatgtgcaggtcaatttgacataaagctaccaacaaggagcaacaggcccactgcaggctgtgtttataacttgaaaattatgagcaggtattgggagccacagactgtatttgggaaccagctgcatgtcaggacaagcatagattgtggtctgtggaggctgggagagcacaatgcttgaatttcatttctttgggagataagaagaaaaaataccttcctacctgacaagattgacaacttgctaaatctgattatcttcagaagtgtgctggacagttgcgaagtaaacatttacttttcaaagatgatgatcaaggaaacatctctacgaagggacccggatttaaggggagagctagctttcctggcaaggggctgtgattttgttctcccttcacggtttaagaagcggctgaagtcatttcagcagacacagattcaaaataaaccagaaaagaaacctggaacaccactcccacctccagccacctctccaagtagtccccgacctctctccccggttccccatgtgaataatgttgtgaatgcgccattgtccataaacattccacggttctactttcctgaaggactcccagatacctgtagtaatcatgaacaaactctaagcagaattgaaactgctttcatggatattgaagaacagaaagcagacatttatgaaatggggaaaattgcaaaggtctgtggctgtcctctctattggaaagcccccatgttcagggctgcagggggagagaagacaggatttgtgacagcacagtcattcattgccatgtggagaaagttgctgaataaccatcatgatgatgcctctaaattcatctgtcttctagcaaagcccaactgcagctctctagaacaggaggatttcatccctctacttcaggatgtggtggatacccaccctggtctcacgttcctgaaagatgctccagaattccactcccgctacatcaccacggttattcagagaatattctacacagtcaacagatcttggagtggaaaaattacttcgacagagataagaaaaagcaactttttgcaaaccctagcacttttggaagaagaggaagatataaaccaaattacagattacttctcctatgaacatttctatgttatttattgtaaattctgggaactagatactgatcacgacctctacatcagccaggccgatctgtctcgatacaatgaccaggcttcatcaagcaggattattgaaaggatattctctggtgcagtaacaaggggaaaaacaatacagaaagagggaagaatgagctatgcagattttgtttggtttttgatctctgaagaagacaaaaggaatcctaccagcattgagtattggttccgctgcatggatgtggatggagacggtgtactctccatgtatgagctggagtacttctatgaggagcagtgtgaacggatggaagccatgggaattgagcccttgccattccatgatttactgtgccagatgcttgacctagtgaagccagctgttgatggcaaaataactctaagagatctgaagaggtgcagaatggctcacatcttctatgacactttctttaatctggagaaatacttagaccatgaacagagagatccctttgcggtccagaaggatgttgagaacgatgggcctgagccctcagactgggaccggtttgccgctgaggagtatgagacgcttgttgcagaggaatctgcccaagcacaattccaggaaggctttgaagattatgaaacagatgaacctgcctctccctctgaatttggaaacaaaagcaataaaatattaagtgcaagccttccagagaaatgtggaaagcttcaatcagtggatgaagaatagctgccggtgtctacaatgaaacgaagatgtgtattttaaatgtttctttcttgtgaagagatgttctcgtttgcatactgctttttaaagactttgatttctccaagtgtgtatcatctgcactaggaactttgtttttaagcaataggtctggatacacatttaacttaggaggctcctccaatttgcctcaaacctcttacggagcttctcctcagaagtggtaccatcgccttccaaagtcagcactctacactcttgaatgtaccaaggatctcttggcgacagtaccaagcacggttctctacacaggtgactgaagttgcctctgtgttggctggcatccctgagtcccctccgggctcctatggagcctagaagaaaccttcacttgcagaaaacttgagtcagaaaattctggaacttgaaaaagtagtaagggcctccagaattgacttagccctagtaataaaagcactgccaaaacatctcagagacttcttttatgtatactggagttcaaagatctttaacttacctggcttaatgtaatttcacagttacctgccaaactactagtcactttacatcctcaggtattgtaaccactgggccttccaactttgctggcaagctctggtaacctccctgactgtggatcttatataaaatctcaagataaaaaaacacttcttaaatgaagtatagaatttgactcatacttggaaaaagcccttttaacttttatcttttattcattgaactattgaatgatgtatttaatatccaaattagttgataactgttttcacttcctatcagaaggcctgcttgaagacataaaggaataatgatacattaaaattcttactagatagatatattccttcctcccaggagtattagactagctaatagtaaaggcctcaacgttattctttacttcatgttgaaaacaattactacagatatttcatccacctcagtatttatcaaggaaatggaaaatgatacagctataaaagaaagctgttatttactgtagttgtagatgtattcactacagaatcctacatttttcagcaggccacagtccagccaaatcctataatatccttgaaaagaaactattaaaaaggatagacatttctgatgtaagtaaaacccccaagcaacttaatatccatctgtcagtcatcaacttttcccctagattttttttttaactagttctgaaagtgtcaagaatagcttccctttccaccctacctaggttccctccttgctggcataaaggccaagcagtgaaatgaaccttgggttagagttatggtaggcaaaaagaaaaggagaatttaggaaataaatatgctataaacaaggtacagtacagtgagagttaacaatcctaggaatcctgcctgtcacaagctcccagttccctgtcattttatcttcatgattagaactgatcttccatttaactattacagaaagcagtaactattgcaactatctaatagttcacacaaaagaattaaaagcttaaaaataatttttaggaaacacaatattcaaaatctaaacacactgataaattattaagattaagattatttatgtgataaatgaaatctcctaccaatccatccagcctttaccagggaagaaaagcaattatttcatttcagatagaaatacaaaaaaaaaaaaaatacttttcttagaagccagatatggtttaaatgttttattatccataatgatctaaactaataagattcaccaaaaagtaaaaattcaattttacaatatacatttttttttttaactatttggctttacctttttaccttggttctccttactgaagtcctcttgctttcactttgatctggtttttgaagtctcttaattattggctgggcatggtgactcatgcctgtaatcccggcactttgggaggccaagggaggtgatcacttgagcccaggagtaaagaccagcctgggcaacatagtgagactccgtctctacaaaaaataaatttagctgggcatggtggtgcacatctgtagtcctaccaacttgggaggctgaggcaggagaatcgcttgagccccaggcttcgaggctgcagtgagctatgattacgacactgcactccagcctaggcgacagagcaagaccccattctcttacaaagtctctattataaaagtacatccatcaataccattccatttaaaatgggctattgtaatttacccacattatcacattttcaggaattataagaatgtgttttattgtactccttccttggagctgaatgcaaggaatgtgaattctgaggaattaaggtagaatatatttgactttctggtaaagatcatggttaagtataatcattactgccaaactggaattttcaagttattataatatcccaggccccttgataaaagctgagggttatcatgaccttaatgctaattcaatgagaaatgagtttaatagcataacattaccaaggtaatcaaactaataaaattccatatatcttccctgcatcttgtcactgtgtaccattcaaagtgtttataaaactctagattcatcaaatgagatttgctcagctttttgaaatgttaagatgtgtttggagaaggctgcatgactttgtttttcccttttagcaaaactaaataaagttgtcaaatattgaaaaaaaaaaaaaaaaa

SEQ ID NO: 415 - DNA, 3366 bp, human
ggttgcgcgtgtgccatggactcagccgcccggtgatattgacaataggagagagaaaggggcattgactgggacccaccgcgggtagcgaaaggtggctctggcagcggcggctccagctcctgcggctcctcctccttattctgtccccttctcttgctgccgctgcagatccagtcttcctccctcccttccccccctccccacgtcgtcgccgccgccgccgggtccggggcaacgagctgaggcgccgcccgccaggaatgtgagcgaggagccaccggcggagccgcaacggggtcggtgccgatttgatgggacgggcccgcgggggaggatcgtgaggccgccgccgccaccggaacgctgaggttcgggtccggccgtgaggcctagaggctccgccgccgcggaaccggagggaccccgtaccggacagccgtcgccccaggctccccgcagctgcccggacctccccctgcacgtcccggtcccgccgcccgcccccgctgcggccacctcgcccgtctcccgcccctccaagccacagatcatctttggattcttccccagaagcttcaagtagggatatgtcctcagcaccaactactcctccatcagtggataaagtagacggattttctcggaagtccgtcagaaaagccagacagaagaggtcgcaaagttcctcacagtttaggtctcaaggcaagcctattgagttaacacctctgccgctgctaaaagacgttccatcctcagagcagcctgaactgttcctaaagaaacttcagcagtgctgtgtcatttttgacttcatggacacgctatctgatcttaaaatgaaagaatacaagcgctccactcttaatgaactggtggactacattacaataagcagaggctgtttgacagagcagacttaccctgaagtagttagaatggtatcttgcaatatattcagaactctccctcctagtgacagcaatgaatttgatccagaagaagatgaacctacccttgaggcatcgtggccacacttacagcttgtatatgaatttttcatacgatttttggaaagccaagaattccaacccagcattgccaaaaaatatatagatcagaaatttgtattacagcttctggagctatttgacagcgaagaccctcgggaacgggactacttaaaaacagtcttacacagaatttatggcaagtttcttggtcttagagcatttatccgaaaacagattaacaatatttttctaaggtttgtttatgaaacagaacacttcaatggtgtagctgaactgctggaaatattaggaagtattatcaatggctttgctttacctcttaaggcagaacacaaacagtttctggtgaaagtattgatccctttacacactgtcaggagcttatcactcttccatgcacagctggcatattgtatagtacagtttctggagaaagatccttcactcacagaaccagttattagggggttaatgaaattttggcctaaaacatgtagtcaaaaagaggtcatgttccttggggaactggaagaaatattggatgtgattgaaccttcacaatttgttaaaatccaagaacctttgtttaaacaaatcgccaagtgtgtatctagcccccattttcaggtggcagaaagagcactctattattggaataatgaatacatcatgagtttgatagaagaaaactctaacgtcatccttcccatcatgttttccagcctttataggatttcaaaagaacattggaatccggctattgtggcgttggtgtacaatgtgttgaaggcatttatggaaatgaacagcaccatgtttgacgagctgacagccacatacaagtcagatcgtcagcgtgagaaaaagaaagaaaaggagcgtgaagaattgtggaaaaaattggaggatctggagttaaagagaggtcttagacgtgatggaataattccaacttaacaaaaacaatgacaacaacattactaacctgtggagtcacacgtttatgtagtagaagatggagcaacagttttctgtattgtgcaactttacagtagatttcacctttgtttcattattacagcagcactgtatatacctgtctctaagtaaaggaaaaaacaaaataaggacttcaatccaaagtttggacagtagatggacttctcagaactttgcaaacataatcattgttctcaccctcttttaaaaaaaaaaatcggtcttcaaagatctgttgatgaaattgctatgttaaaattccattatcgggagttccttatttatcactagcagagagtatgatacaattttcaaatgtgaacaatcttaaatttagcttgtctttctgctaagctgttaaatgtatttatagtaaaggaagaaaaaaagactgtcatttccttataagtttgtgtaacatcctcctctggataacttgactgtaatttaacatctttttcttttgcacatcttcctgagttgaatgtccacgtggaatggggtcatgaattataaaagtccctgataaaagttttgtttactggggtgaacatctttccagtaaccaggtagtcctggtactcctttagttttaaaattaggagttaagagagaagaggtgataaacatagtagggaagggaatatcggattcatgcatcagtttatggtgaatccaaatcaatgtcttgaatcctttgaaaacaggcactgggacatcacaggcttcagtacctgaccagtattagttgcatatatcattgaacacacataccagagatgttttagaaatgtgagaaaaacatccttttggaccatttgaaataagaaagacaaacactaaacaatacaaccatgaaattgatcaccgggattgcaaatctaattgggaaaagagttgagcaaacagcttggactgtttggagttgttgccttactttttaatatgtatttataaagtattccagcaaaagaggatgtagcctctgggaaaaaacaaacatgttacagtgttttttgtagattctcgttctatatctcatcacagcgccagccctgtttttagccggaaaggattcaggataaacattattatgcattctgaattggatgcatattcctaactactgtatttgttaccaaaagtggttctacaaatgctactgaaaaaaatctggaaattcctaatgtcctgagtattaataataaagtttaaaaatgcttttatatcaaaggtgcatcgtgaccaaattgtttaagaaaaaaaaacaaaaaaaacaaaatctagggctgtattttatatatatatatatatatatatatatatatat

SEQ ID NO: 416 - DNA, 4425 bp, human
gcgcgcgtggggctccattccgcggtgctgggtctccgtgccggggtgggtgctcgtgtgtgcgcttctcctccccatcccccttcccccaagaataaaagaagaaccgggaggcgtgctcagaaaataaataaataaccaccacacacgcgcagcccggagcgagtcggcggggctggcggcagcggcggaggaggagtgaaggcggcggcggcggaggagggacgcgcggaaaaggcagcaactttaaagccagctcagagcctagacctccagccgagcggtttgcagcgcggcggcggcggcggcggcggcggcggcggcgttgagtgtctggcccgccggtccggtcggggtgtgcagtcggacggacgagcagcgcgtcgctgtcctccggcagctggagatgtccgagcccaaggcaattgatcccaagttgtcgacgaccgacagggtggtgaaagctgttccatttcctccaagtcaccggcttacagcaaaagaagtgtttgataatgatggaaaacctcgtgtggatatcttaaaggcgcatcttatgaaggagggaaggctggaagagagtgttgcattgagaataataacagagggtgcatcaattcttcgacaggaaaaaaatttgctggatattgatgcgccagtcactgtttgtggggacattcatggacaattctttgatttgatgaagctctttgaagtcgggggatctcctgccaacactcgctacctcttcttaggggactatgttgacagagggtacttcagtattgaatgtgtgctgtatttgtgggccttgaaaattctctaccccaaaacactgtttttacttcgtggaaatcatgaatgtagacatctaacagagtatttcacatttaaacaagaatgtaaaataaagtattcagaacgcgtatatgatgcctgtatggatgcctttgactgccttcccctggctgccctgatgaaccaacagttcctgtgtgtgcatggtggtttgtctccagagattaacactttagatgatatcagaaaattagaccgattcaaagaaccacctgcatatggacctatgtgtgatatcctgtggtcagaccccctggaagattttggaaatgagaagactcaggaacatttcactcacaacacagtcagggggtgttcatacttctacagttacccggctgtatgtgaattcttacagcacaataacttgttatctatactccgagcccacgaagcccaagatgcagggtaccgcatgtacaggaaaagccaaacaacaggcttcccttctctaattacaattttttcagcaccaaattacttagatgtatacaataacaaagctgcagtattgaagtatgagaacaatgttatgaatatcaggcaattcaactgttctcctcatccatactggcttccaaatttcatggatgtttttacttggtcccttccatttgttggggaaaaagtgactgagatgctggtaaatgtcctcaacatctgctcagatgatgaactagggtcagaagaagatggatttgatggtgcaacagctgcagcccggaaagaggtgataaggaacaagatccgagcaataggcaaaatggccagagtgttctcagtgctcagagaagagagtgagagtgtgctgacgctgaaaggcttgaccccaactggcatgctccccagcggagtactttctggagggaagcaaaccctgcaaagcgctactgttgaggctattgaggctgatgaagctatcaaaggattttcaccacaacataagatcactagcttcgaggaagccaagggcttagaccgaattaatgagaggatgccgcctcgcagagatgccatgccctctgacgccaaccttaactccatcaacaaggctctcacctcagagactaacggcacggacagcaatggcagtaatagcagcaatattcagtgaccacttcctgttcacttttttttttttttttttttttttttgagctgcggggcatgatggggattgctgcatatcagcagttggatgttcttgcctctgacagtagcttatttgctctgggggccaggaattggattcagtttacactatcattaaaaaagagggagagagataataaactatattttggtggggatggtgattaaacacctcttttgggtatgccttttaaaaatgcttatagagaaaaaaattttaaaaagaaagctaatgctagtatatactgcaatgttaggggaatgaacatgttttcctactgcattggggacttctagataggttaatgaaaggccttttattctgttactggacatgaaaactttgtctaatttcttactctattgtacgtttacagtcgcagcactaaaaatggatgacatcaaacatttttaacaaaatgatgtacaaactaaggactatttattgataatgttttgctactcttgtcagacaatggctataaactgaattaggcagtcttaaaaaaaaaaaaaaaacagaaaaagaaaaaaaagaacgttgcaaatttgttaaaatgccaaaaaggacagtttaattttgtacagattatgcttacctcaggtttctttagtgtgcttgaatgcccttctttccatataacacttatcttcttcttaattcggcaatggaatatcttttaagttttaaaaaaactggaataattatatctatcttttttgccgtttatatttaggggtttttgttgataaaatcaagtcttggttgtggcttgctgaattaaatatttatgagtggtgcatttttaagtatagtgaacaagacaccatattaagtacagtgataaagcatctatattctgtaaaaaaaaaaaaaatctgcctatgcatgttttttaagaaaaaaaaaatggctgtatcggcctgtatgggactgtaatgcgcttagtggtctgacatatactggaaatgtatgtatactggcgtactttatattctctaaaatgcttaatgcctttgaaattttgtaatcaaaaaaaagctttgaaaaaatctaaaggggagagtattctttaaagtttttaacataagcttgtcaatgcacatgtagatggttagcatgtttagcaaaccttgtgaaattataataagtttgtagttacatgtgaaactctaaatgcatggcaactgttaatgtcataacagtttagttattttgttctgttctgtcatgtgccacaaaatatgtacttttttcacttttttccctttgtatatcagttacgggttacaactggttcattctgaaaacaacaacaacaaaagtccattcatattttttaacaattgtataagtgcccaagtaattcactacagcctaaagccttgcctttgtaatttgacttctgacatgttggcaatcaaagcatgcacttgtaacaatgaaaaagaaaaagcattttatattactactcaataaaatgtgcatgaacttacagaattctcatccttccactgagtccgctgaagggatttatgtgcacaaccaccatgtgtcttctaggtgctggcccaccaccacacatcacaggctgatttccacaggcttcttcctaggggcctcgtgatctgaggggtggtgcctacttccactgtaagaaagaatcttggtggatttgtgtctcaaatcagataagagaagcctgtttaaagagcagatgccatcttctggcttcctcaaggagccagttaaaaaaccagagcattcctttttattgaaaaataaaattaatttgttatcaggttgtttcagttgtattggatgccctatctatctgctaaagcaaaaagtactaggctactaagtgcattttcatcacagaaaagagttgcatttgtattaacaagaaatttgtatacccacgcttcagctactatctaatcatcacccgaagatttaagatacaccaaatttcagtttgtttgtaacattgttcatctttagtgcactttgttttatataataaagtatgcctgttatattaaataataagaatatggcaattagcgatatagcatacccaaacaaagatgttctcgatacagtctggcaaagactatcccaaggttattttaatgaattcagacattttttcctgtggatatttctccatcctaaaaaaagtggcaaccaaggaaaatatttagatgcaacttactagagtgatgatgtgaaagaaatggtgattctggtatcatggtgtttattttctttcttataactgcagagaaaatatcctgactaaaaaaatttcatttttttggattcctttcttttacaaattgtgctgaggcaactatggcatagaaataaacatttgacattaaaataagtaaaaaaaaaaaaaaaaaaaa

SEQ ID NO: 417 - DNA, 2161 bp, human
ggaggagctgttttgcggcgggcggagctgcaggctgggcagggcttagcctgtgcgcttctgctggcctccttttcgccctcccacccgcactgcagtctccagcctgagccatgggccgccgagccctcctgctcctgcttctgtcttttctggcgccctgggccaccatagccctccggccggccttaagggccctcggcagcctacacttgccaaccaaccccacatccctcccggctgtagccaagaactattcggttctctacttccaacagaaggttgatcattttggatttaatactgtgaaaacttttaatcagcggtacctagtagctgataaatactggaagaaaaatggtggatcaatacttttctacactggtaatgaaggggacattatctggttttgtaataacacggggttcatgtgggatgtggctgaggaactgaaagctatgttggtgtttgctgaacatcgatactatggagagtctctcccctttggtgacaactcattcaaggattccagacacttgaatttcctgacatcagaacaagctctggctgattttgcagagttaatcaaacacttgaaaagaacaatcccaggagctgaaaatcaacctgtcattgccataggaggctcctatggtggcatgcttgccgcctggtttaggatgaaatatcctcatatggtagttggagctcttgcagcttctgcccctatctggcagtttgaggatttagtaccttgtggtgtatttatgaagatcgtaactacagattttaggaaaagcggtccacattgttcagagagcatccacaggtcctgggatgccattaatcgactctcaaatactggcagtggtttgcagtggcttactggagcccttcacttatgcagcccattaacttctcaggacatccaacatttgaaagactggatctctgaaacctgggtgaatctggcaatggtggactatccttatgcctctaactttttacagcctttgcctgcttggcctatcaaggtagtgtgccagtatttgaaaaatcccaatgtatctgattcactgctgctgcagaatattttccaagctctgaatgtatattacaattattcgggccaggtgaaatgcctgaatatttcagagacagcaactagcagtctgggaacactgggttggagctatcaggcctgcacagaagtagtcatgcccttttgtactaatggtgtcgatgacatgtttgaacctcactcatggaacttaaaggaactttctgatgactgttttcaacagtggggtgtgagaccaaggccctcctggatcactactatgtatggaggcaaaaacattagttcacacacaaacattgttttcagcaatggtgaactagacccctggtcaggaggtggagtaactaaggatatcacagacactctggttgcagtcaccatctcagagggggcccaccacttagatctccgcaccaagaatgccttggatcctatgtctgtgctgttagcccgctccttggaagttagacatatgaagaattggatcagagatttctatgacagtgcgggaaagcagcactgagaaacttttgattgttttcaatttcttcttttatgttcacaccaccacattcccattcactttgattttctacatgtaattaccttcttttgtttatcattagatttgatggggccaaagttgagatagaatagagggtgatgacggtaagagcaagtgtcccatgaatgtgatttcctgggttctcactgtctttgcaccacgtctaggaagaatcttcttgatagctctcccacaccatcagtggccctcataactggagtagagttcctggttgcttttcataagagggagagttactttctttgtatctctgcaagcagagatttctctttggttttgaggttgaagtgtctttggcccatttgtaagtccccatccctaccctacacaaagtaaaagcagaagatagataaaaaatgatgtaattgcagctggtaggatgtctggtgccaatccaggaagtgagagccatttcttttgtaccggatttaatgactttgaactgtgctgtaaataaataatacagctggaccttaaaaaaaaaaaaaaaaaaa

SEQ ID NO: 418 - DNA, 2412 bp, human
gcggaagtcgctgaggggtggtgaagcggttgggaaagtgtcggtttatcttcgcgccccttgcgttcttgccgcggcttgcctgggcaggtaaagcgcgattgcgagagctcggcaaccctgccgactcagccggaaccggctcccggcccgaggggcgtggtgtcctggtgctccgactccttccgcaggctccttgggacccgcggttccgggagtcccttgctcagggtccctttcctgcagtgaggcgccgtccgccttccctgtgtccccgcagacccccatcatgggcaataccagcagtgagcgcgccgcgctggagcggcatggtggccataagacgccccggagggacagctcggggggcaccaaggacggggacaggcccaagatcctgatggacagccccgaagacgccgacctcttccactccgaggaaatcaaggcaccagagaaggaggaattcctggcctggcagcatgatctggaagtgaatgataaagctcccgcccaggctcggccaacggtgtttcgatggacggggggcggaaaggaagtttacttatctgggtccttcaacaactggagtaaacttcccctcaccagaagccacaataactttgtagccatcctggatctgccggaaggagagcatcagtacaagttctttgtggatggtcagtggacgcacgacccttccgagcccatagtaaccagccagcttggcacagttaacaacatcattcaagtgaagaaaactgactttgaagtatttgatgctttaatggtggattcccaaaagtgctccgatgtgtctgagctgtccagttctcccccaggaccctaccatcaggagccctacgtctgcaaacccgaagagcgctttcgggcaccccctattctccccccacatctcctccaggtcatcctgaacaaggacacggggatttcctgtgatccagctttgcttcctgagcccaatcacgtcatgctgaaccacctatacgcgctgtctatcaaggatggagtgatggtgctcagcgcaacccaccggtacaagaagaagtacgtcaccaccttgttatacaagcccatatgaagagctgggggcggatggtggcccaggagacagcacaccaccaggctccacacgtgcatgctttccccaagagggaatggactgtacattgctcatttcacactcttcagaagacatttcatacctgccctggtcctgcttgaaggtttgtccaggcagagcagctcctgcagcgcctcggtctgtgacagtcctcctagcacccccatggctttgagcctcggggactcatcaagtccaagaaaagagggaggggtggcagaggatctgcagccctggccccgcggtgcatgaggctgggtgcagttctaaacctacattctcgatttttcttaagccaaaaatgaatgctaactcctttgccagtaaaattctgggaaacagggactgaggccacacatcatttccagtcatctgtgtgtttttaaggccagccacttgtccctgttgaggcctggctatggaactaaatacagtgttggtcttgcctgtccttcaaaatcaacaacagattgtctctcggctccagggaggtgtcatttctatagaaattagaagctttctgatttctagatgaggttttacaattgtttcttacagtcatgtgcactaagtactctttttgtaagcagaggtggctggctctgcagccttaaggccattttttaagtcaccacgtctagaagtcacatgaactctgctcagcaataatctgttctcagaacagacttttcaacctgctgccggatttctccattcagctggatgatcctcaggactgaccagttagctggcaggttgtccagctttttattccagtcataataggtgacagtgttaaccgtgaaaacttgagaggcactctgccctcttccctataaaatcacacagcgtgattttacaaggtcccgtggcaccttgctcaggacctctgcccctagttagcaagactgcagcagttgctgttgcttattctgaaaggaatgtagaacttgacagcagccttctgagtctgggtcaggaagatgtcctttggaccaaagcagacttctttatacgcagctcagtttcccgggagtcgccacagatgtacccactagcccaggttgctgtgagtcagcggaagctcccgttatgccctttgctcctggtgggagagggaggagtgagctccctgggttccagtatttacttggtatacctgagtttgggggtacccttttttgtgacttttcaaaacagtgaattactgtcaccttgatggacaagtttcaataaaactttgtaaaaataattggaaaaaaaaaaaa

SEQ ID NO: 419 - DNA, 3626 bp, human
gattggctgcggccaggccgtttccggtggagctgtcgcctagccgctatcgcagagtggagcggggctgggagcaaagcgctgagggagctcggtacgccgccgcctcgcacccgcagcctcgcgcccgccgccgcccgtccccagagaaccatggagtctggcagtaccgccgccagtgaggaggcacgcagccttcgagaatgtgagctctacgtccagaagcataacattcaagcgctgctcaaagattctattgtgcagttgtgcactgctcgacctgagagacccatggcattcctcagggaatactttgagaggttggagaaggaggaggcaaaacagattcagaatctgcagaaagcaggcactcgtacagactcaagggaggatgagatttctcctcctccacccaacccagtggttaaaggtaggaggcgacgaggtgctatcagcgctgaggtctacacggaggaagatgcggcatcctatgttagaaaggttataccaaaagattacaagacaatggccgctttagccaaagccattgaaaagaatgtgctgttttcacatcttgatgataatgagagaagtgatatttttgatgccatgttttcggtctcctttatcgcaggagagactgtgattcagcaaggtgatgaaggggataacttctatgtgattgatcaaggagagacggatgtctatgttaacaatgaatgggcaaccagtgttggggaaggagggagctttggagaacttgctttgatttatggaacaccgagagcagccactgtcaaagcaaagacaaatgtgaaattgtggggcatcgaccgagacagctatagaagaatcctcatgggaagcacactgagaaagcggaagatgtatgaggaattccttagtaaagtctctattttagagtctctggacaagtgggaacgtcttacggtagctgatgcattggaaccagtgcagtttgaagatgggcagaagattgtggtgcagggagaaccaggggatgagttcttcattattttagaggggtcagctgctgtgctacaacgtcggtcagaaaatgaagagtttgttgaagtgggaagattggggccttctgattattttggtgaaattgcactactgatgaatcgtcctcgtgctgccacagttgttgctcgtggccccttgaagtgcgttaagctggaccgacctagatttgaacgtgttcttggcccatgctcagacatcctcaaacgaaacatccagcagtacaacagttttgtgtcactgtctgtctgaaatctgcctcctgtgcctcccttttctcctctccccaatccatgcttcactcatgcaaactgctttattttccctacttgcagcgccaagtggccactggcatcgcagcttcctgtctgtttatatattgaaagttgcttttattgcaccattttcaatttggagcattaactaaatgctcatacacagttaaataaatagaaagagttctatggagactttgctgttactgcttctctttgtgcagtgttagtattcaccctgggcagtgagtgccatgctttttggtgagggcagatcccagcacctattgaattaccatagagtaatgatgtaacagtgcaagattttttttttaagtgacataattgtccagttataagcgtatttagactgtggccatatatgctgtatttctttgtagaataaatggtttctcattaaactctaaagattagggaaaatggatatagaaaatcttagtatagtagaaagacatctgcctgtaattaaactagtttaagggtggaaaaatgcccatttttgctaattatcaatgggatatgattggttcagtttttttttttccagagttgttgtttgccaagctaatctgcctggttttatttatatcttgttattaatgtttcttctccaattctgaaatacttttgagtatggctatctatacctgccttttaagtttgaaactaactcatagattgcaaatattggttagtatttaactacatctgcctcggctcacaaattccgattagacctttatccagctagtgccaaataattgatcagatgctgaattgagaataagaatttgaggtctacattcttggttgttaatttagagcgtttggttaaagtatgtccttcagctgactccagtataatctcctctgctcattaaactgattccaggagattggatttgctgtgactagatacagatggagcaaatgtcctaacagagaaatagaggtgatgctgctaaagggagaaatgccaggcggacaaagttcagtgtcgggaattttccccgtgacattcactggggcatgagattttggaagaagttttttactttggtttagtctttttttccttcctttttattcagctagaatttctggtgggttgatggtagggtataatgtgtctgtgttgcttcaaattggtctgaaaggctatcctgctgaaagtcctgctttcctatctagcatttatttctctggcaaacttttctttcttttcttttttaaagtaaacttgtgtattgagtcttaactgtatttcagtattttccagccttatgtgttacattattccaatgatacccaacagtttatttttattatttttttaaacaaaatttcacagttctgtaatgtaggcacttttattttcattgtgatttatatataaggtaatgtagggttatatttgggagtgactgcaagcatttttccatctgtgtgcaactaactgactctgttattgatcccttctcctgccctttcccaggtaatttaaattggtcatggtagatttttttcatagatttgaaaaacttttaggttgttaccaagtatgaagtataaatctggggaagaggttttatttacattttagggtgggtaagaaagccaccttgttacaaattttttaatttccaaaataatctatattaaatgagggtttctgatctgtactttgtgtttagctacctttttatatttaaaaaattaaaaatgaaaattacgttcttacaagcttaaagcttgatttgatctttgtttaaatgccaaaatgtacttaaatgagttacttagaatgccataaaattgcagtttcatgtatgtatataatcatgctcatgtatatttagttacgtataatgctttctgagtgagttttactcttaaatcatttggttaaatcatttggcttgctgtttactcccttctgtagtttttaattaaaaactttaaagataagtctacattaaacaatgatcacatctaaagctttatctttgtgtaatctaagtatatgtgagaaatcagaattggcataatttgtcttagttgatattcaaggctttaaaagtcattattcctgggcttggtaagtgaatttatgagatttactgctctagaaagtatagatggccaaaggaccgttttgtattgcttcctgattaccagtctgattataccatgtgtgctaatatactttttttgttatagattgtcttaatggtaggtcaagtaataaaaagagatgaaataatttaaattcttaaaaaaaaa

SEQ ID NO: 420 - DNA, 3411 bp, human
gggcgagtgacagccccggctccgcgcgccgcggccgccagagccggcgcaggggaagcgcccgcggccccgggtgcagcagcggccgccgcctcccgcgcctccccggcccgcagcccgcggtcccgcggccccggggccggcacctctcgggctccggctccccgcgcgcaagatggctgacccggctgcggggccgccgccgagcgagggcgaggagagcaccgtgcgcttcgcccgcaaaggcgccctccggcagaagaacgtgcatgaggtcaagaaccacaaattcaccgcccgcttcttcaagcagcccaccttctgcagccactgcaccgacttcatctggggcttcgggaagcagggattccagtgccaagtttgctgctttgtggtgcacaagcggtgccatgaatttgtcacattctcctgccctggcgctgacaagggtccagcctccgatgacccccgcagcaaacacaagtttaagatccacacgtactccagccccacgttttgtgaccactgtgggtcactgctgtatggactcatccaccaggggatgaaatgtgacacctgcatgatgaatgtgcacaagcgctgcgtgatgaatgttcccagcctgtgtggcacggaccacacggagcgccgcggccgcatctacatccaggcccacatcgacagggacgtcctcattgtcctcgtaagagatgctaaaaaccttgtacctatggaccccaatggcctgtcagatccctacgtaaaactgaaactgattcccgatcccaaaagtgagagcaaacagaagaccaaaaccatcaaatgctccctcaaccctgagtggaatgagacatttagatttcagctgaaagaatcggacaaagacagaagactgtcagtagagatttgggattgggatttgaccagcaggaatgacttcatgggatctttgtcctttgggatttctgaacttcagaaagccagtgttgatggctggtttaagttactgagccaggaggaaggcgagtacttcaatgtgcctgtgccaccagaaggaagtgaggccaatgaagaactgcggcagaaatttgagagggccaagatcagtcagggaaccaaggtcccggaagaaaagacgaccaacactgtctccaaatttgacaacaatggcaacagagaccggatgaaactgaccgattttaacttcctaatggtgctggggaaaggcagctttggcaaggtcatgctttcagaacgaaaaggcacagatgagctctatgctgtgaagatcctgaagaaggacgttgtgatccaagatgatgacgtggagtgcactatggtggagaagcgggtgttggccctgcctgggaagccgcccttcctgacccagctccactcctgcttccagaccatggaccgcctgtactttgtgatggagtacgtgaatgggggcgacctcatgtatcacatccagcaagtcggccggttcaaggagccccatgctgtattttacgctgcagaaattgccatcggtctgttcttcttacagagtaagggcatcatttaccgtgacctaaaacttgacaacgtgatgctcgattctgagggacacatcaagattgccgattttggcatgtgtaaggaaaacatctgggatggggtgacaaccaagacattctgtggcactccagactacatcgcccccgagataattgcttatcagccctatgggaagtccgtggattggtgggcatttggagtcctgctgtatgaaatgttggctgggcaggcaccctttgaaggggaggatgaagatgaactcttccaatccatcatggaacacaacgtagcctatcccaagtctatgtccaaggaagctgtggccatctgcaaagggctgatgaccaaacacccaggcaaacgtctgggttgtggacctgaaggcgaacgtgatatcaaagagcatgcatttttccggtatattgattgggagaaacttgaacgcaaagagatccagcccccttataagccaaaagcttgtgggcgaaatgctgaaaacttcgaccgatttttcacccgccatccaccagtcctaacacctcccgaccaggaagtcatcaggaatattgaccaatcagaattcgaaggattttcctttgttaactctgaatttttaaaacccgaagtcaagagctaagtagatgtgtagatctccgtccttcatttctgtcattcaagctcaacggctattgtggtgacatttttatgtttttcattgccaagttgcatccatgtttgattttctgatgagactagagtgacagtgtttcagaacccaaatgtcctcaggtagtttggagcatctctatgagatgggattatgcagatggcctatggaaaatgcagctgcataattaacacattatcaaagtcctcttacaatttattttccgcagcatgtcagctaagtagacccaatggggagagaaaatgcctgctttctttccctctttttctgcactgccatattcacccccaaccatccaatctgtggataattggatgttagcggtactcttccacttccgggcctggagcttggcttgtatccaagtgtatggttgctttgcctaagaggaatccctctatttcacctgttctggaggcaccagaccttgaaaagaacatgctcaaaataaaatgttatctgttatttttgtaaactcaaagttaagatgatcaaagttctaaaattccaagaatgtgcttttagacggtctcaatctaaaagcacttcaaggggtcaaagggcaaccagcttgggtgctacctcagtgttgtagtttctgatactttatgtctttgctcaccctcatccccaaactacttgaaaagggcatttggcaccactctctgaaacaacacagtcactctagcaaggcccccaaagggccctggttttacattacatttcaaactttatttgctttggggttttgtttctgttgttgttcaaatgcaaaaaaaagaaaaaaaaagaaaaaaaaaggtgactcacattgttacacatgctttaaaatatgtattcaaatgttattaaccacaatgacgacctgctttgatttaaccaagaagacggctgcggagcctagcagactcaggcctgtgggaatgggatttgttacaaatctaggtttgttactggcttcagaaagctaattaagtgctctgaaaaagacaccgtttcttgaaacaaagatggttgtattcctcactttgatgttgttttgcaagatgtttgtggaaatgttcatttgtatctggatctctgttatgtgccatttttcttctagcatcgagatacaataaaaaaaaaaaaaaagaaaaaaaaaaaaaaaaaaaaaaaaaaaa

SEQ ID NO: 421 - DNA, 5537 bp, human
gaacccggcgaggaaatacatgcactggctgagaatcgcccgcgccagggcgcaacgccacaaggtgtagggagtgtgcggggtggggcgaaaggggacccaagagtccctgtggctcggagtgccgggccgtcggttcttcattcctgccctcggggcagacggagtgaccccggcccccactccccgccccgaccatggtagtgttcaatggccttcttaagatcaaaatctgcgaggccgtgagcttgaagcccacagcctggtcgctgcgccatgcggtgggaccccggccgcagactttccttctcgacccctacattgccctcaatgtggacgactcgcgcatcggccaaacggccaccaagcagaagaccaacagcccggcctggcacgacgagttcgtcaccgatgtgtgcaacggacgcaagatcgagctggctgtctttcacgatgcccccataggctacgacgacttcgtggccaactgcaccatccagtttgaggagctgctgcagaacgggagccgccacttcgaggactggattgatctggagccagaaggaagagtgtatgtgatcatcgatctctcagggtcgtcgggtgaagcccctaaagacaatgaagagcgtgtgttcagggaacgcatgcggccgaggaagcggcagggggccgtcaggcgcagggtccatcaggtcaacggccacaagttcatggccacctatcttcggcagcccacctactgctcccattgcagagacttcatctggggtgtcataggaaagcagggataccagtgtcaagtctgcacctgcgtggtccacaagcggtgccacgagctcataatcacaaagtgtgctgggttaaagaagcaggagacccccgaccaggtgggctcccagcggttcagcgtcaacatgccccacaagttcggtatccacaactacaaggtccctaccttctgcgatcactgtgggtccctgctctggggactcttgcggcagggtttgcagtgtaaagtctgcaaaatgaatgttcaccgtcgatgtgagaccaacgtggctcccaactgtggagtggatgccagaggaatcgccaaagtactggccgacctgggcgttaccccagacaaaatcaccaacagcggccagagaaggaaaaagctcattgctggtgccgagtccccgcagcctgcttctggaagctcaccatctgaggaagatcgatccaagtcagcacccacctccccttgtgaccaggaaataaaagaacttgagaacaacattcggaaagccttgtcatttgacaaccgaggagaggagcaccgggcagcatcgtctcctgatggccagctgatgagccccggtgagaatggcgaagtccggcaaggccaggccaagcgcctgggcctggatgagttcaacttcatcaaggtgttgggcaaaggcagctttggcaaggtcatgttggcagaactcaagggcaaagatgaagtatatgctgtgaaggtcttaaagaaggacgtcatccttcaggatgatgacgtggactgcacaatgacagagaagaggattttggctctggcacggaaacacccgtaccttacccaactctactgctgcttccagaccaaggaccgcctctttttcgtcatggaatatgtaaatggtggagacctcatgtttcagattcagcgctcccgaaaattcgacgagcctcgttcacggttctatgctgcagaggtcacatcggccctcatgttcctccaccagcatggagtcatctacagggatttgaaactggacaacatccttctggatgcagaaggtcactgcaagctggctgacttcgggatgtgcaaggaagggattctgaatggtgtgacgaccaccacgttctgtgggactcctgactacatagctcctgagatcctgcaggagttggagtatggcccctccgtggactggtgggccctgggggtgctgatgtacgagatgatggctggacagcctccctttgaggccgacaatgaggacgacctatttgagtccatcctccatgacgacgtgctgtacccagtctggctcagcaaggaggctgtcagcatcttgaaagctttcatgacgaagaatccccacaagcgcctgggctgtgtggcatcgcagaatggcgaggacgccatcaagcagcacccattcttcaaagagattgactgggtgctcctggagcagaagaagatcaagccacccttcaaaccacgcattaaaaccaaaagagacgtcaataattttgaccaagactttacccgggaagagccggtactcacccttgtggacgaagcaattgtaaagcagatcaaccaggaggaattcaaaggtttctcctactttggtgaagacctgatgccctgagagcccactgcagttggactttgccgatgctgcaagaaggggtgcagagaagactcctgtgttggagacactcagcaggtcttgaactacttctcctcctcggagccccagtcccatgtccactgtctatttattgcattcccttgccccaggccacctcctccccctcccacctggtgaccagaaggcgctctcggttcttgtctcaccagtaatgcagactcattgggtcagcaattagctgtatacactgccgtgtttggaccattggcaagcctggttccactcctcaggggctcctggcagtgaagcaacttcagttcttttactgcaaagaacagaaaaaagaaagaaagcaaacaagaagactccggctctgctatcggacacagatcctgatccctcttgcttcttttccctcctgcaccgcagcttgccatccctgcccttctgtcctggagaagagactggtgcttctccgcacacacgagggagggcgcccttgaggcatgccctctgagggagggagaccagagatgcagggattggccagctgggttggtttgctctggaatggctaactcttgcctgctttggttttagcttttcagcatgccaaagtcatgtaagtttgtgtcttgtggaagaaatcctctttgtggaaaaagaaacagggttttgaactctgttaacatttgaaaaatatattttcaaattcactttctaattggccaaaagagatgagttccagtctgaatacaggtagatattaaagggctaataaaaaatgagaaaccggtcgtccaaggtggatgctgtcaatgcccgagtgacacatgagagctgtatgaattgagagaaaaggcaacaagtagcattcttcatcattcaagttctacctggacacaaaggcgaggaccctggggttccaacaaagctcagctcccagattctctttccagtttcatcctaagttcctagcataaacactatttattttctgcagcagtgtgttatttttgcgcacttatacaaaatggtagtactactgtgttgtggtttttaaacattaaacatgtaaagttatatacgaaatatctgcttttggaataagcagaatgaggctaaacatgggttatacaaagggtatctggaaactgaagagcaacttgttagaaaactgacaatgtcgcaagatgtactcagttttgtttctgtgtgacatgcaatggcaactcatgtggacactattgaagggatgtgacattacctcctgtagatatgctaacagtgttattctttcatttccaagggttctctgtggctttgtgtatatgtttcccagaggtcatttgattacctaatttactgaactgatttagcagggaatggaatccattccaactattgcacgtggatttcccagctgcccctaaatatatatacttgtgagtggcaaagtggcactaatgaagcttttgccttttgtacatttgagatttttgtatatagtgtttgctgcaaggcctgtggaattaattcgttgcatatagaggtatcaactgctgcatgttcaggcatattataaaactttagtctatgaaagaataattataataatgtccaggtgcaatactctgtaagtctattggttcaagttaccgagagataggtgtgttcctttatgggggatgggggggtgtgttggggattctttgtattgtttatttcattttggtttattttaaaagatgtaaacatatattaagctatattaaatctcacatacagttcttctgtgctctattataccctgatagagatgggggagagaaaggaatgtttttgatggtggtttcaaagctcggacagtaactatcttgagcccattagagagtctgtgtccatatttgcatctggctggtcatagcctttgttactaatgatgacattcagttctcttttgtttttattttttaaaaactcaggtgtaattattatctgttcttaagataattgcaaatattaaatattatgatatatcaattcatgtgtttggcataccagtgaatgatgaagaacatgagattaatttaatttatcttcggtaacttgacattctggagagagactatcttctggagttgagtacaagcacagaaacatctttacggtggcatcatctcattttttaggaagacatgataatactgcccatcatattcatgtgtaactactgttctttcttctgctttcttcaccataataaactttggacaaccaagcaagctctaaccgcaatgccagatggccttgtccgagggcctagtgtttgcacggcagtgggaactgggcctttcctacaggacaactggcaagtttgctgggaagtcaaataatacattccacctggcagctgaaggcagccagtcagtctgtcccagaaagggcccttttcagcacccaaagctgggctggctgggatgcctctggctggtgaagttctcacataggctgatttaaatccagcaaaggtctatagaaaaaggcttgcgtgttcgttgagtaatcattgtttcattttcatttttacgagagtttgaaaatagacacactgttaacacttctgccagttttttctgatctttccagccccaccccctttctctttctctctctctctcaaagaaaaaaaaaatgggagtgcaaaaaaaacaaagccaaaaaatatatgaaggatagctgttcttctgtgttctctcattatggactttgtgaagtagaaacataattttttttcctccaaaggtgaaaaaacaatgcattcttgctttaaaaaaaaaaaagaaggctaaaaaattacctctttttaaattatgtgcaaaataattctggctaactgtaaaatgtattcaattttaggattttttttttttgtattgtgatgctttatttgtacatttttttcctttctggatgtaattttaatctcttgccattcattagtgttatttcattgtaaacgttattgtgccaaatgtactgtattcaaaaggatgtgaatgtgtattgtttcagaacctaataaatacaatgacgttaagtcttaaaaaaaaaaaaaaaaaa

SEQ ID NO: 422 - DNA, 3740 bp, human
aggaagcctcaagacgcggagcagcggcaggaaggagcccccggcagcccggaggagcatgggcaccttgcgggatttacagtacgcgctccaggagaagatcgaggagctgaggcagcgggatgctctcatcgacgagctggagctggagttggatcagaaggacgaactgatccagaagctgcagaacgagctggacaagtaccgctcggtgatccgaccagccacccagcaggcgcagaagcagagcgcgagcaccttgcagggcgagccgcgcaccaagcggcaggcgatctccgccgagcccaccgccttcgacatccaggatctcagccatgtgaccctgcccttctaccccaagagcccacagtccaaggatcttataaaggaagctatccttgacaatgactttatgaagaacttggagctgtcgcagatccaggagattgtggattgtatgtacccggtggagtatggcaaggacagttgcatcatcaaagaaggagacgtggggtcactggtgtatgtcatggaagatggtaaggttgaagttacaaaagaaggtgtgaagttgtgtaccatgggtccaggaaaagtgtttggggaattggctattctttacaactgtacccggacagcgaccgtcaagactcttgtaaatgtaaaactctgggccattgatcgacaatgttttcaaacaataatgatgaggacaggactcatcaagcataccgagtatatggaatttttaaaaagcgttccaacattccagagccttcctgaagagatcctcagcaagcttgctgatgtccttgaagagacccactatgaaaatggagaatatattatcaggcaaggtgcaagaggggacaccttctttatcatcagcaaaggaacggtaaatgtcactcgtgaagactcaccgagtgaagacccagtctttcttagaactttaggaaaaggagactggtttggagagaaagccttgcagggggaagatgtgagaacagcaaacgtaattgctgcagaagctgtaacctgccttgtgattgacagagactcttttaaacatttgattggagggctggatgatgtttctaataaagcatatgaagatgcagaagctaaagcaaaatatgaagctgaagcggctttcttcgccaacctgaagctgtctgatttcaacatcattgatacccttggagttggaggtttcggacgagtagaactggtccagttgaaaagtgaagaatccaaaacgtttgcaatgaagattctcaagaaacgtcacattgtggacacaagacagcaggagcacatccgctcagagaagcagatcatgcagggggctcattccgatttcatagtgagactgtacagaacatttaaggacagcaaatatttgtatatgttgatggaagcttgtctaggtggagagctctggaccattctcagggatagaggttcgtttgaagattctacaaccagattttacacagcatgtgtggtagaagcttttgcctatctgcattccaaaggaatcatttacagggacctcaagccagaaaatctcatcctagatcaccgaggttatgccaaactggttgattttggctttgcaaagaaaataggatttggaaagaaaacatggactttttgtgggactccagagtatgtagccccagagatcatcctgaacaaaggccatgacatttcagccgactactggtcactgggaatcctaatgtatgaactcctgactggcagcccacctttctcaggcccagatcctatgaaaacctataacatcatattgagggggattgacatgatagaatttccaaagaagattgccaaaaatgctgctaatttaattaaaaaactatgcagggacaatccatcagaaagattagggaatttgaaaaatggagtaaaagacattcaaaagcacaaatggtttgagggctttaactgggaaggcttaagaaaaggtaccttgacacctcctataataccaagtgttgcatcacccacagacacaagtaattttgacagtttccctgaggacaacgatgaaccaccacctgatgacaactcaggatgggatatagacttctaatgtatttctcttacctgcttctgccttgctgaagacagctttttctgagacacagctgccagcaaacctgagggaaagagagaagattagtgctcggggtcaccatgatgcctttgatcgatgctgctccagtaactacagtggcattaggacttatcgcttagatgacaatagtgctctttacatgttttctgtttgaacctaaaatagcagttgacatggtggtcctgaagcaaagcctttcaccagtaaagagatgttttctattgttgcaatgaccttgctttgctctgattataatttgaaagactgtaggaaacacttcaatgtagtataagagtctgtaccttgctggaatattcaagaagatgaaagaataatatattgggtacaatagattactatggtacagaaactgggctattccctttcttcaagtgaaggctgtgggatctattacagctgcaggccggtgtatataccatacaaaagaggaccacacatctgttggtcacagagttcatgtcacaccagtgctagaagtttcatgattttatttcccagcagtgctgatgacaagactgaatgttaccttttctttctgacagattttaaaaattgatatgataaaagcacaactgctatagattctgctgagacctctcatagtaggtatatatgagttttcacagaagactgaaaaataatgcatgatatttgtttgttttttttgataaattggcatgacagagtggggaaaaaaagcaattcacaaaaccatttcatattttttaaaatattgtgcttaaagatggtcctggaagtaaatgactagcagccaattggttttacttaacataccctcaaactgaggcttaaagtattcccttttataaaaataaatgcttggggtagggtggagtggggagggattaaaacccatccaaaaaataaataaaaactatataggtgctatgtatatctttcatctgtaaatgtcagtgtctgaacagcaacacaaattcaaatcattatacgtgtagccagaaactcaagcattttcactaaagttattaaaccaaactcctgtccaatttgacttatacaacatagtcagtctagagttgagagacaaaggtaattataaacctatttgaactagcttcttgtcttaggcctgaaccaaaaaacaacaaacaaacaaaaaacaagaatgaaaaacagaaataaaagaagtagaaaagacaaagaaagaaagcccaaagtcaaagttgttaatatttacaggtttaccagatctggaacattacttatttgaggtcagagaacaaaacaagaacctggccaggtgttgattaccttttagtgaataagctgagtccatatacttgtctaactaagaaagcagtacagaggaaaacaggaacctgatttttttaaaataaattttaaataaaatagaattactacaattctgcaatttcatactacctaaaaaagactagatttgaaaatgtcaagctgatttactttattcacatggagaaaagaatccacaaattaaactgagtccttcactggcatgccagttgactattattagctgtcataagtaaccccg

SEQ ID NO: 423 - DNA, 6034 bp, human
ccacgcgtccggagctggaggaggcggcgggcgcgagacccggaatgcgcagggcccccgcctcgccccccccagcccgggccgcggcccccgccttccccgcagtcgtcccgcactcggtgcccgccccccgaggccggcggctgctcccactcggggccgttgctgcttgtgccgtgagcgccgcccagccattgtccccgtcgctccgtcagccgcgccggaccgcgcaccaggaggcgagagcgcgcatggggagcctctgttgatgccgccgccgcgccgccctccgaggctgcgtcccgggaagcccggctccccgagcgctccggcctggcccggtgccccggacctgagtgcgtccccatggaggcgcccgggctggcccaggcggccgcggcggagagcgactcccgcaaggtggcggaggagacccccgacggggcgcccgcgctctgccccagccctgaggcgctgtcgccggagccgcctgtgtacagcctgcaggactttgacacgctggccaccgtgggcactgggacgttcgggcgggtgcacctggtgaaggagaagacagccaagcatttcttcgccctcaaggtgatgagcattcctgacgtcatccgcctaaagcaggagcaacacgtacacaatgagaagtctgtcctgaaggaagtcagccacccgttcctcatcaggctgttctggacgtggcatgacgagcgcttcctctacatgctcatggagtacgtgccgggcggcgagctcttcagctacctgcgcaaccgggggcgcttctccagcaccacggggctcttctactctgcagagatcatctgtgccatcgagtacctgcactccaaagagatcgtctacagggacttgaagccagagaacatcctgctggatagggatggccacattaagctcacggactttgggttcgccaagaagctggtagacaggacttggaccctctgtggaacacccgagtacctagcccccgaagtcattcagagcaagggccacggaagggccgtggactggtgggccctcggcatcctgatattcgagatgctttcggggtttcctccgttttttgatgacaacccgtttggcatttatcagaaaattcttgcaggcaaaatagatttccccagacatttggatttccatgtaaaagacctcattaagaaactgctcgtggttgacagaacaaggcgattaggaaacatgaagaacggggcgaatgatgtgaagcatcatcggtggttccgctccgtggactgggaagctgttccgcagagaaaactgaagcctcccatcgtgcccaagatagctggtgacggcgacacttccaacttcgaaacttaccctgagaatgactgggacacagccgcgcccgtgccgcagaaggatttagaaatcttcaagaatttctgaggacaggagctcacatctggaagaaacaggaagattggaatctgcctggaacaaagaactgcacctaagcagaccagaagcaaaatgtcttcttcacggcataaggacatctccacttttctctgtacctgtgtgtatagaaatagattagagcacagttgaaattcatggaactggcattatttaagcaactggaattccacactgtaggaaggttttgaaaattgtttggttgtagattttatcttatcctttagtgttgtgttcctactgtgatgtcttggtttttgtcatagacttaagtttataagtttgaactggacttgttcgattataaccacaaattgtgtgtgtgtgtgtgtgtgtgtgtgtgtgtgtgtgtatgcctgtgtgtatatatagaagtcattatggcagatgcacagaaattgtgcagtgatgtaaatgttcatactttacagagcctataatttttatttttcaatttgttttttcaaaaatctcttctcggggacaacatctgaagggtatgttgcatgcattaaaaaaaatcatctcacatgcattttatagttttggggaagaaaatatcatggggaggtctaccttcagtatctttagttcttcttaccgggtaacttgagactttaaaagaagaaacaaagaggggaagatatgggagcgaatttattccaagaatctacaatgacattgaagttgttggaggaatgtactgtatttaaaaaaaccttctgtgacacattcaaaaatttcatctgagctggatgcagtggcttgttcctatagtcccagcactttgggaggctgaggtgggtggattgcttgagcccaggagttggagaccagtctgggaaacgtggtgagacctcatctctacaaaatacaaaaaaattagccgggcatggtggcacgtgagttaggtctcagctactcaggaggctgagatgagaggatcacttgagcctggggaggtccaggccgcagtgatccgagatcacaccactgcattccagcctgggtgacagagtgagaccctgtccaaaaaaaaaaaaaaaaaaaagaaggcaatggctttgtgcttttgaagatggattgaagagaacgtccaccttaaggctttaaaagacagtgaagctgggtgcggtggtgcactcctgtaaccctgggactttgggaagctgaggcaggaagattgagcctaggagttcgagactgacctgggcagcatagcgagaccccatctctatataaaaaaaaagatgttaaaacagtgaaattacagaaacagaacatagccaccctttttcatcagtgaccttttcttcacgtggaggtcaactcagtaggtgagaataattagtaggttcagcagaataaactctttacaattaataactcagtggaaaatgatgttcagatggtgaaatgtggaaatgttttagacaactctattttcagcctgtgcttctcactcaccatcctgttgggattaacagttgagggccatcgctgcctaaacatttagcgtgcggtttcccatcagttttaccgtgaatgtgaaaaggtgaaactggtgctgacttcggcagcaggtatactaaaattggaatgacacagaggagattagcatggccccctgcgcgaggaagatctgcagattcatgcagcattccatatttttttaagaaaaggttacactgtgcaccgacatgtggagctagaaggaaaagcttttaagtctcatgtttgctgactataaaaataaatcatagtaataatattgaacattctactttaaaaattattaataaaaccataaatgaaacacttgagcacactttaaaaagtacataaatccatgagtccatatgcctatttttaggttgtctgttttattatccaggatttcatactcagatgagaattagcatcaggaaagcctgaaatgccttaattgtgaactgatatgcaggaaaatgaaatatgcaagcacattggtgaccttgttctttacagacgtcgtgatcagcctccagccatacagaacaaatgagaaattagaagcgattccaagaacgtgtgatggtgtgaacccactttggaccatcacacacatttcagcatttgaagtgacacaagctacctggtaactgcccatggcggggtcatagtttaaatggcccaatgtcatgtagaggttaatttaatcaaaatgagctataaacatggagcaatcactgtataattttaaaatagtttacctggccaggcatggtcgtcacgcctgtaatcccagcactttgggaggccgaggcaggtggatcacctgaggtcaggagttcgagaccagcctggccaacatggcaaaacccccgtctctactaaaatacaaaaattaggtgtggtggcgggcacctgtaatcctggctactcgggaggctgaggcaggagaatcgcttgaacccgggaggcagaggctgcagtgagccgagatcgtgccactgcactccagcctgggccacagagcaagactccgtctcaaaacataaaaataaaaaaaatacaaatagctgacccgggtgggcattccaaaatgtccgcatggacgatcacgaaacaatcacggtgcgaaatgtccgcatggatgatcacgaaacaatcacggtgcggaatgtccgtatggatgatcatgacaaacaatcactgcgcaaaatgtggaggaaaattcattaccataatcacaacatttgtatcagaaaaacattacaaatttactttgcttcatgtaattttacgagttggcaatattttcttaaattggaatactctaagagaataggacatggatatgttacaagaagaagtgtattggggcaagtcttgtttttctgaagggaaatgccaccggcctgctttcataggcattgataaagccaggaaggaaataaagtcacaaccaaatagtatacactgtctctactgaattcttctaattccttcgcaacagaagtctaaatcctgcttagcctaaacatatctatagccagcgatgggcaaattatatttgctgtcagcatgatagaataagaagcagaaaccccccagcagtggggtaagattgcgcgcttcatcccctcaaaatgcagctcagccccactccctctccatgcccatcaaacaactgcacaatcacttgttactgaatttcccattcagcgttttgtttctttctgtccatacttaaagaccaaatcatttgtttgctttgaagaaaaagcaaaaacaagaacaaaaacaccaaatcatttgaaatcactgtccattaaaaaaaatcaccagtggaactaaacagttgagtggtttgggatgtgttcgccatttctgtgtttgacctacatggcctgtaattctttggaccattgtaactgtgaactatggcttaatactgttaaagaccccaaggctccactctgtagccaggtgcacctcaggctgcacaaataccccaccagaatgtcacaatcattcattgctccagctactgagtgaacagggtgcaagacagcactggcttgggttgtatttttgcagccagttaactttgcatcaggtctacacagtccttgcagcctttgatttctccagttgtagagatttgaaatggggtgcccgggttgctctcgtttttccttcaagctacctagcatgcattttacacacattggaggagtcgtatgcactgtttttctgttgctgatggaggcaagcaggccttctaattagtctaagttaaacggatgggattcacttaagaaaagcaagaagaaaagcacacgaacaggtgtcttaatgcatttggatagtttctttgcggggtgtgtgtgtgtgtgtgtgtgtgtgtgtgtgtgtgtgtgtcttggtgaaggtgaggggctgtattttcaccaagccttttcataatcaagtttgctttgcaaaccttatggccttgcaccccgcagaacagtcccttcctaatagcagggatgctctgtcatggtttttctgtaaattatcgtgtgttgggaagttctgttgaggcttagtttgatcttccatggtggacacgtctgttctgtatgtaaaaggcattacaattgtgttttagcagatgagacttgaagcctttccacagtccttgtgctctgagatggctgttgagctctgctcaactgtcgtagctgaattctttctttgcgctgaacactgggcagcctcaccatgttgccaacgtgcttctggggcccctgtcactgccgctggatgccgcgcacacaggcagagtgccttggcaggtttgtgcaccccttggcgagccagaactgggaaccccgcggggtgaccccttctcatggggggtcggggaggggagtgcctatttttaatcctgtctgtttgttgcacaatggaaatcactgtgatttgtacatatgccctaggaaaattttactgctgtctaatttatgtaataatactgttgattccaggtttatttaataaaactttgtatcttttcagaaaaaaaaaaaaa

SEQ ID NO: 424 - DNA, 2400 bp, human
ggtctcactctgttgctgtcttcacggagagcaggagcagaggctttgagaagccagtgggccttggcctcagccctgccggcagagggtccccaccatgcagctgaagtgccagggtgcttgtgaagtctaagcccttgtctggcatttgtcaggaatataggcgcacacttaagcggcccgggcgggtaccgccgtcccgccatggctctgaggcgcgccctgcccgcgctgcgcccctgcattccccgcttcgtccagctgtccacggcgccggcctcccgcgagcagcccgcagcgggcccagcggccgtgccaggaggtgggtcggccacggcagtgcggccgccggtgcccgccgtggacttcggcaacgcgcaggaggcgtaccgcagccggcgaacctgggagctggcgcggagcctgctggtgctgcgcttgtgcgcctggcccgcgctgctggcgcgccacgagcagctgctgtatgtttccaggaaacttctaggacagaggctattcaacaagctcatgaagatgaccttctatgggcattttgtagccggggaggaccaggagtccatccagcccctgcttcggcactacagggccttcggtgtcagcgccatcctggactatggagtggaggaggacctgagccccgaggaggcagagcacaaggagatggagtcctgcacctcagctgcggagagggatggcagtggcacgaataagcgggacaagcaataccaggcccaccgggccttcggggaccgcaggaatggtgtcatcagtgcccgcacctacttctacgccaatgaggccaagtgcgacagccacatggagacattcttgcgctgcatcgaagcctcaggtagagtcagcgatgacggcttcatagccattaagctcacagcactggggagaccccagtttctgctgcagttctcagaggtgctggccaagtggaggtgcttctttcaccaaatggctgtggagcaagggcaggcgggcctggctgccatggacaccaagctggaggtggcggtgctgcaggaaagtgtcgcaaagttgggcatcgcatccagggctgagattgaggactggttcacggcagagaccctgggagtgtctggcaccatggacctgctggactggagcagcctcatcgacagcaggaccaagctgtccaagcacttggtagtccccaacgcacagacaggacagctggagcccctgctgtcccggttcactgaggaggaggagctacagatgaccaggatgctacagcggatggatgtcctggccaagaaagccacagagatgggcgtgcggctgatggtggatgccgagcagacctacttccagccggccatcagccgcctgacgctggagatgcagcggaagttcaatgtggagaagccgctcatcttcaacacataccagtgctacctcaaggatgcctatgacaatgtgaccctggacgtggagctggctcgccgtgagggctggtgttttggggccaagctggtgcggggcgcatacctggcccaggagcgagcccgtgcggcagagatcggctatgaggaccccatcaaccccacgtacgaggccaccaacgccatgtaccacaggtgcctggactacgtgttggaggagctgaagcacaacgccaaggccaaggtgatggtggcctcccacaatgaggacacagtgcgctttgcactgcgcaggatggaggagctgggcctgcatcctgctgaccaccgggtgtactttggacagctgctaggcatgtgtgaccagatcagcttcccgctgggccaggccggctaccccgtgtacaagtacgtgccctatggccccgtgatggaggtgctgccctacttgtcccgccgtgccctggagaacagcagcctcatgaagggcacccatcgggagcggcagctgctgtggctggagctcttgaggcggctccgaactggcaacctcttccatcgccctgcctagcacccgccagcacacccttagcctccagcaccccccgcccccgcccaggccatcaccacagctgcagccaaccccatcctcacacagattcaccttttttcaccccacacttgcagagctgctggaggtgaggtcaggtgcctcccagccctgcccagagtatgggcactcaggtgtgggccgaacctgatacctgcctgggacagccactggaaacttttgggaactctcctcgaatgtgtgggcccaaggcccccacctctgtgacccccatgtccttggacctagaggattgtccaccttctgccaaggccagcccacacagcccgagccccttggggagcagtggccgggctggggaggcctgcctggtcaataaaccactgttcctgc

SEQ ID NO: 425 - DNA, 2078 bp, human
gcaacgcaaagcgcttggtattgagtctgtggccgacttcggttccggtctctgcagcagccgtgatcgcttagtggagtgcttagggtagttggccaggatgccgaatatcaaaatcttcagcggcagctcccaccaggacttatctcagaaaattgctgaccgcctgggcctggagctaggcaaggtggtgactaagaaattcagcaaccaggagacctgtgtggaaattggtgaaagtgtacgtggagaggatgtctacattgttcagagtggttgtggcgaaatcaatgacaatttaatggagcttttgatcatgattaatgcctgcaagattgcttcagccagccgggttactgcagtcatcccatgcttcccttatgcccggcaggataagaaagataagagccgggcgccaatctcagccaagcttgttgcaaatatgctatctgtagcaggtgcagatcatattatcaccatggacctacatgcttctcaaattcagggcttttttgatatcccagtagacaatttgtatgcagagccggctgtcctaaagtggataagggagaatatctctgagtggaggaactgcactattgtctcacctgatgctggtggagctaagagagtgacctccattgcagacaggctgaatgtggactttgccttgattcacaaagaacggaagaaggccaatgaagtggaccgcatggtgcttgtgggagatgtgaaggatcgggtggccatccttgtggatgacatggctgacacttgtggcacaatctgccatgcagctgacaaacttctctcagctggcgccaccagagtttatgccatcttgactcatggaatcttctccggtcctgctatttctcgcatcaacaacgcatgctttgaggcagtagtagtcaccaataccatacctcaggaggacaagatgaagcattgctccaaaatacaggtgattgacatctctatgatccttgcagaagccatcaggagaactcacaatggagaatccgtttcttacctattcagccatgtccctttataatagagtaacttctgaggctttttgagaataaaatccaccccacccttgtttccccttggtatttgatgacaaattcagcagaagacccggcttgctccagtgtagctttctacatcccacatcaggtatattagagcttatccgaactggggaaagacggattgagattaactgctgggacctcctacctgcattatctcattctggcttccttgataattctgtgggccttgcagctttaactatagctcagctgctgcaagatttcagacttttgaggatgttgtgtgagggtgtttgactgtgactggggaagctcagactactttgtatgtgaatgcttcagggttttctttgttgagaacaactagcaacaaaggcaacccatgtgtgaccagttctccccaaggtctatgctaaattatagcaagagccctgggcaaccccaaacctagtcctggtagctgagcaccctgtaaggcaggagcaggcagctcagcttgagcagacattgggtggggggtggggggtggttgaggggggaggcagcacagtgcagcaaatgtttcttgggaggaagaagcctgatccatcaccatctgcttgactatgtagcttggattctcctttgtacctatccctttcgatttggctttaccttcatctatcttgatcctttcctggccaaatatcctcttgggcccaaatgaacattgtaccatagtcttctggaaagcaaacatgcttcctgctatgtaattgctaacattcatattagatgatgtgctgtagcttgatcttccttagcctactgccactgaggcagtaggttttaggtggtatcgtagtgccttttgattaatttaagtatttaattttcatcttccttctttggatctatttggcctctcaaatgaactgagattcctgttaaaaaagattgatgttattgtctcttgtagaggaaactaataaagtgtgtgtacctgtgtgaaaaaaaaaaaaaaaaaaaaaaaaaaaa

SEQ ID NO: 426 - DNA, 802 bp, human
accaccatgaatctacttctgatccttacctttgttgcagctgctgttgctgccccctttgatgatgatgacaagatcgttgggggctacatctgtgaggagaattctgtcccctaccaggtgtccttgaattctggctaccacttctgcggtggctccctcatcagcgaacagtgggtggtgtcagcaggtcactgctacaagtcccgcatccaggtgagactgggagagcacaacatcgaagtcctggaggggaatgaacagttcatcaatgcagccaagatcatccgccaccccaaatacaacagccggactctggacaatgacatcctgctgatcaagctctcctcacctgccgtcatcaattcccgcgtgtccgccatctctctgcccactgcccctccagctgctggcaccgagtccctcatctccggctggggcaacactctgagttctggtgccgactacccagacgagctgcagtgcctggatgctcctgtgctgagccaggctgagtgtgaagcctcctaccctggaaagattaccaacaacatgttctgtgtgggcttcctcgagggaggcaaggattcctgccagggtgattctggtggccctgtggtctccaatggagagctccaaggaattgtctcctggggctatggctgtgcccagaagaacaggcctggagtctacaccaaggtctacaactatgtggactggattaaggacaccatagctgccaacagctaaagcccctggtccctctgcagtctctataccaataaagtgaccctgctctcac

SEQ ID NO: 427 - DNA, 849 bp, human
acagttgctttgaggcagtaccggaggagaaagatggcggctaccttactagctgctcggggagccgggccagcaccggcttgggggccggaggcgttcactccagactgggaaagccgagaagtttccactgggaccactatcatggccgtgcagtttgacgggggcgtggttctgggggcggactccagaacaaccactgggtcctacatcgccaatcgagtgactgacaagctgacacctattcacgaccgcattttctgctgtcgctcaggctcagctgctgatacccaggcagtagctgatgctgtcacctaccagctcggtttccacagcattgaactgaatgagcctccactggtccacacagcagccagcctctttaaggagatgtgttaccgataccgggaagacctgatggcgggaatcatcatcgcaggctgggaccctcaagaaggagggcaggtgtactcagtgcctatggggggtatgatggtaaggcagtcctttgccattggaggctccgggagctcctacatctatggctatgttgatgctacctaccgggaaggcatgaccaaggaagagtgtctgcaattcactgccaatgctctcgctttggccatggagcgggatggctccagtggaggagtgatccgcctggcagccattgcagagtcaggggtagagcggcaagtacttttgggagaccagatacccaaattcgccgttgccactttaccacccgcctgaatcctgggattctagtatgcaataagagatgccctgtactgatgcaaaatttaataaagtttgtcacagagaaaaaaaaaaaaaaaaaaaaaaaaa

SEQ ID NO: 428 - DNA, 1583 bp, human
gattcgctgctccgcagcacggccggagctggtcgggtcaagagtcgggatttgtggggagaggttttccactggtcaagagaaggctttaagaaagacggtattaatctcccgttgcggctcccgcctggtcccatcttctgcccgctcctccaggaaatgaatctgctgccgaatattgagagtccagtgactcggcaggagaagatggcgaccgtgtgggatgaggccgagcaagatggaattggggaggaggtgctcaagatgtccacggaggagatcatccagcgcacacggctgctggacagtgagatcaagatcatgaagagtgaagtgttgagagtcacccatgagctccaagccatgaaggacaagataaaagagaacagtgagaaaatcaaagtgaacaagaccctgccgtaccttgtctccaacgtcatcgagctcctggatgttgatcctaatgaccaagaggaggatggtgccaatattgacctggactcccagaggaagggcaagtgtgctgtgatcaaaacctctacacgacagacgtacttccttcctgtgattgggttggtggatgctgaaaagctaaagccaggagacctggtgggtgtgaacaaagactcctatctgatcctggagacgctgcccacagagtatgactcgcgggtgaaggccatggaggtagacgagaggcccacggagcaatacagtgacattgggggtttggacaagcagatccaggagctggtggaggccattgtcttgccaatgaaccacaaggagaagtttgagaacttggggatccaacctccaaaaggggtgctgatgtatgggcccccagggacggggaagaccctcctggcccgggcctgtgccgcacagactaaggccaccttcctaaagctggctggcccccagctggtgcagatgttcattggagatggtgccaagctagtccgggatgcctttgccctggccaaggagaaagcgccctctatcatcttcattgatgagttggatgccatcggcaccaagcgctttgacagtgagaaggctggggaccgggaggtgcagaggacaatgctggagcttctgaaccagctggatggcttccagcccaacacccaagttaaggtaattgcagccacaaacagggtggacatcctggaccccgccctcctccgctcgggccgccttgaccgcaagatagagttcccgatgcccaatgaggaggcccgggccagaatcatgcagatccactcccgaaagatgaatgtcagtcctgacgtgaactacgaggagctggcccgctgcacagatgacttcaatggggcccagtgcaaggctgtgtgtgtggaggcgggcatgatcgcactgcgcaggggtgccacggagctcacccacgaggactacatggaaggcatcctggaggtgcaggccaagaagaaagccaacctacaatactacgcctagggcacacaggccagccccagtctcacggctgaagtgcgcaataaaagatggtttagggtccctgccaaaaaaaaaaaaaaaaaaaaaaaaaaaaaaaaaaaaaa

SEQ ID NO: 429 - DNA, 2142 bp, human
ggcgttggagctctttggggcccagctttgcggacccgggagctcgggacgcaggcggggcttgtgctccgcgggggcagggcgtagggtgggcctcctacctcccctgatctcgcggtttgttccgtttcattggagcttcccggaccgtgtgctcgacggtgccctaggtgccgtggggccacacgcgagtctgataagcaccctcccccggaatcatgcggtgctgtgaggcctagcgaagatgaagatagaatgcaaggtagaaagtgctggatacctttagaaagctgcaggactggtgcgatgggagttgagacgtaagaacctgcccgtccgtagggctctggatgctgctgaggcccgaggcccctatggcagatttgaaaattcacccttgtagagtcattcctgcctttgagcggactcccttttaagcagatctcaagagagcgttcggtggaggccctgggtctgcacagctcacctccctgggaactgctcgcccgagcgtcggagccggcgctggccccctgcagccggaaggttgcagccgcaggagccccggaggcccaggacacagggctcttgctcttgcagaatccacaggtctttcttgaggaaatctgtagacagaactttgtgctgcgtttttatctagggaaggaacagaagagtgtcgtctcctagaaatctagcactggagaaacgaggaaaattcttccagcgatggtctcccactcagagctgaggaagcttttctactcagcagatgctgtgtgttttgatgttgacagcacggtcatcagagaagaaggaatcgatgagctagccaaaatctgtggcgttgaggacgcggtgtcagaaatgacacggcgagccatgggcggggcagtgcctttcaaagctgctctcacagagcgcttagccctcatccagccctccagggagcaggtgcagagactcatagcagagcaacccccacacctgacccccggcataagggagctggtaagtcgcctacaggagcgaaatgttcaggttttcctaatatctggtggctttaggagtattgtagagcatgttgcttcaaagctcaatatcccagcaaccaatgtatttgccaataggctgaaattctactttaacggtgaatatgcaggttttgatgagacgcagccaacagctgaatctggtggaaaaggaaaagtgattaaacttttaaaggaaaaatttcattttaagaaaataatcatgattggagatggtgccacagatatggaagcctgtcctcctgctgatgctttcattggatttggaggaaatgtgatcaggcaacaagtcaaggataacgccaaatggtatatcactgattttgtagagctgctgggagaactggaagaataacatccattgtcgtacagctccaaacaacttcagatgaatttttacaagttatacagattgatactgtttgcttacagttgcctattacaacttgctatagaaagttggtacaaatgatctgtactttaaactacagttaggaatcctagaagattgctttttttttttttttaactgtagttccagtattatatgatgactattgatttcctggagaggttttttttttttttgagacagaatcttgctctgttgcccaggctggagtgcagtggcgcggtctcggctcactgcaagctctgcctcccaggttcacgccattctcctgcctcagcctcccgagtagctgggactacaggcacccgccaccacatccggctaattttttgtatttttagtagagacggggtttgaccgtgttagccaggatggtcttgatctcctgaccttgtgatccgcctgcctcagcctcccaaagtgctgggattacaggcttgggccaccgcgcccagccaatgtcctagagagttttgtgatctgaattctttatgtatatttgtagctatatttcatacaaagtgctttaagtgtggagagtcaattaaacacctttactcttagaaatacggattcggcagccttcagtgaatattggtttctctttggtatgtcaataaaagtttatccgtatgtcagaacggatttgtggaaaaaaaaaaaaaaaaaaaaaaaaaa

SEQ ID NO: 430 - DNA, 3413 bp, human
cctcccctcgcccggcgcggtcccgtccgcctctcgctcgcctcccgcctcccctcggtcttccgaggcgcccgggctcccggcgcggcggcggagggggcgggcaggccggcgggcggtgatgtggcgggactctttatgcgctgcggcaggatacgcgctcggcgctgggacgcgactgcgctcagttctctcctctcggaagctgcagccatgatggaagtttgagagttgagccgctgtgaggcgaggccgggctcaggcgagggagatgagagacggcggcggccgcggcccggagcccctctcagcgcctgtgagcagccgcgggggcagcgccctcggggagccggccggcctgcggcggcggcagcggcggcgtttctcgcctcctcttcgtcttttctaaccgtgcagcctcttcctcggcttctcctgaaagggaaggtggaagccgtgggctcgggcgggagccggctgaggcgcggcggcggcggcggcacctcccgctcctggagcgggggggagaagcggcggcggcggcggccgcggcggctgcagctccagggagggggtctgagtcgcctgtcaccatttccagggctgggaacgccggagagttggtctctccccttctactgcctccaacacggcggcggcggcggcggcacatccagggacccgggccggttttaaacctcccgtccgccgccgccgcaccccccgtggcccgggctccggaggccgccggcggaggcagccgttcggaggattattcgtcttctccccattccgctgccgccgctgccaggcctctggctgctgaggagaagcaggcccagtcgctgcaaccatccagcagccgccgcagcagccattacccggctgcggtccagagccaagcggcggcagagcgaggggcatcagctaccgccaagtccagagccatttccatcctgcagaagaagccccgccaccagcagcttctgccatctctctcctcctttttcttcagccacaggctcccagacatgacagccatcatcaaagagatcgttagcagaaacaaaaggagatatcaagaggatggattcgacttagacttgacctatatttatccaaacattattgctatgggatttcctgcagaaagacttgaaggcgtatacaggaacaatattgatgatgtagtaaggtttttggattcaaagcataaaaaccattacaagatatacaatctttgtgctgaaagacattatgacaccgccaaatttaattgcagagttgcacaatatccttttgaagaccataacccaccacagctagaacttatcaaacccttttgtgaagatcttgaccaatggctaagtgaagatgacaatcatgttgcagcaattcactgtaaagctggaaagggacgaactggtgtaatgatatgtgcatatttattacatcggggcaaatttttaaaggcacaagaggccctagatttctatggggaagtaaggaccagagacaaaaagggagtaactattcccagtcagaggcgctatgtgtattattatagctacctgttaaagaatcatctggattatagaccagtggcactgttgtttcacaagatgatgtttgaaactattccaatgttcagtggcggaacttatcctcagtttgtggtctgccagctaaaggtgaagatatattcctccaattcaggacccacacgacgggaagacaagttcatgtactttgagttccctcagccgttacctgtgtgtggtgatatcaaagtagagttcttccacaaacagaacaagatgctaaaaaaggacaaaatgtttcacttttgggtaaatacattcttcataccaggaccagaggaaacctcagaaaaagtagaaaatggaagtctatgtgatcaagaaatcgatagcatttgcagtatagagcgtgcagataatgacaaggaatatctagtacttactttaacaaaaaatgatcttgacaaagcaaataaagacaaagccaaccgatacttttctccaaattttaaggtgaagctgtacttcacaaaaacagtagaggagccgtcaaatccagaggctagcagttcaacttctgtaacaccagatgttagtgacaatgaacctgatcattatagatattctgacaccactgactctgatccagagaatgaaccttttgatgaagatcagcatacacaaattacaaaagtctgaatttttttttatcaagagggataaaacaccatgaaaataaacttgaataaactgaaaatggacctttttttttttaatggcaataggacattgtgtcagattaccagttataggaacaattctcttttcctgaccaatcttgttttaccctatacatccacagggttttgacacttgttgtccagttgaaaaaaggttgtgtagctgtgtcatgtatatacctttttgtgtcaaaaggacatttaaaattcaattaggattaataaagatggcactttcccgttttattccagttttataaaaagtggagacagactgatgtgtatacgtaggaattttttccttttgtgttctgtcaccaactgaagtggctaaagagctttgtgatatactggttcacatcctacccctttgcacttgtggcaacagataagtttgcagttggctaagagaggtttccgaagggttttgctacattctaatgcatgtattcgggttaggggaatggagggaatgctcagaaaggaaataattttatgctggactctggaccatataccatctccagctatttacacacacctttctttagcatgctacagttattaatctggacattcgaggaattggccgctgtcactgcttgttgtttgcgcatttttttttaaagcatattggtgctagaaaaggcagctaaaggaagtgaatctgtattggggtacaggaatgaaccttctgcaacatcttaagatccacaaatgaagggatataaaaataatgtcataggtaagaaacacagcaacaatgacttaaccatataaatgtggaggctatcaacaaagaatgggcttgaaacattataaaaattgacaatgatttattaaatatgttttctcaattgtaacgacttctccatctcctgtgtaatcaaggccagtgctaaaattcagatgctgttagtacctacatcagtcaacaacttacacttattttactagttttcaatcataatacctgctgtggatgcttcatgtgctgcctgcaagcttcttttttctcattaaatataaaatattttgtaatgctgcacagaaattttcaatttgagattctacagtaagcgttttttttctttgaagatttatgatgcacttattcaatagctgtcagccg

SEQ ID NO: 431 - DNA, 3314 bp, human
ggaggcaggcggtgccgcggcgccgggacccgactcatccggtgcttgcgtgtggtggtgagcgcagcgccgaggatgaggaggtgcaacagcggctccgggccgccgccgtcgctgctgctgctgctgctgtggctgctcgcggttcccggcgctaacgcggccccgcggtcggcgctctattcgccttccgacccgctgacgctgctgcaggcggacacggtgcgcggcgcggtgctgggctcccgcagcgcctgggccgtggagttcttcgcctcctggtgcggccactgcatcgccttcgccccgacgtggaaggcgctggccgaagacgtcaaagcctggaggccggccctgtatctcgccgccctggactgtgctgaggagaccaacagtgcagtctgcagagacttcaacatccctggcttcccgactgtgaggttcttcaaggcctttaccaagaacggctcgggagcagtatttccagtggctggtgctgacgtgcagacgctgcgggagaggctcattgacgccctggagtcccatcatgacacgtggcccccagcctgtcccccactggagcctgccaagctggaggagattgatggattctttgcgagaaataacgaagagtacctggctctgatctttgaaaagggaggctcctacctgggtagagaggtggctctggacctgtcccagcacaaaggcgtggcggtgcgcagggtgctgaacacagaggccaatgtggtgagaaagtttggtgtcaccgacttcccctcttgctacctgctgttccggaatggctctgtctcccgagtccccgtgctcatggaatccaggtccttctataccgcttacctgcagagactctctgggctcaccagggaggctgcccagaccacagttgcaccaaccactgctaacaagatagctcccactgtttggaaattggcagatcgctccaagatctacatggctgacctggaatctgcactgcactacatcctgcggatagaagtgggcaggttcccggtcctggaagggcagcgcctggtggccctgaaaaagtttgtggcagtgctggccaagtatttccctggccggcccttagtccagaacttcctgcactccgtgaatgaatggctcaagaggcagaagagaaataaaattccctacagtttctttaaaactgccctggacgacaggaaagagggtgccgttcttgccaagaaggtgaactggattggctgccaggggagtgagccgcatttccggggctttccctgctccctgtgggtcctcttccacttcttgactgtgcaggcagctcggcaaaatgtagaccactcacaggaagcagccaaggccaaggaggtcctcccagccatccgaggctacgtgcactacttcttcggctgccgagactgcgctagccacttcgagcagatggctgctgcctccatgcaccgggtggggagtcccaacgccgctgtcctctggctctggtctagccacaacagggtcaatgctcgccttgcaggtgcccccagcgaggacccccagttccccaaggtgcagtggccaccccgtgaactttgttctgcctgccacaatgaacgcctggatgtgcccgtgtgggacgtggaagccaccctcaacttcctcaaggcccacttctccccaagcaacatcatcctggacttccctgcagctgggtcagctgcccggagggatgtgcagaatgtggcagccgccccagagctggcgatgggagccctggagctggaaagccggaattcaactctggaccctgggaagcctgagatgatgaagtcccccacaaacaccaccccacatgtgccggctgagggacctgaggcaagtcgacccccgaagctgcaccctggcctcagagctgcaccaggccaggagcctcctgagcacatggcagagcttcagaggaatgagcaggagcagccgcttgggcagtggcacttgagcaagcgagacacaggggctgcattgctggctgagtccagggctgagaagaaccgcctctggggccctttggaggtcaggcgcgtgggccgcagctccaagcagctggtcgacatccctgagggccagctggaggcccgagctggacggggccgaggccagtggctgcaggtgctgggagggggcttctcttacctggacatcagcctctgtgtggggctctattccctgtccttcatgggcctgctggccatgtacacctacttccaggccaagataagggccctgaagggccatgctggccaccctgcagcctgaaccacctggggaggaggcgggagagggagctgccatctctaggcacctcaagccccctgaccccattccctcccctcccaccccttgctccttgtctggcctagaagtgtgggaaattcaggaaaacgagttgctccagtgaagcttcttggggttgctaggacagagagctcctttgacacaaaagacaggagcagggtccaggttcccctgctgtgcagggagggcagccccgggcagtgggcatagggcagctcagtccctggcctcttagcaccacattcctgtttttcagcttatttgaagtcctgcctcattctcactggagcctcagtctctcctgcttggtcttggccctcaactggggcaagtgaagccagaggagggtcccccagctgggtgggctggaatggaactcctcactagctgctggggctccgcccaccctgctcccttccggacaatgaagaagcctttgcaccctgggaggaaggaccaccccgggccctctatgcctggccagcctccagctcctcagacctcctgggtggggtttggcttcagggtggggtttggaagcttctggaagtcgtgctggtctcccaggtgaggcaagccatggttgctgggctgtagggtgagtggcttgcttggtgggacctgacgagttggtggcatgggaaggatgtgggtctctagtgccttgccctggcttagctgcaggagaagatggctgctttcacttccccccattgagctctgctccctctgagcctggtcttttgtccttttttattttggtctccaagatgaatgctcatctttggagggtgccaggtagaagctagggaggggagtgtcttctctctccaggtttcaccttccagtgtgcagaagttagaagggtctggcgggggcagtgccttacacatgcttgattcccacgctaccccctgccttgggaggtgtgtggaataaattatttttgttaaggc

SEQ ID NO: 432 - DNA, 3318 bp, human
gtgatgcgtagttccggctgccggttgacatgaagaagcagcagcggctagggcggcggtagctgcaggggtcggggattgcagcgggcctcggggctaagagcgcgacgcggcctagagcggcagacggcgcagtgggccgagaaggaggcgcagcagccgccctggcccgtcatggagatggaaaaggagttcgagcagatcgacaagtccgggagctgggcggccatttaccaggatatccgacatgaagccagtgacttcccatgtagagtggccaagcttcctaagaacaaaaaccgaaataggtacagagacgtcagtccctttgaccatagtcggattaaactacatcaagaagataatgactatatcaacgctagtttgataaaaatggaagaagcccaaaggagttacattcttacccagggccctttgcctaacacatgcggtcacttttgggagatggtgtgggagcagaaaagcaggggtgtcgtcatgctcaacagagtgatggagaaaggttcgttaaaatgcgcacaatactggccacaaaaagaagaaaaagagatgatctttgaagacacaaatttgaaattaacattgatctctgaagatatcaagtcatattatacagtgcgacagctagaattggaaaaccttacaacccaagaaactcgagagatcttacatttccactataccacatggcctgactttggagtccctgaatcaccagcctcattcttgaactttcttttcaaagtccgagagtcagggtcactcagcccggagcacgggcccgttgtggtgcactgcagtgcaggcatcggcaggtctggaaccttctgtctggctgatacctgcctcttgctgatggacaagaggaaagacccttcttccgttgatatcaagaaagtgctgttagaaatgaggaagtttcggatggggctgatccagacagccgaccagctgcgcttctcctacctggctgtgatcgaaggtgccaaattcatcatgggggactcttccgtgcaggatcagtggaaggagctttcccacgaggacctggagcccccacccgagcatatccccccacctccccggccacccaaacgaatcctggagccacacaatgggaaatgcagggagttcttcccaaatcaccagtgggtgaaggaagagacccaggaggataaagactgccccatcaaggaagaaaaaggaagccccttaaatgccgcaccctacggcatcgaaagcatgagtcaagacactgaagttagaagtcgggtcgtggggggaagtcttcgaggtgcccaggctgcctccccagccaaaggggagccgtcactgcccgagaaggacgaggaccatgcactgagttactggaagcccttcctggtcaacatgtgcgtggctacggtcctcacggccggcgcttacctctgctacaggttcctgttcaacagcaacacatagcctgaccctcctccactccacctccacccactgtccgcctctgcccgcagagcccacgcccgactagcaggcatgccgcggtaggtaagggccgccggaccgcgtagagagccgggccccggacggacgttggttctgcactaaaacccatcttccccggatgtgtgtctcacccctcatccttttactttttgccccttccactttgagtaccaaatccacaagccattttttgaggagagtgaaagagagtaccatgctggcggcgcagagggaaggggcctacacccgtcttggggctcgccccacccagggctccctcctggagcatcccaggcgggcggcacgccaacagccccccccttgaatctgcagggagcaactctccactccatatttatttaaacaattttttccccaaaggcatccatagtgcactagcattttcttgaaccaataatgtattaaaattttttgatgtcagccttgcatcaagggctttatcaaaaagtacaataataaatcctcaggtagtactgggaatggaaggctttgccatgggcctgctgcgtcagaccagtactgggaaggaggacggttgtaagcagttgttatttagtgatattgtgggtaacgtgagaagatagaacaatgctataatatataatgaacacgtgggtatttaataagaaacatgatgtgagattactttgtcccgcttattctcctccctgttatctgctagatctagttctcaatcactgctcccccgtgtgtattagaatgcatgtaaggtcttcttgtgtcctgatgaaaaatatgtgcttgaaatgagaaactttgatctctgcttactaatgtgccccatgtccaagtccaacctgcctgtgcatgacctgatcattacatggctgtggttcctaagcctgttgctgaagtcattgtcgctcagcaatagggtgcagttttccaggaataggcatttgcctaattcctggcatgacactctagtgacttcctggtgaggcccagcctgtcctggtacagcagggtcttgctgtaactcagacattccaagggtatgggaagccatattcacacctcacgctctggacatgatttagggaagcagggacaccccccgccccccacctttgggatcagcctccgccattccaagtcaacactcttcttgagcagaccgtgatttggaagagaggcacctgctggaaaccacacttcttgaaacagcctgggtgacggtcctttaggcagcctgccgccgtctctgtcccggttcaccttgccgagagaggcgcgtctgccccaccctcaaaccctgtggggcctgatggtgctcacgactcttcctgcaaagggaactgaagacctccacattaagtggctttttaacatgaaaaacacggcagctgtagctcccgagctactctcttgccagcattttcacattttgcctttctcgtggtagaagccagtacagagaaattctgtggtgggaacattcgaggtgtcaccctgcagagctatggtgaggtgtggataaggcttaggtgccaggctgtaagcattctgagctgggcttgttgtttttaagtcctgtatatgtatgtagtagtttgggtgtgtatatatagtagcatttcaaaatggacgtactggtttaacctcctatccttggagagcagctggctctccaccttgttacacattatgttagagaggtagcgagctgctctgctatatgccttaagccaatatttactcatcaggtcattattttttacaatggccatggaataaaccatttttacaaaa

SEQ ID NO: 433 - DNA, 4089 bp, human
ccttcgcccctcctccgccagtcactggaatcaattccgtggggaatcggctccgccgccgcgaaggacagcctttccgcgcgggactccggggcgccacgggggccatgtaagcagctatcttccagagggccacactgggcatggacacccttttccctgcctggaggagcacaggtgatagtgtaattttccagtcacgaaactgctaaggccatctcaggggcgtgtgcgccaggataggcaggcggcgtccgaggaccacatagccatgccttttggtctgaagctccgccggacacggcgctacaacgtcctgagcaagaactgctttgtcacacggattcgcctgctggacagcaatgttatcgagtgcacgctgtcggtggaaagcacagggcaagaatgcctggaggctgtggcccagaggctggagctgcgagagacgcactactttggcctttggtttctcagcaagagccagcaagcacgatgggtggagctggagaaacctctgaagaaacatctggacaaattcgctaatgagcctttgcttttctttggagtcatgttctatgtgccaaatgtgtcatggcttcagcaagaggccacaagatatcagtattacctgcaagtcaaaaaagatgtgcttgaagggcgattacgatgtacattggaccaggtgattcggctagccggcctagctgtgcaagctgattttggagactataatcagtttgattctcaagatttcctcagagagtatgtgctatttcctatggatttggccctggaagaggctgttctggaggagctgacccagaaggtagcccaagaacacaaagcccacagtggaatcctgccagcagaagctgaactgatgtacatcaatgaagttgaacgtttggatggatttggacaggaaatcttccctgtaaaggacaatcatggaaactgtgtacaccttggcattttctttatggggattttcgtgaggaacagaattggaagacaagcggtaatatacaggtggaatgacatggggaatatcactcataacaagtcgaccattctagtggagctcatcaacaaagaagagactgccctctttcacacggatgatatcgaaaatgccaagtatatttctcggttgtttgccacacgacacaagttttacaaacaaaacaaaatctgcactgaacagtcaaattctccaccccccatcagacgccagcccacctggagccgatcctctctgcccaggcagcagccgtacatcctgcctcccgttcacgtccagtgtggtgagcactactcggaaacgcacacctcgcaagacagcatttttcatgggaatgaagaagccttgtattgcaactctcacaacagcctggacttaaattatttaaatggcactgtcaccaatggcagcgtgtgtagcgttcacagcgtcaactccctcaactgctcgcaaagtttcatccaggcctcccctgtatcctccaacctcagtatccctgggagtgacatcatgcgggccgactacatcccgagccaccggcacagcgcgatcatcgtgccctcgtacaggccaacccccgattatgagacagtcatgcgccagatgaagagggggatcctgcatacagacagccagagccagtctctgagaaacctcaacattatcaacacccatgcctacaaccagccagaggatctggtgtacagccaaccggagatgcgggagaggcacccctacactgtcccttatgggccacagggggtctacagcaacaaacttgtcagtccatctgaccagaggaacccaaagaataatgtggtaccaagcaagccgggggcaagcgccatctcgcacacggtgagcaccccagagctggccaacatgcagctgcagggcagccataactacagcacggcccacatgcttaagaactatctcttcaggccaccgcccccctacccacggccacgacctgccaccagcaccccagacctggccagccaccgccacaagtacgtcagcggcagcagcccggacctggtgacccggaaggtgcagctctcggtgaagaccttccaagaggacagctctccggtggttcatcagtctctccaggaggtgagcgagcccctcacggccaccaagcaccacggcactgtgaacaagcgccacagcctggaggtgatgaacagcatggtgcggggcatggaggccatgacgctcaagtcgctccacctccccatggctcgccgcaacacgctccgggagcagggaccgcccgaggaggggtcaggcagccacgaggtcccccagctccctcagtatcaccacaagaagaccttctctgatgccactatgctaatccacagcagcgagagtgaggaggaggaggaggaggctccagaatcggtgccccagatccccatgctccgggagaagatggagtacagtgcccagctgcaggcggccctggcccgcatccccaacaagcccccgcctgagtaccccggtccaaggaagagtgtgagcaatggggctctgaggcaggaccaagccagccttcctcccgccatggccagagccagggtgctgaggcatgggccagccaaggccatcagcatgtctcggactgacccgccggctgtcaacggggcctctctcggcccatccatctcggaacccgacctgactagtgtgaaggagcgggtcaaaaaagagcctgtgaaggagagacctgtgtctgaaatgttttccctggaagacagcattatagagagagagatgatgatcaggaatctagagaagcagaagatggcaggcctggaggcacagaagaggccgctgatgttggcagcattgaatgggctctcggtggctcgagtctcagggcgggaagagaatcgagttgatgccacccgggttcccatggacgagaggttcagaaccctgaagaagaaactagaagagggaatggtgttcacagaatatgagcaaattccaaagaaaaaggcgaatggcattttcagcacagcagctctgccagaaaacgccgagcgcagccgaatccgtgaagttgtcccctatgaggagaatcgagtagagctgataccaaccaaagaaaataacacaggatacattaatgcctcccacatcaaggtggtggttggcggggcagaatggcactacatagccacccaggggcccctgccacacacgtgccacgacttctggcagatggtgtgggagcagggagtgaatgtgattgccatggtcactgcagaggaggagggtggacgaaccaaaagccaccgatactggcccaaactaggttcaaagcacagctcagccacctatggcaagttcaaggtcaccacgaagtttcgaacggattctgtttgctatgcaaccacgggcttgaaggtcaagcaccttttgtctgggcaagaaaggacggtgtggcatttacaatatactgactggccagatcacggctgtccagaagatgtccaaggatttttatcctacttggaggagatccagtcggtccgtcgccataccaacagcatgctggaaggcaccaagaaccggcacccgcccatcgtggtccactgtagtgctggggtgggaaggaccggcgtgctcattctttctgagctgatgatctactgcttggaacataacgaaaaggtggaagtgcccatgatgctgaggctcctcagggagcagaggatgttcatgatccagactatcgctcagtacaagtttgtctaccaagtcctcatccagttcctccaaaactccagactcatttaatcaccccaatccagctcctggaggagggacccagctccatcgcgctggaggagagtcacctccagacaacatctgctccccccacaggggtgcaggtggctggcagcaaacaggctctctgaagacagtagccaagattattcacacataccatgtattattttatatgagataatttatttttttcccctttggaataacttttgtgaattattataatgcagtttccctagtaatatagtacttttcatttg

SEQ ID NO: 434 - DNA, 5787 bp, human
atgttacttcctgtatggaggcatggccagtttccagcgccgcgctcttcgttccttcccagcctgcgccggagccacaactttcaggagcatggactgaaggcgccctcgccccagcgcccctctgagatcctttgtgttttcctccgtttcctccggccgtttctattttggggggctctccgctccccctgcctctcccctccccttcccctctcgcaaacatgcctccttccttcccggggccctggaaggagctgcctgcctgaagcccggagacgccgcgccgcgctcagccccgccgccgcccgccggctctcgggctgtgctgcgctgccgactcaagttggggatcctcggctgctcgccgccgccgcccgcggtccctgtctgccccaggcccggggcatcgccgccggccgccgactccgcgccctgcccgatcggctctctcctttttaaacggaaagcagcctttctccgccgagaggatcgtccccagcgtggctctgcgttcccggtcactttttgagattttccggggggcgctcggcggcttcccggattccaaggggactcgggccgccgagcgcggggggcccgtggagcgggcgagccggggaagcgccccggcttagcggaggctcgcacggaggcaagaacttattcaacaagtttacctccctgctttcctcttttcgatgtgcgttttcggacatgcggaggttactggaaccgtgttggtggattttgttcctgaaaatcaccagttccgtgctccattatgtcgtgtgcttccccgcgttgacagaaggctacgttggggccctgcacgagaatagacacggcagcgcagtgcagatccgcaggcgcaaggcttcaggcgacccgtactgggcctactctggtgcctatggtcctgagcactgggtcacgtctagtgtcagctgtgggagccgtcaccagtctcctattgacattttagaccagtatgcgcgtgttggggaagaataccaggaactgcaactcgatggcttcgacaatgagtcttctaacaaaacctggatgaaaaacacagggaaaacagtcgccatccttctgaaagacgactattttgtcagtggagctggtctacctggcagattcaaagctgagaaggtggaatttcactggggccacagcaatggctcagcgggctctgaacacagcatcaatggcaggaggtttcctgttgagatgcagattttcttttacaatccagatgactttgacagctttcaaaccgcaatttctgagaacagaataatcggagccatggccatattttttcaagtcagtccgagggacaattctgcactggatcctattatccacgggttgaagggtgtcgtacatcatgagaaggagacctttctggatcctttcgtcctccgggacctcctgcctgcatccctgggcagctattatcggtacacaggttccttgaccacaccaccgtgtagcgaaatagtggagtggatagtcttccggagacccgtccccatctcttaccatcagcttgaggctttttattccatcttcaccacggagcagcaagaccatgtcaagtcggtggagtatctgagaaataactttcgaccacagcagcgtctgcatgacagggtggtgtccaagtccgccgtccgtgactcctggaaccacgacatgacagacttcttagaaaacccactggggacagaagcctctaaagtttgcagctctccacccatccacatgaaggtgcagcctctgaaccagacggcactgcaggtgtcctggagccagccggagactatctaccacccacccatcatgaactacatgatctcctacagctggaccaagaatgaggacgagaaggagaagacgtttacaaaggacagcgacaaagacttgaaagccaccattagccatgtctcacccgatagcctttacctgttccgagtccaggccgtgtgtcggaacgacatgcgcagcgactttagccagacgatgctgtttcaagctaataccactcgaatattccaagggaccagaatagtgaaaacaggagtgcccacagcgtctcctgcctcttcagccgacatggcccccatcagctcggggtcttctacctggacgtcctctggcatcccattctcatttgtttccatggcaactgggatgggcccctcctccagtggcagccaggccacagtggcctcggtggtcaccagcacgctgctcgccggcctggggttcggcggtggtggcatctcctctttccccagcactgtgtggcccacgcgcctcccgacggccgcctcagccagcaagcaggcggctaggccagtcctagccaccacagaggccttggcttctccagggcccgatggtgattcgtcaccaaccaaggacggcgagggcaccgaggaaggagagaaggatgagaaaagcgagagtgaggatggggagcgggagcacgaggaggatggagagaaggactccgaaaagaaggagaagagtggggtgacccacgctgccgaggagcggaatcagacggagcccagccccacaccctcgtctcctaacaggactgccgagggagggcatcagactatacctgggcatgagcaggatcacactgccgtccccacagaccagacgggcggaaggagggatgccggcccaggcctggaccccgacatggtcacctccacccaagtgccccccaccgccacagaggagcagtatgcagggagtgatcccaagaggcccgaaatgccatctaaaaagcctatgtcccgcggggaccgattttctgaagacagcagatttatcactgttaatccagcggaaaaaaacacctctggaatgataagccgccctgctccagggaggatggagtggatcatccctctgattgtggtatcagccttgaccttcgtgtgcctcatccttctcattgctgtgctcgtttactggagagggtgtaacaaaataaagtccaagggctttcccagacgtttccgtgaagtgccttcttctggggagagaggagagaaggggagcagaaaatgttttcagactgctcatttctatgtggaagacagcagttcacctcgagtggtccctaatgaaagtattcctattattcctattccggatgacatggaagccattcctgtcaaacagtttgtcaaacacatcggtgagctctattctaataaccagcatgggttctctgaggattttgaggaagtccagcgctgtactgctgatatgaacatcactgcagagcattccaatcatccagaaaacaagcacaaaaacagatacatcaacattttagcatatgatcacagtagggtgaagttaagacctttaccaggaaaagactctaagcacagcgactacattaatgcaaactatgttgatggttacaacaaagcaaaagcctacattgccacccaaggacctttgaagtctacatttgaagatttctggaggatgatttgggaacaaaacactggaatcattgtgatgattacgaaccttgtggaaaaaggaagacgaaaatgtgatcagtattggccaacagagaacagtgaggaatatggaaacattattgtcacgctgaagagcacaaaaatacatgcctgctacactgttcgtcgtttttcaatcagaaatacaaaagtgaaaaagggtcagaagggaaatcccaagggtcgtcagaatgaaagggtagtgatccagtatcactatacacagtggcctgacatgggagttcccgagtatgcccttccagtactgactttcgtgaggagatcctcagcagctcggatgccagaaacgggccctgtgttggtgcactgcagtgctggtgtgggcagaacaggcacctatattgtaatagacagcatgctgcaacagataaaagacaaaagcacagttaacgtcctgggattcctgaagcatatcaggacacagcgtaactacctcgtccagactgaggagcagtacattttcatccatgatgccttgttggaagccattcttggaaaggagactgaagtatcttcaaatcagctgcacagctatgttaacagcatccttataccaggagtaggaggaaagacacgactggaaaagcaattcaagctggtcacacagtgtaatgcaaaatatgtggaatgtttcagtgctcagaaagagtgtaacaaagaaaagaacagaaactcttcagttgtgccatctgagcgtgctcgagtgggtcttgcaccattgcctggaatgaaaggaacagattacattaatgcttcttatatcatgggctattataggagcaatgaatttattataactcagcatcctctgccacatactacgaaagatttctggcgaatgatttgggatcataacgcacagatcattgtcatgctgccagacaaccagagcttggcagaagatgagtttgtgtactggccaagtcgagaagaatccatgaactgtgaggcctttaccgtcacccttatcagcaaagacagactgtgcctctctaatgaagaacaaattatcatccatgactttatccttgaagctacacaggatgactatgtcttagaagttcggcactttcagtgtcccaaatggcctaacccagatgcccccataagtagtacctttgaacttatcaacgtcatcaaggaagaggccttaacaagggatggtcccaccattgttcatgatgagtatggagcagtttcagcaggaatgttatgtgcccttaccaccctgtcccagcaactggagaatgaaaatgctgtggatgttttccaggttgcaaaaatgatcaatcttatgaggcctggagtattcacagacattgaacaataccagttcatctataaagcaaggcttagcttggtcagcactaaagaaaatggaaatggtcccatgacagtagacaaaaatggtgctgttcttattgcagatgaatcagaccctgctgagagcatggagtccctagtgtgactggaatcctgaaagggcacttaatttgtaaacttctgaagactgagaacttttttgaggccttttttgccagactctaggttatacaataacccagttacttttttacactgataaaagttttgatatttattttttgccattttatgtcttaatggtatcctactgagcatttgcacctctgttcatttcacacagtgaaacgcaattttacctagtttgcactatatgatcagtgttactgcctataatcttatacaacagcaaaccctgatgtgacattccatgacgacatacatgctacttttttttagttcaatacagtgaaggtctttgttatgacagtgaatattgcttttattattattattgctgaagtggttgcattctactagcaggcaatgctgtacttttcttcagtcctcctctcctttttattttaggcactgttcaatactgtatgccttctgtattttaatggagtggatagcattgttttcttttacagactagcaggctactgggacctaaaaaggtctgttaatgtcatggccttgaaacagttccatttatgctggttaagagatcccttaagaagttagaaggcttaagaactgcttcatgtgaacatcccttattagttacaaagttatattcacagttttttaaaaatgtgtcaaaataaaggataactctgtattacagctttcccagtaaaaaaaaaaaaaaaaa

SEQ ID NO: 435 - DNA, 4767 bp, human
gcctcccgccgcctcccgcgcggccatggactgagcgccgccggccaggccgcggggatggggccgccgctcccgctgctgctgctgctactgctgctgctgccgccacgcgtcctgcctgccgccccttcgtccgtcccccgcggccggcagctcccggggcgtctgggctgcctgctcgaggagggcctctgcggagcgtccgaggcctgtgtgaacgatggagtgtttggaaggtgccagaaggttccggcaatggacttttaccgctacgaggtgtcgcccgtggccctgcagcgcctgcgcgtggcgttgcagaagctttccggcacaggtttcacgtggcaggatgactatactcagtatgtgatggaccaggaacttgcagacctcccgaaaacctacctgaggcgtcctgaagcatccagcccagccaggccctcaaaacacagcgttggcagcgagaggaggtacagtcgggagggcggtgctgccctggccaacgccctccgacgccacctgcccttcctggaggccctgtcccaggccccagcctcagacgtgctcgccaggacccatacggcgcaggacagaccccccgctgagggtgatgaccgcttctccgagagcatcctgacctatgtggcccacacgtctgcgctgacctaccctcccgggccccggacccagctccgcgaggacctcctgccgcggaccctcggccagctccagccagatgagctcagccctaaggtggacagtggtgtggacagacaccatctgatggcggccctcagtgcctatgctgcccagaggcccccagctccccccggggagggcagcctggagccacagtaccttctgcgtgcaccctcaagaatgcccaggcctttgctggcaccagccgccccccagaagtggccttcacctctgggagattccgaagacccctccagcacaggcgatggagcacggattcataccctcctgaaggacctgcagaggcagccggctgaggtgaggggcctgagtggcctggagctggacggcatggctgagctgatggctggcctgatgcaaggcgtggaccatggagtagctcgaggcagccctgggagagcggccctgggagagtctggagaacaggcggatggccccaaggccaccctccgtggagacagctttccagatgacggagtgcaggacgacgatgatagactttaccaagaggtccatcgtctgagtgccacactcgggggcctcctgcaggaccacgggtctcgactcttacctggagccctcccctttgcaaggcccctcgacatggagaggaagaagtccgagcaccctgagtcttccctgtcttcagaagaggagactgccggagtggagaacgtcaagagccagacgtattccaaagatctgctggggcagcagccgcattcggagcccggggccgctgcgtttggggagctccaaaaccagatgcctgggccctcgaaggaggagcagagccttccagcgggtgctcaggaggccctcagcgacggcctgcaattggaggtccagccttccgaggaagaggcgcggggctacatcgtgacagacagagaccccctgcgccccgaggaaggaaggcggctggtggaggacgtcgcccgcctcctgcaggtgcccagcagtgcgttcgctgacgtggaggttctcggaccagcagtgaccttcaaagtgagcgccaatgtccaaaacgtgaccactgaggatgtggagaaggccacagttgacaacaaagacaaactggaggaaacctctggactgaaaattcttcaaaccggagtcgggtcgaaaagcaaactcaagttcctgcctcctcaggcggagcaagaagactccaccaagttcatcgcgctcaccctggtctccctcgcctgcatcctgggcgtcctcctggcctctggcctcatctactgcctccgccatagctctcagcacaggctgaaggagaagctctcgggactagggggcgacccaggtgcagatgccactgccgcctaccaggagctgtgccgccagcgtatggccacgcggccaccagaccgacctgagggcccgcacacgtcacgcatcagcagcgtctcatcccagttcagcgacgggccgatccccagcccctccgcacgcagcagcgcctcatcctggtccgaggagcctgtgcagtccaacatggacatctccaccggccacatgatcctgtcctacatggaggaccacctgaagaacaagaaccggctggagaaggagtgggaagcgctgtgcgcctaccaggcggagcccaacagctcgttcgtggcccagagggaggagaacgtgcccaagaaccgctccctggctgtgctgacctatgaccactcccgggtcctgctgaaggcggagaacagccacagccactcagactacatcaacgctagccccatcatggatcacgacccgaggaaccccgcgtacatcgccacccagggaccgctgcccgccaccgtggctgacttttggcagatggtgtgggagagcggctgcgtggtgatcgtcatgctgacacccctcgcggagaacggcgtccggcagtgctaccactactggccggatgaaggctccaatctctaccacatctatgaggtgaacctggtctccgagcacatctggtgtgaggacttcctggtgaggagcttctatctgaagaacctgcagaccaacgagacgcgcaccgtgacgcagttccacttcctgagttggtatgaccgaggagtcccttcctcctcaaggtccctcctggacttccgcagaaaagtaaacaagtgctacaggggccgttcttgtccaataattgttcattgcagtgacggtgcaggccggagcggcacctacgtcctgatcgacatggttctcaacaagatggccaaaggtgctaaagagattgatatcgcagcgaccctggagcacttgagggaccagagacccggcatggtccagacgaaggagcagtttgagttcgcgctgacagccgtggctgaggaggtgaacgccatcctcaaggcccttccccagtgagcggcagcctcaggggcctcaggggagcccccaccccacggatgttgtcaggaatcatgatctgactttaattgtgtgtcttctattataactgcatagtaatagggcccttagctctcccgtagtcagcgcagtttagcagttaaaagtgtatttttgtttaatcaaacaataataaagagagatttgtggaaaaatccagttacgggtggaggggaatcggttcatcaattttcacttgcttaaaaaaaatactttttcttaaagcacccgttcaccttcttggttgaagttgtgttaacaatgcagtagccagcacgttcgaggcggtttccaggaagagtgtgcttgtcatctgccactttcgggagggtggatccactgtgcaggagtggccggggaagctggcagcactcagtgaggccgcccggcacacaaggcacgtttggcatttctctttgagagagtttatcattgggagaagccgcggggacagaactgaacgtcctgcagcttcggggcaagtgagacaatcacagctcctcgctgcgtctccatcaacactgcgccgggtaccatggacggccccgtcagccacacctgtcagcccaagcagagtgattcaggggctccccgggggcagacacctgtgcaccccatgagtagtgcccacttgaggctggcactcccctgacctcacctttgcaaagttacagatgcaccccaacattgagatgtgtttttaatgttaaaatattgatttctacgttatgaaaacagatgcccccgtgaatgcttacctgtgagataaccacaaccaggaagaacaaatctgggcattgagcaagctatgagggtccccgggagcacacgaaccctgccaggcccccgctggctcctccaggcacgtcccggacctgtggggccccagagaggggacatttccctcctgggagagaaggagatcagggcaactcggagagggctgcgagcatttccctcccgggagaggagatcagggcgacctgcacgcactgcgtagagcctggaagggaagtgagaaaccagccgaccggccctgcccctcttcccgggatcacttaatgaaccacgtgttttgacatcatgtaaacctaagcacgtagagatgattcggatttgacaaaataacatttgagtatccgattcgccatcaccccctaccccagaaataggacaattcacttcattgaccaggatgatcacatggaaggcggcgcagaggcagctgtgtgggctgcagatttcctgtgtggggttcagcgtagaaaacgcacctccatcccgcccttcccacagcattcctccatcttagatagatggtactctccaaaggccctaccagagggaacacggcctactgagcggacagaatgatgccaaaatattgcttatgtctctacatggtattgtaatgaatatctgctttaatatagctatcatttcttttccaaaattacttctctctatctggaatttaattaatcgaaatgaatttatctgaatataggaagcatatgcctacttgtaatttctaactccttatgtttgaagagaaacctccggtgtgagatatacaaatatatttaattgtgtcatattaaacttctgattcaaaaaaaa

SEQ ID NO: 436 - DNA, 3423 bp, human
cggctcgctggtaccggcagtgccatggcggccttcagcaagtacttgacggcgcggaactcctcgctggctggtgccgcgttcctgctgctctgcctgctccacaagcggcgccgcgccctcggcctgcacggtaagaaaagtggaaaaccaccattacagaacaatgagaaagaggggaaaaaagagcgagctgtggtggacaaggtgtttttctcaaggctcatacagattctgaaaatcatggtccctagaacattttgtaaagagacaggttacttggtacttattgctgttatgctggtgtctcgaacatattgtgatgtttggatgattcaaaatgggacactaattgaaagtggtatcattggtcgtagcaggaaagatttcaagagatacttactcaacttcatcgctgccatgcctcttatctctctggttaataacttcttgaagtatgggttaaatgagcttaaactgtgcttccgagtaaggctcactaaatacctctatgaggagtatcttcaagctttcacatattataaaatggggaatctggacaacagaatagctaatccagaccagctgcttacacaagatgtagaaaaattttgtaacagtgtagtcgatctgtattcaaatcttagtaagccatttttagacatagttttgtatatctttaagttaacgagtgcaattggagctcagggcccagcgagcatgatggcctacttggttgtttctgggctattcctaactcgacttcgaagacccattggtaagatgacaataactgagcaaaagtatgaaggagaatatagatatgttaattctcggctcatcacaaacagtgaagaaattgccttttacaatgggaataaaagagaaaagcagacagtccactcagtcttccgaaaactggtggaacacctacataatttcattttgtttcggttttcaatgggcttcattgatagtattattgccaaataccttgccactgttgttggttacctagttgtcagtcgccctttcttagatttgtctcatcctcgacatctcaagagtacacattcggaacttctagaggattactaccaaagtggaagaatgcttttgcgaatgtctcaagctctgggtcgaatagttttggctgggcgtgaaatgactagattggccggttttactgctcggattacagaattaatgcaagtactgaaggatttaaatcatggcaaatatgagcgcacaatggtctcacaacaggaaaagggtattgaaggagtacaagtcattcccttgatacctggtgctggagaaatcattattgcagataacattataaagtttgatcatgttcctttagcaacgccaaatggagatgttttgatccgagaccttaattttgaagttcgatctggggctaatgttctaatttgtggtccaaatggctgcggaaagagttcacttttccgtgttcttggtgaattatggcctctttttggaggacgtctaactaaacctgaaagaggaaaattattttatgttcctcagagaccttacatgacccttggaacacttcgagatcaagtgatatatccagatggacgagaagatcagaaaaggaagggaatttctgacctagtactgaaggaatacttagacaatgtccagttgggtcatatccttgaacgtgaaggaggctgggacagtgttcaggattggatggacgtactcagtggtggagaaaagcaaagaatggcgatggcaagattattttatcataaaccccagtttgccattttggatgaatgcacaagtgcagttagtgtcgacgtggaaggctacatttatagtcattgtcgaaaggttggcatcactctcttcactgtgtctcataggaaatctctttggaaacatcatgagtactacctgcatatggatggcagaggcaactatgaattcaaacagataacagaagatacagttgagtttggctcttagagaaatctggagaactatacctgcttcagtgaaataattacagaatatacttagaaaggcaaagtacattgtaaaataaagttgagcttagttttttttaaaaaaaaaaaacaaagcaacaaattaactagatacagaataatggagaacaagttgttaaaacatttaatattatataggatattgctaattgtgtatatgttggtttaattaataatatgtactaagaatgtccttattcttgtggttaaaaacctgcctaaattaaattgggcttcaatcactgtaacctgattcatcctgggatgtaaaccattcgaagtcagctaattggacttttatggctctatcttttccttcagtgaagaaccctatttaaaactgggtcatcatttgtcctgttctagcaagatagtcttcagtttcattttcctgtgccctgtggtagttggaaacaaatcataatgtattatttaaatgtttaacatcattgcataacagcgtttattatacagtggcagatttctttagctgccacagtaatactcattccttgtgtgtgtcttggagtgcatttgactccaggaaaagccattttggttttccttaactaaatgataaatgtacccctctcagtctgcagtattgagttgtttaaagtatatgtgcagtcttgcttacaaggaggggttaccatgtatcacacctaatcttcccaatgtttgggatattaaaacacaaagtccttaacatgccaggctcaaggtcttataagagttctagatttttaagagaattagacaaatttgtgtgtgttagaagcccattcattagaagtgtggtggttatttggtattaaactccaaatgagccataggaaggcactacatgaaataatgcactgagtatgcaatgctatcactgtctttgactgtgattttatgtttaaaaagtatgttctaaaattattatatatacatgggtgaattatgtttccgaggcactgttttatctctgtgaatcttgaataacttttttatatttgggttatgatgtcaaacgatcctaagcgaagatgatttcagttcatcaaatcatcattaatgactttatgtattatttgcacagggagaattgaaactgagtataatcaataagctagatacgaaatcagtttctcaaactgagcttcagaaaggggcattttgtactcttgtttttgcataactggttttgtttttttgcagaattaactataacaatcactggctaccgaagtaaactgatgtactgaattccataatacataacattcaatttttaccacttctgtttagcgaacttgtatacttattttctgttcagattaaaaaaaaaaaaaaaaaaaactcagatatcctataaaaaaaaaaggaattc

SEQ ID NO: 437 - DNA, 3595 bp, human
aaaagttgcggggcatagacgagcgccccgggacgcagctagcgcgaccctgagccggcgcccgtggtccggccatggacgacctcgacgccctgctggcggacttggagtctaccacctcccacatctccaaacggcctgtgttcttgtcggaggagaccccctactcatacccaactggaaaccacacataccaggagattgccgtgccaccccccgtccccccacccccgtccagcgaggccctcaatggcacaatccttgaccccttagaccagtggcagcccagcggctcccgattcatccaccagcagcctcagtcctcatcacctgtgtacggctccagtgccaaaacttccagtgtctccaaccctcaggacagtgttggctctccgtgctcccgagtgggtgaggaggagcacgtctacagcttccccaacaagcagaaatcagctgagccttcacccaccgtaatgagcacgtccctgggcagcaacctttctgaactcgaccgcctgctgctggaactgaacgctgtacagcataacccgccaggcttccctgcagatgaggccaactcaagccccccgcttcctggggccctgagccccctctatggtgtcccagagactaacagccccttgggaggcaaagctgggcccctgacgaaagagaagcctaagcggaatgggggccggggcctggaggacgtgcggcccagtgtggagagtctcttggatgaactggagagctccgtgcccagccccgtccctgccatcactgtgaaccagggcgagatgagcagcccgcagcgcgtcacctccacccaacagcagacacgcatctcggcctcctctgccaccagggagctggacgagctgatggcttcgctgtcggatttcaagttcatggcccaggggaagacagggagcagctcaccccctggggggcccccgaagcccgggagccagctggacagcatgctggggagcctgcagtctgacctgaacaagctgggggtcgccacagtcgccaaaggagtctgcggggcctgcaagaagcccatcgccgggcaggttgtgaccgccatggggaagacgtggcaccccgagcacttcgtctgcacccactgccaggaggagatcggatcccggaacttcttcgagcgggatggacagccctactgtgaaaaggactaccacaacctcttctccccgcgctgctactactgcaacggccccatcctggataaagtggtgacagcccttgaccggacgtggcaccctgaacacttcttctgtgcacagtgtggagccttctttggtcccgaagggttccacgagaaggacggcaaggcctactgtcgcaaggactacttcgacatgttcgcacccaagtgtggcggctgcgcccgggccatcctggagaactatatctcagccctcaacacgctgtggcatcctgagtgctttgtgtgccgggaatgcttcacgccattcgtgaacggcagcttcttcgagcacgacgggcagccctactgtgaggtgcactaccacgagcggcgcggctcgctgtgttctggctgccagaagcccatcaccggccgctgcatcaccgccatggccaagaagttccaccccgagcacttcgtctgtgccttctgcctcaagcagctcaacaagggcaccttcaaggagcagaacgacaagccttactgtcagaactgcttcctcaagctcttctgctaggtgccctgcccctgtctctgccccccttccccagccagcatccccaactgcgactgtgacctagagacttcacccgggggtgaaggggtaaacccgactgaaactggaacccttgtcctccgctggtgcgggatggacagagggccgtgaggggtccccctgcttgtcttcacccctgccagagcctctgggccccctcctccctcctgtagctctccctaggctgcccactctccatcctccccaggggtagaggctgggggctccaccccagcccatgtacgtccccacgaactggcctggccagcaccccacactggagccatctcttcctcatatttcagcagtgcagccggggggcagggaagggcaggcagggtctgttggggtctctttttatccttattcctcccccgacctaattgtctttgttctgtgattattgggggacacccggctccctccagacaatgccagcataaatccatccatccaaaggcagagaaccaaaggggccatggaaggttctctgtgctcctcctacccttccagtgccctaggcctggcgactgcccctgccttttagacccgcactccccttttatacctgctcttgttctactgagaaaagcctctccagcaataatgttttctagtcacttcctccgtctccgggacggcgtgcctggacactgtccgactttgatagatttctacactgaggttgaattcatatcgcctgagatgttttacttctctatacaccatgattttgtagagatattaaagacgttcccttttgtatctcttcttcatcaccgccactgggccttcactgatggtgtctggtgtgtagattgctttgtctgtggggtggggtggggaagcaatatgtattttattgtttcttagcacaagcaggtgtgctgggagcagctctgtgactccccctctttcacttcatagctcccaggactgttttataaactgctgctatttggaaaccccttctttacttcccaggccagcaagccttcactgaaactggttgaagagtgttgcacccttttgggcctagaattctgaactttatctgttctgtttctgtgggaggagaaggggaagtatgttttggggggctgcttcctgtctgagtaagccctcaggagcctcttgctcccctgtgaacccctgaaccttctgagcccccctgcttctatggggctctctcttctgccttctcaggaaagctgtgtctgattttggccatcaggactctgacgtctctttggtcttgttgatttacctctgggcatatcccttccccagatctgctcctcccctttcacaggtgggatcggcactcagggggtctggaaagaaggtcataagggagcatgataggatttggggcagagggacaggctcctctggggaaaccccccagagctctttaccaaggatgaaagaggagccaggccttgggctcctgatgaccagaaaggggccaccggggtctaatggtgacagtccaaaccactccactggcctcctggcagaagccgagtgtgctggggtctccgaagagggtccctcctttttgggggaaggtcagcccagcccctccaaaggtctgatgtctccactttcacccgcaggccttaccgctctgtttatagtgacccaccctagatcttccccaagagggactggggtttctggggtccattctctgagtcagtggttatttgaaaatttgattttgattttattttttctctgtaaacttccaagctggcttttcccatttcaattcctgtgatttatgccaataaagtttgcccatg

SEQ ID NO: 438 - DNA, 1768 bp, human
agtcatttcttctgcggaacctccacccctccagtgggtgcgggaccctaggcagcaggccaggcaccgccgctctgactgggggccccgaagcagttaacgggccggacagcaaagtggaaagttagaccagctgggaccaggggaggtgggcacccggctgcgggaggagcggccaggctggcactgcccccctaacttgctctcgatcctgccggtctcgtcccgcagagccggtgccatctgtgggggctttgggccaggggtctccggacagcatgagcgtgggcttcatcggcgctggccagctggcttttgccctggccaagggcttcacagcagcaggcgtcttggctgcccacaagataatggctagctccccagacatggacctggccacagtttctgctctcaggaagatgggggtgaagttgacaccccacaacaaggagacggtgcagcacagtgatgtgctcttcctggctgtgaagccacacatcatccccttcatcctggatgaaataggcgccgacattgaggacagacacattgtggtgtcctgcgcggccggcgtcaccatcagctccattgagaagaagctgtcagcgtttcggccagcccccagggtcatccgctgcatgaccaacactccagtcgtggtgcgggagggggccaccgtgtatgccacaggcacgcacgcccaggtggaggacgggaggctcatggagcagctgctgagcagcgtgggcttctgcacggaggtggaagaggacctgattgatgccgtcacggggctcagtggcagcggccccgcctacgcattcacagccctggatgccctggctgatgggggtgtgaagatgggacttccaaggcgcctggcagtccgcctcggggcccaggccctcctgggggctgccaagatgctgctgcactcagaacagcacccaggccagctcaaggacaacgtcagctctcctggtggggccaccatccatgccttgcatgtgctggagagtgggggcttccgctccctgctcatcaacgctgtggaggcctcctgcatccgcacacgggagctgcagtccatggctgaccaggagcaggtgtcaccagccgccatcaagaagaccatcctggacaaggaccaccttcctctagagctcgggagcccggagggtcttcacccactcctactccagtatcagctggcacgggctccttcctgagagcaaaggtcaaggaccccctctgtgaaggctcagcagaggtgggatcccacgccccctcccggcccctccctgccctccattcagggagaaacctctccttcccgtgtgagaagggccagagggtccaggcatcccaagtccagcgtgaagggccacagcccctcttggctgccaagcacgcagatcccatggacatttggggaaagggctccttgggctgctggtgaacttctgtggccaccacctcctgctcctgacctccctgggagggtgctatcagttctgtcctggccctttcagttttataagttggtttccagcccccagtgtcctgacttctgtctgccacatgaggagggaggccctgcctgtgtgggagggtggttactgtgggtggaatagtggaggccttcaactgattagacaaggcccgcccacatcttggagggcatctgccttactgattaaaatgtcaatgtaatctaaaaaaaaaaaaaaaaaaaaaaaaaaaaaaaaaaaaaaaaaaaaaaaaaaaa

SEQ ID NO: 439 - DNA, 3262 bp, human
agggggcgaaggcggcggtggtgaggaagatactttggttagtgaccacatcgcagcatgttgagtcaagtttaccgctgtgggttccagcccttcaaccaacatcttctgccctgggtcaagtgtacaaccgtcttcagatctcattgtatccagccttcagtcatcagacatgttcgttcttggagcaacatcccgtttatcactgtacccctcagtcgtacacatggaaagtccttcgcccaccgcagtgagctgaagcatgccaagagaatcgtggtgaagctcggcagtgccgtggtgacccgaggggatgaatgtggcctggccctggggcgcttggcatctattgttgagcaggtatcagtgctgcagaatcagggcagagagatgatgctggtgaccagtggagccgtagcctttggcaaacaacgcttgcgccatgagatccttctgtctcagagcgtgcggcaggccctccactcggggcagaaccagctgaaagaaatggcaattccagtcttagaggcacgagcctgtgcagctgccggacagagtgggctgatggccttgtatgaggctatgtttacccagtacagcatctgtgctgcccagattttggtgaccaatttggatttccatgatgagcagaagcgccggaacctcaatggaacacttcatgaactccttagaatgaacattgtccccattgtcaacacaaatgatgctgttgtccccccagctgagcccaacagtgacctgcagggggtaaatgttattagtgttaaagataatgatagcctggctgcccgactggctgtggaaatgaaaactgatctcttgattgttctttcagatgtagaaggcctttttgacagccccccaggttcagatgatgcaaagcttattgatatattttatcccggagatcagcagtctgtgacatttggaaccaagtctagagtgggaatgggtggcatggaagccaaggtgaaagcagccctctgggctttgcaaggtggcacttctgttgttattgccaatggaacccacccaaaggtgtctgggcacgtcatcacagacattgtggaggggaagaaagttggtaccttcttttcagaagtaaagcctgcaggccctactgttgagcagcagggagaaatggcgcgatctggaggaaggatgttggccaccttggaacctgagcagagagcagaaattatccatcatctggctgatctgttgacggaccagcgtgatgagatcctgttagccaacaaaaaagacttggaggaggcagaggggagacttgcagctcctctgctgaaacgtttaagcctctccacatccaaattgaacagcctggccatcggtctgcgacagatcgcagcctcctcccaggacagcgtgggacgtgttttgcgccgcacccgaatcgccaaaaacttggaactggaacaagtgactgtcccaattggagttctgctggtgatctttgaatctcgtcctgactgtctaccccaggtggcagctttggctatcgcaagtggcaatggcttgttactcaaaggagggaaggaggctgcacacagcaaccggattctccacctcctgacccaggaggctctctcaatccatggagtcaaggaggccgtgcaactggtgaataccagagaagaagttgaagatctttgccgcctagacaaaatgatagatctgatcattccacgtggctcttcccagctggtcagagacatccagaaagctgctaaggggattccagtgatggggcacagcgaagggatctgtcacatgtatgtggattccgaggccagtgttgataaggtcaccaggctagtcagagactctaaatgtgaatatccagctgcctgtaatgctttggagactttgttaatccaccgggatctgctcaggacaccattatttgaccagatcattgatatgctgagagtggaacaggtaaaaattcatgcaggccccaaatttgcctcctatctgaccttcagcccctccgaagtgaagtcactccgaactgagtatggggacctggaattatgcattgaagtagtggacaacgttcaggatgccattgaccacatccacaagtatggcagctcccacacggatgtcatcgtcacagaggacgaaaacacagcggagttcttcctgcagcacgtagacagtgcctgtgtgttctggaatgccagcactcgcttttctgatggttaccgctttggactgggagctgaagtgggaatcagtacatcgagaatccacgcccggggaccagtaggacttgagggactgcttactactaagtggctgctgcgagggaaggaccacgtggtctcagatttctcagagcatggaagtttaaaatatcttcatgagaacctccctattcctcagagaaacaccaactgaaaagagccaggaaaacccgggaattttccaaaaggtcttcacgttaaacttgtcttatctcaggagagagcccgctcttgtctcccagttcctggtagggtctgcctgttggaaagtgtacctggatgcttctgggctccgtttggcaatagcaatcttggctgatgtgcacagtctggctcccagctcaccctttttttttaaagtaagaaaatagttgctaccgatagggactttgccaagtccaattatcttctaggattgaaaggtgcattttccccataaaaaaggcgaggaaaacccatggctgctttgtgtcacctcagtgacttacagtcccccttcgcatttagttggtactagagccagtcatccttaacaaatcttttcgcgttttatttctttcacatgtagtcatcttcaaaaaggaaagatttggaattttagaaaaggggcaactcttctttttagcattctcatcagaaagtcacaaaaatcgatggaatcatttccactgggaagattgaccttttgtatttatttgtggggtaaattaataagcattccagatgcttgcagcttcctgcatccaggagatgctgtgtcccccgtgatgcagctggaacccaagctgcagcaggagatgcaagtttcaggatgttccccactgagctggaggaatatctacagcagtgatgcttgaaatttttgtatgaattattttgtcgtcctacccttttcctccaaaacaaaaattagaggattattttaatactttggattcttcccccttttttgagaaataaagttttttatg

SEQ ID NO: 440 - DNA, 3447 bp, human
acttactgtcattaaaccagtatgatgatggagtggggaatgcctcagtttctcccaccgccgagggcctataggactacagttcccagggccccgtgctgcaggctagcggcctcccgccaatgctggccagtaacctgagcatccctctccaaaaggtcacttcagggctccttgagggacagcaacagggggagcctagagctgctcagcttcggtgggggtggagtgagggctgtggccctgcctcacacaacctccctcacaccacccctgcaatgcagggtcgtgggcccctttctcaaagacatccagtggcctctgctagttgcacctcttccgtcaggggacactgacttggctcctgcaccacagcctgcagggggtcctggttccttttgccacaacacatggcctcccatcctggttcagccactgacagacagctccccaatccagcactctgcctgctccttcttgtatccaaccctccaaaaggcagggacaagggacagaagaccatgtgcaaggcctggaggaagtgggtcagcacaggcctgtgaacaagccaggccagtcttggcggcccaagtggagctcacctctccctcccctctcctctcctccccttgccctcaaaatagctccctgagctgccaggccaagaccctcccattgcaggggaggcggggcgtgctgcccagagccaggctttaaatccccttgaggctggggagctccactccttggctggaggcagtgctgaggccgccgtcccctctaccatcagtccagtccggcccgccctcctgcagccatgtcccggcccctgtcagaccaagagaaaagaaagcaaatcagtgtgcgtggcctggccggcgtggagaacgtgactgagctgaaaaagaacttcaaccggcacctgcatttcacactcgtaaaggaccgcaatgtggccaccccacgagactactactttgctctggcccataccgtgcgcgaccacctcgtggggcgctggatccgcacgcagcagcactactatgagaaggaccccaagaggatctactacctgtctttagagttctatatgggacggacgctacagaacaccatggtgaacctggccttagagaatgcctgtgacgaggccacctaccagctgggcctggacatggaggagctggaggaaattgaggaggatgcggggctgggcaacgggggcctgggccggctggcagcctgctttcttgactccatggcaacactgggcctggccgcctatggctacgggattcgctatgagtttgggatttttaaccagaagatctccgggggctggcagatggaggaggccgatgactggcttcgctacggcaacccctgggagaaggcccggcccgagttcacgctacctgtgcacttctacggccatgtggagcacaccagccagggtgccaagtgggtggacacacaggtggtactggccatgccctacgatacgcccgtgcctggctatcgcaacaatgttgtcaacaccatgcgcctctggtctgccaaggctcccaatgacttcaacctcaaggacttcaatgtcggtggctacatccaggctgtgttggaccgaaacctggcggagaacatctctcgtgtcctgtaccccaatgataatttcttcgaagggaaggagctgcggctgaagcaggagtatttcgtggtggctgccaccctccaggacatcatccgtcgcttcaagtcttccaagttcggctgccgtgatcccgtgcgcacgaacttcgatgccttcccagataaggtggccatccagctcaatgacacccacccctccctggccatccccgagctgatgaggatcctggtggacctggaacggatggactgggacaaggcgtgggatgtgacagtgaggacctgtgcctacaccaaccacacggtgctgcccgaggccctggagcgctggccggtgcacctcttggagacgctgctgccgcggcacctccagatcatctacgagatcaaccagcgcttcctcaaccgggtggcggccgcattcccaggggacgtagaccggctgcggcgcatgtcgctggtggaggagggcgcagtgaagcgcatcaacatggcacacctgtgcatcgcggggtcgcacgccgtcaacggcgtggcgcgcatccactccgagatcctcaagaagaccatcttcaaagacttctatgagctggagcctcataagttccagaataagaccaacggcatcacccctcggcgctggctggttctgtgtaaccccgggctggcagaggtcattgctgagcgcatcggggaggacttcatctctgacctggaccagctgcgcaaactgctctcctttgtggatgatgaagctttcattcgggatgtggccaaagtgaagcaggaaaacaagttgaagtttgctgcctacctagagagggaatacaaagtccacatcaaccccaactcactcttcgacatccaggtgaagcggattcacgaatataaacgacagctcctcaactgcctccatgtcatcaccctgtacaaccgcatcaagagggagcccaataagttttttgtgcctcggactgtgatgattggagggaaggctgcacctgggtaccacatggccaagatgatcatcagactcgtcacagccatcggggatgtggtcaaccatgacccggcagtgggtgaccgcctccgtgtcatcttcctggagaactaccgagtctcactggccgagaaagtgatcccagctgcagacctctctgagcagatctccactgcgggcactgaagcctcaggcaccggcaacatgaagttcatgctcaacggggctctgaccattggcaccatggacggggccaatgtggagatggcagaagaggcgggagaggaaaacttcttcatctttggcatgcgggtggaggatgtggataagcttgaccaaagagggtacaatgcccaggagtactacgatcgcattcctgagcttcggcaggtcattgagcagctgagcagtggcttcttctcccccaaacagcccgacctgttcaaggacattgtcaatatgctcatgcaccatgaccggtttaaagtcttcgcagattatgaagactacattaaatgccaggagaaagtcagcgccttgtacaagaacccaagagagtggacgcggatggtgatccggaacatagccacctctggcaagttctccagtgaccgcaccattgcccagtatgcccgggagatctggggtgtggagccttcccgccagcgcctgccagccccggatgaggccatctgagcctccagaccagaccccaaaccagcccttgagtctgtcacactctcttgggccagccccagcacctcatgcagagggtggggtactggagttagatctct

SEQ ID NO: 441 - DNA, 1148 bp, human
gctcggtcgggcgctgtctccctcggctctgcgggtgtcagttcgtccggcttcctcacagcccctcactcccggcggctgacagcagcagcggcggcggcgggcggcgcctggcgtttcgaggctgagcggcaccggggttggggcgcggaggaggagcagcagcgggaggaggagccgtgtgccctggcactgagcggccgcggccatggcgtacgcctatctcttcaagtacatcataatcggcgacacaggtgttggtaaatcatgcttattgctacagtttacagacaagaggtttcagccagtgcatgaccttactattggtgtagagttcggtgctcgaatgataactattgatgggaaacagataaaacttcagatatgggatacggcagggcaagaatcctttcgttccatcacaaggtcgtattacagaggtgcagcaggagctttactagtttacgatattacacggagagatacattcaaccacttgacaacctggttagaagatgcccgccagcattccaattccaacatggtcattatgcttattggaaataaaagtgatttagaatctagaagagaagtaaaaaaagaagaaggtgaagcttttgcacgagaacatggactcatcttcatggaaacgtctgctaagactgcttccaatgtagaagaggcatttattaatacagcaaaagaaatttatgaaaaaattcaagaaggagtctttgacattaataatgaggcaaatggcattaaaattggccctcagcatgctgctaccaatgcaacacatgcaggcaatcagggaggacagcaggctgggggcggctgctgttgagtctgtttttactgtctagctgcccaacggggcctactcacttattctttcaccccctctcctcctgctcagctgagacatgaaactatttgaaatggctttatgtcacagaagactttaatccgtcaaattcttgtataactttgaataaatggttaatgttcacttaaaagacagattttggagattgtattcatatctatttgcatttgatttctaggtcaattgatgtgattatttttgttaaatgttgtcttgtgcccttaactacgaactgaattgtattaaacactacaaagtc

SEQ ID NO: 442 - DNA, 2280 bp, human
gcagagtgcgctgcgtttcgatgagccgggacgtggcgccgctctagccagcgcctgggctctgtggcgggcgccgcagctccgcgtcccccgcgcctcctcccagcgcaggtgggtccgcccgcggggggcgggggtgcccgggagccgtgggacgggcgggtagcggcaacctttggggagcagagtggtccccaacgcccaggtgccccggctcgcgctctggcccgggcgaatcgggctataggaagggccacacggatggaagtcctagtccgggtgctcacctcttgtggaacgtgcaaagcctgtcccaggacctctttacactctgggggtctctgcccaggcacgcttgctgcttccggacacagctgtgggcggagctagtaggggcggggctacgtgattgacacttctctcctcagacttcaagggctaccactggacccttcccctgtcttgaaccctgagccggcaccatgcacggacgcctgaaggtgaagacgtcagaagagcaggcggaggccaaaaggctagagcgagagcagaagctgaagctataccagtcagccacccaggccgtattccagaagcgccaggctggtgagctggatgagtccgtgctggaactgacaagccagattctgggagccaaccctgattttgccaccctctggaactgccgacgagaggtgctccagcagctggagactcagaagtgtctcctgaagagttggctgctctggtgaaggcagaactgggcttcctggagagctgcctgcgggtgaaccccaagtcttatggtacctggcaccaccgatgctggctgctaggccgcctgcctgagcccaactggacccgagagctggagctctgtgcccgtttcctggaggtggatgagcggaactttcactgctgggactatcggcggtttgtggccacacaggcagccgtgccccctgcagaagagctagccttcactgacagcctcatcacccgaaacttctccaactactcttcctggcattaccgctcctgtctcttgccccagctgcacccccagccggattctggaccacaggggcgcctccctgaggatgtgctgctcaaagagctggagctggtgcagaatgccttcttcactgaccccaatgaccagagtgcctggttttatcaccgttggctcctaggccgagctgacccccaggatgcactgcgctgcctgcatgtgagccgggacgaggcctgtctgactgtctccttctctcggcccctcttagtgggctccaggatggagatcttgctgctcatggttgatgattctcccctgattgtggagtggaggaccccagatggcaggaaccggcccagccatgtctggctctgtgacctgcctgctgcctccctcaacgaccagttgccccaacatacatttcgcgtcatttggacagcaggcgatgtccagaaagaatgcgtgcttttaaaaggccgccaggagggctggtgccgggactccacgacagacgagcagctattcaggtgtgagctgtcagtggagaagtccacagtgctgcagtctgagctggaatcctgtaaggagctgcaggagctggagcctgagaataaatggtgcctgcttaccatcatcctgctgatgcgggcactggaccccctgctgtatgagaaggagaccctgcagtacttccagaccctcaaggccgtggaccccatgcgggcaacgtatctggatgacctgcgcagcaagttcttgctggagaatagcgtgctcaagatggagtatgccgaggtgcgtgtgctgcacctggctcacaaggatctgacagtgctctgccatctggaacagctgctcttggtcacccatcttgacttgtcacacaatcgcctccgaaccctgccacctgcactggctgccctgcgctgccttgaggtgctgcaggccagtgataatgccatagagtccctggacggcgtcaccaacctaccccggctgcaggagctgctactgtgcaacaaccgcctccagcagcctgcagtgctccagcctcttgcctcctgccccaggctggtcctcctcaacctgcagggtaacccgctgtgccaagcggtgggcatcttggagcaactggctgaactgctgccttcagttagcagcgtcctcacctaagaggccctgccccctacccttgccctttaacttattgggactgaataaagaatggagaggccctctcaggctaccaaaaaaaaaaaaaaaaa

SEQ ID NO: 443 - DNA, 1526 bp, human
gcatctgcgcaggcgcccggctcctaagtctacccaggaactgaccctgctctctcctttccctgttagacatgggcactccacagaaggatgttattatcaagtcagatgcaccggacactttgttattggagaaacatgcagattatatcgcatcctatggctcaaagaaagatgattatgaatactgtatgtctgagtatttgagaatgagtggcatctattggggtctgacagtaatggatctcatgggacaacttcatcgcatgaatagagaagagattctggcatttattaagtcttgccaacatgaatgtggtggaataagtgctagtatcggacatgatcctcatcttttatacactcttagtgctgtccagattcttacgctgtatgacagtattaatgttattgacgtaaataaagttgtggaatatgttaaaggtctacagaaagaagatggttcttttgctggagatatttggggagaaattgacacaagattctctttttgtgcggtggcaactttggctttgttggggaagcttgatgctattaatgtggaaaaggcaatcgaatttgttttatcctgtatgaactttgacggtggatttggttgcagaccaggttctgaatcccatgctgggcagatctattgttgcacaggatttctggctattacaagtcagttgcatcaagtaaattctgatttacttggctggtggctttgtgaacgacaattaccctcaggcgggctcaatggaaggccggagaagttaccagatgtatgctactcatggtgggtcctggcttccctaaagataattggaagacttcattggattgatagagagaaactgcgtaatttcattttagcatgtcaagatgaagaaacggggggatttgcagacaggccaggagatatggtggatccttttcataccttatttggaattgctggattgtcacttttgggagaagaacagattaaacctgttaatcctgtcttttgcatgcctgaagaagtgcttcagagagtgaatgttcagcctgagctagtgagctagattcattgaattgaaagttgcatagtatagttttgccattttaacatttctgtatttgaagtgcttatcgaatctaaaagtgactactgttaatattttgtatattgtgttaaattaattttaataaattatataattatacatattgtaaaataaagaccggtattttattttctgctttttattctgaagtcctgttattctgactacagttctttgtgtatacttctgtgtctgttatgttcaataactgagctaacataaaataactctaggtttctacttgatttttcccccatgtatacctttcatctgttctatagcaagttgatgtaaattggtttgtcaacaagaatgttaactgatgaaagtggatagaacccatacatgaattaaatgatgcacaaaataaatggctgttgaaatttgaaaaaaaaaaaaaaaaaaaaaaaaaaaaaa

SEQ ID NO: 444 - DNA, 2254 bp, human
gggaattctgaaagccgctggcggaccgcgcgcagcggccagagaccgagccctaaggagagtgcggcgcttcccgaggcgtgcagctgggaactgcaactcatctgggttgtgcgcagaaggctggggcaagcgagtagagaagtggagcgtaagccaggggcgttgggggccgtgcgggtcgggcgcgtgccacgcccgcggggtgaagtcggagcgcggggcctgctggagagaggagcgctgcggaccgagtaatggcaatgcagatgcagcttgaagcaaatgcagatacttcagtggaagaagaaagctttggcccacaacccatttcacggttagagcagtgtggcataaatgccaacgatgtgaagaaattggaagaagctggattccatactgtggaggctgttgcctatgcgccaaagaaggagctaataaatattaagggaattagtgaagccaaagctgataaaattctggctgaggcagctaaattagttccaatgggtttcaccactgcaactgaattccaccaaaggcggtcagagatcatacagattactactggctccaaagagcttgacaaactacttcaaggtggaattgagactggatctatcacagaaatgtttggagaattccgaactgggaagacccagatctgtcatacgctagctgtcacctgccagcttcccattgaccggggtggaggtgaaggaaaggccatgtacattgacactgagggtacctttaggccagaacggctgctggcagtggctgagaggtatggtctctctggcagtgatgtcctggataatgtagcatatgctcgagcgttcaacacagaccaccagacccagctcctttatcaagcatcagccatgatggtagaatctaggtatgcactgcttattgtagacagtgccaccgccctttacagaacagactactcgggtcgaggtgagctttcagccaggcagatgcacttggccaggtttctgcggatgcttctgcgactcgctgatgagtttggtgtagcagtggtaatcactaatcaggtggtagctcaagtggatggagcagcgatgtttgctgctgatcccaaaaaacctattggaggaaatatcatcgcccatgcatcaacaaccagattgtatctgaggaaaggaagaggggaaaccagaatctgcaaaatctacgactctccctgtcttcctgaagctgaagctatgttcgccattaatgcagatggagtgggagatgccaaagactgaatcattgggtttttcctctgttaaaaaccttaagtgctgcagcctaatgagagtgcactgctccctggggttctctacaggcctcttcctgttgtgactgccaggataaagcttccgggaaaacagctattatatcagcttttctgatggtataaacaggagacaggtcagtagtcacaaactgatctaaaatgtttattccttctgtagtgtattaatctctgtgtgttttctttggttttggaggaggggtatgaagtatctttgacatggtgccttaggaatgacttgggtttaacaagctgtctactggacaatcttatgtttccaagagaactaaagctggagagacctgacccttctctcacttctaaattaatggtaaaataaaatgcctcagctatgtagcaaagggaatgggtctgcacagattctttttttctgtcagtaaaactctcaagcaggtttttaagttgtctgtctgaatgatcttgtgtaagggtttggttatggagtcttgtgccaaacctactaggccattagcccttcaccatctacctgcttggtctttcattgctaagactaactcaagataatcctagagtcttaaagcatttcaggccagtgtggtgtcttgcgcctgtactcccagcactttgggaggccgaggcaggtggatcgcttgagccaggagttttaagtccagcttggccaagatggtgaaatcccatctctacaaaaaatgcagaacttaatctggacacactgttacacgtgcctgtagtcccagctactctatagcctgaggtgggagaatcacttaagcctggaaggtggaagttgcagtgagtcgagattgcactgctgcattccagccagggtgacagagtgagaccatgtttcaaacaagaaacatttcagagggcaagtaaacagatttgattgtgaggcttctaataaagtagttattagtagtg

SEQ ID NO: 445 - DNA, 2818 bp, human
aagtgatctgtggcggctgctgcagagccgccaggaggagggtggatctccccagagcaaagcgtcggagtcctcctcctccttctcctcctcctcctcctcctcctccagccgcccaggctcccccgccacccgtcagactcctccttcgaccgctcccggcgcggggccttccaggcgacaaggaccgagtaccctccggccggagccacgcagccgcggcttccggagccctcggggcggcggactggctcgcggtgcagattcttcttaatcctttggtgaaaactgagacacaaaatggctgcaaataagcccaagggtcagaattctttggctttacacaaagtcatcatggtgggcagtggtggcgtgggcaagtcagctctgactctacagttcatgtacgatgagtttgtggaggactatgagcctaccaaagcagacagctatcggaagaaggtagtgctagatggggaggaagtccagatcgatatcttagatacagctgggcaggaggactacgctgcaattagagacaactacttccgaagtggggaggggttcctctgtgttttctctattacagaaatggaatcctttgcagctacagctgacttcagggagcagattttaagagtaaaagaagatgagaatgttccatttctactggttggtaacaaatcagatttagaagataaaagacaggtttctgtagaagaggcaaaaaacagagctgagcagtggaatgttaactacgtggaaacatctgctaaaacacgagctaatgttgacaaggtattttttgatttaatgagagaaattcgagcgagaaagatggaagacagcaaagaaaagaatggaaaaaagaagaggaaaagtttagccaagagaatcagagaaagatgctgcattttataatcaaagcccaaactcctttcttatcttgaccatactaataaatataatttataagcattgccattgaaggcttaattgactgaaattactttaacattttggaaattgttgtatatcactaaaagcatgaattggaactgcaatgaaagtcaaatttactttaaaaagaaattaatatggcttcaccaagaagcaaagttcaacttatttcataattgcctacatttatcatggtcctgaatgtagcgtgtaagcttgtgtttcttgggcagtctttcttgaaattgaagaggtgaaatgggggtggggagtgggaggaaaggtgacttcctctggtgtttattataaagcttaaattttatatcattttaaaatgtcttggtcttctactgccttgaaaaatgacaattgtgaacatgatagttaaactaccactttttttaaccattattatgcaaaatttagaagaaaagttattggcatggttgttgcatatagttaaactgagagtaattcatctgtgaatctgctttaattacctggtgagtaacttagaaaagtggtgtaaacttgtacatggaattttttgaatatgccttaatttagaaactgaaaaatatctggttatatcattctgggtgtgttcttactgacaccaggggtccgctgccccatgtgtcctggtgagaaaatatatgcctggcacagcttttgtatagaaaattcttgagaagtaactgtccgctagaagtctgtccaaatttaaaatgtgtgccatattctggttcttgaaaataagattccagagctctttgatcgcttttaataaactgcaagttcattttaaatgaagggccagcatatatacttgcaagataattttcagctgcaaggattcagcaccagttatgtttgaatgaaccctccttttctctgagattctggtccctggaaatccctttctgctagtggtgagcatgtaagtgttaagtttttaatctgggagcagggcataggaagaaaatgtcagtagtgctaatgcattttgcactagaacgcttcgggaaaatattcatgcttgccatctgttcatttctaaatttatattcataaagttacagtttgatacaggaattattaggagtaattcttttctgtttctgtttataatgaagaacactgtagctacattttcagaagttaacatcaagccatcaaacctgggtatagtgcagaaaacgtggcacacactgaccacacattaggctgtgtcaccattgtgtggtgtacctgctggaagaattctagcatgctacttggggacataatttcagtgggaaatatgccactgaccgattttttttttttcctctttgcagtggggctaggacagttgattcaacaaagtatttttttcttttttctcagtcctaatttgaacaggtcaaagatgtgttcaggcattccaggtaacaggtgtgtatgtaaagttaaaaataggctttttaggaactcactctttagatatttacatccagcttctcatgttaaatatttgtccttaaagggtttgagatgtacatctttcatttcgtatttctcataggctatgccatgtgcggaattcaagttaccaatgtaacactggccagcgggcccagcaatctccatgtgtacttattacagtcttatttaaccaggggtcctaaccactaacattgtgactttgctttgagacctttcctctcctgggtactgaggtgctatgaagccaactgacaaagatgcatcacgtgtcttaggctgatgccactacccgatttgtttatttgcaatttgagccatttaaagaccaataaacttccttttttaaaaaaaaaaaaaaaaaaaaaaaaaa

SEQ ID NO: 446 - DNA, 2337 bp, human
  misc_feature 61, 2277: n = A,T,C or G
cggaaggtgtgagccgcaaacccagcggagggcgggaagaaggaggaggcctctagggtgntcgggggactgggggccccgccggcagaggtccctcggcctcctgactgactgactgcggccgcctccggccaggacgctgggagctgcctgcgggaaggtgcggggagcggagccatggcctccggtgcgtataacccgtatatagagataattgaacaacccaggcagaggggaatgcgttttagatacaaatgtgaagggcgatcagcaggcagcattccaggggagcacagcacagacaacaaccgaacatacccttctatccagattatgaactattatggaaaaggaaaagtgagaattacattagtaacaaagaatgacccatataaacctcatcctcatgatttagttggaaaagactgcagagacggctactatgaagcagaatttggacaagaacgcagacctttgtttttccaaaatttgggtattcgatgtgtgaagaaaaaagaagtaaaagaagctattattacaagaataaaggcaggaatcaatccattcaatgtccctgaaaaacagctgaatgatattgaagattgtgacctcaatgtggtgagactgtgttttcaagtttttctccctgatgaacatggtaatttgacgactgctcttcctcctgttgtctcgaacccaatttatgacaaccgtgctccaaatactgcagaattaaggatttgtcgtgtaaacaagaattgtggaagtgtcagaggaggagatgaaatatttctactttgtgacaaagttcagaaagatgacatagaagttcgttttgtgttgaacgattgggaagcaaaaggcatcttttcacaagctgatgtacaccgtcaagtagccattgttttcaaaactccaccatattgcaaagctatcacagaacccgtaacagtaaaaatgcagttgcggagaccttctgaccaggaagttagtgaatctatggattttagatatctgccagatgaaaaagatacttacggcaataaagcaaagaaacaaaagacaactctgcttttccagaaactgtgccaggatcacgtagaaacagggtttcgccatgttgaccaggatggtcttgaactcctgacatcaggtgatccacccaccttggcctcccaaagtgctgggattacagttaattttcctgagagaccaagacctggtctcctcggttcaattggagaaggaagatacttcaaaaaagaaccaaacttgttttctcatgatgcagttgtgagagaaatgcctacaggggtttcaagtcaagcagaatcctactatccctcacctgggcccatctcaagtggattgtcacatcatgcctcaatggcacctctgccttcttcaagctggtcatcagtggcccaccccaccccacgctcaggcaatacaaacccactgagtagtttttcaacaaggacacttccttctaattcgcaaggtatcccaccattcctgagaatacctgttgggaatgatttaaatgcttctaatgcttgcatttacaacaatgccgatgacatagtcggaatggaagcgtcatccatgccatcagcagatttatatggtatttctgatcccaacatgctgtctaattgttctgtgaatatgatgacaaccagcagtgacagcatgggagagactgataatccaagacttctgagcatgaatcttgaaaacccctcatgtaattcagtgttagacccaagagacttgagacagctccatcagatgtcctcttccagtatgtcagcaggcgccaattccaatactactgtttttgtttcacaatcagatgcatttgagggatctgacttcagttgtgcagataacagcatgataaatgagtcgggaccatcaaacagtactaatccaaacagtcatggttttgttcaagatagtcagtattcaggtattggcagtatgcaaaatgagcaattgagtgactcctttccatatgaattttttcaagtataacttgcaagatttaaatccttttaaatcttgataccacctatatagatgcagcattttgtatttgtctaactggggatataatactatatttatactgtatatataatactgactgagaatataatactgtatttgagaatataaaaaacttttttcagggaagaagcatacaactttggacatagcgaatacaaaattggaagctgtcataaaaagacaactcagaggccaggcgcaggngctcacacctgtaatcctagcactttgggaggccaaggcgggtggatcacttgagaccag

SEQ ID NO: 447 - DNA, 1396 bp, human
gcgtaattaaaaggcggcggaagaaggtgggagggtcatgacgcagcgagtttcagtcgtgacttttctgggggcatcgcggcgtccccttttttttgcctttaaagtaaaacgtcgccccgacgcaccccccgcgtatttcggggggcggaggcggcgggccacggcgcgaagaggggcggtgctgacgccggccggtcacgtgggcgtgttgtgggggggaggggcgccgccgcgcggtcggttccgggcggttgggagcgcgcgagctagcgagcgagaggcagccgcgcccgccgccgcccctgctctgtatgccgctctctcccggcgcggccgccgccgatcacagcagcaggagccaccgccgccgcggttgatgtggttgggccggggctgaggaggccgccaagatgccgcagtccaagtcccggaagatcgcgatcctgggctaccggtctgtggggaaatcctcattgacgattcaatttgttgaaggccaatttgtggactcctacgatccaaccatagaaaacacttttacaaagttgatcacagtaaatggacaagaatatcatcttcaacttgtagacacagccgggcaagatgaatattctatctttcctcagacatactccatagatattaatggctatattcttgtgtattctgttacatcaatcaaaagttttgaagtgattaaagttatccatggcaaattgttggatatggtggggaaagtacaaatacctattatgttggttgggaataagaaagacctgcatatggaaagggtgatcagttatgaagaagggaaagctttggcagaatcttggaatgcagcttttttggaatcttctgctaaagaaaatcagactgctgtggatgtttttcgaaggataattttggaggcagaaaaaatggacggggcagcttcacaaggcaagtcttcatgctcggtgatgtgattctgctgcaaagcctgaggacactgggaatatattctacctgaagaagcaaactgcccgttctccttgaagataaactatgcttcttttttcttctgttaacctgaaagatatcatttgggtcagagctcccctcccttcagattatgttaactctgagtctgtccaaatgagttcacttccattttcaaattttaagcaatcatattttcaatttatatattgtatttcttaatattatgaccaagaattttatcggcattaatttttcagtgtagtttgttgtttaaaataatgtaatcatcaaaatgatgcatattgttacactactattaactaggcttcagtatatcagtgtttatttcattgtgttaaatgtatacttgtaaataaaatagctgcaaacctcaaaaaaaaaaaaaaaaaaa

SEQ ID NO: 448 - DNA, 1113 bp, human
gggttgctatgagacccgctcgagcggaggaccagcagccagcccgacgctgatggttcttacctcgtactaaaacctttgctttgacacagttttagagttgcttaatattcgagcaagcacctgacacgggtgactttctccttctttttttcctccggtccctcgggtaagatggaggtagaaaatgaagccagctgctccccgggcagcgcatcaggcgggtccagagagtacaaggtggtaatgctgggagcagggggagttggtaaaagcgcaatgacaatgcagtttattagtcatcagttccctgattatcatgaccctactatagaagatgcttataagacccaggtcaggattgacaatgagccagcttacttggacatcttggacactgctggccaggcagaattcacagccatgcgggagcagtacatgcgaggtggggaaggcttcatcatctgctactccgtcactgaccgtcaatcatttcaggaggctgccaagtttaaagagctcatttttcaggtccgccacacctatgaaattcccctggtgctggtgggtaacaaaattgatctggaacagttccgccaggtttctacagaagaaggcttgagtcttgcccaagaatataattgtggtttttttgagacctctgcagccctcagattctgtattgatgatgcttttcatggcttagtgagggaaattcgcaagaaggagtccatgccatccttgatggaaaagaaactgaagagaaaagacagcctgtggaagaagctcaaaggttctttgaagaagaagagagaaaatatgacatgatatctttgcttttgagttcctcacgctctctgaattttattagttggacaattccatatgtagcattctgcttcaatattatctctctatgtgtctctctctctttaaatatctgcctgtaggtaaaagcaagctctgcatatctgtacctcttgagatagttttgttttgcctttaacagttggatggattttgtcaatcagctggatatgctgtttagtttttacaacatagtactaaataaaattgacattccaattgcctcaaaaaaaaaaaaaaaaaaaa

SEQ ID NO: 449 - DNA, 3550 bp, human
cgcctccgcccctcgctcgctcgctccttcccgccctccccgcagcgccggccgagccggcttcccctcagtctctcatgaatattgagcggcccctgttgtatttcccgagctccattgcggaagctgaggctcgccatattgtgcggcggcgccggcgtccgcggcagctgataccagagtcttgctccggccgcggccagcggagccctgggctggggcaggagccgcaatgtctcaggctgtgcagacaaacggaactcaaccattaagcaaaacatgggaactcagtttatatgagttacaacgaacacctcaggaggcaataacagatggcttagaaattgtggtttcacctcgaagtctacacagtgaattaatgtgcccaatttgtttggatatgttgaagaacaccatgactacaaaggagtgtttacatcgtttttgtgcagactgcatcatcacagcccttagaagtggcaacaaagaatgtcctacctgtcggaaaaaactagtttccaaaagatcactaaggccagacccaaactttgatgcactcatcagcaaaatttatccaagtcgtgatgagtatgaagctcatcaagagagagtattagccaggatcaacaagcacaataatcagcaagcactcagtcacagcattgaggaaggactgaagatacaggccatgaacagactgcagcgaggcaagaaacaacagattgaaaatggtagtggagcagaagataatggtgacagttcacactgcagtaatgcatccacacatagcaatcaggaagcaggccctagtaacaaacggaccaaaacatctgatgattctgggctagagcttgataataacaatgcagcaatggcaattgatccagtaatggatggtgctagtgaaattgaattagtattcaggcctcatcccacacttatggaaaaagatgacagtgcacagacgagatacataaagacttctggtaacgccactgttgatcacttatccaagtatctggctgtgaggttagctttagaagaacttcgaagcaaaggtgaatcaaaccagatgaaccttgatacagccagtgagaagcagtataccatttatatagcaacagccagtggccagttcactgtattaaatggctctttttctttggaattggtcagtgagaaatactggaaagtgaacaaacccatggaactttattacgcacctacaaaggagcacaaatgagcctttaaaaaccaattctgagactgaacttttttatagcctatttctttaatattaaagatgtactggcattacttttatggacagatcttggatatgttgttcaattttctttctgagccagactagtttacgctattcaaatcttttcccctttatttaagatttcctttttggaagggactgcaattattcagtatttttttctttcctttaaaaaaatatatctgaagtttcttgtgtttttttttttccccacaaagtgtgtttccacttggagcaccattttgacccaggaatttttcatagtttctgtattcttataagattcagttggctgtccttttcctgctcccctcaaaagatttttagtcatacagaatgttaaatattatgtattctgactttttttttcccccggagtcttgtatatttatagttttctatataaactgtagtatcttcatgaagacccaaggctcaaatttactgtccttaaaaacaattctcataggattattcttttcatggtattttcttccataatatctcattttaaaaagaagttctttatgaacttagtgtccattgtcatgcaatgtttttttttttccattctttttccctgtaattttggaatttctggtcctgggaagaatcaaacaaaatcttaagttctatgagaacttggttcattgacatattctgctgaagaaagaaaaattaaattggtagtaaaatatagtcttcaagtatacgtttgagagtgcttttttttgtattagttctgctgtcacttcatttcctgtattatatgtgatgtttttccccattaaaataccagagataatggagatattttgcactttagccttgatgaaaagtacaagatatgttcaaagcttccctaatttttttcttatttgtagccacataagtttcaagaataacatggcacacagaacaatggaaaaaagtttgtttccattggaaaattatatcattttgggttgccacatcagtttataaatttggcgctcttttaattacactctgtagaaggttaatagagcttgagccctgctttaatatgtagtgaaagataattctgtagaaaaacgtcagccagtagggtaaagtcattctactgttcttaatttttatattgaggaacaatattgggtgtttgggagccagaaagctttgttgacagatcagaaataagattgacttgggtgttatatttcatctctctccagactctaggtatatttccaactttatatatcacagtatttaaaaagacatgtttgcattgagaaattaaccctaaagggttttcaatagggtgtagacctccagtacctttgtaactaaagtctgtctagtcattgtaaatatttatctgtcagttttgacagattggggccagcttgatgttttaaatcttcagcccggtatgaaaacttaaaggtatatattcaattttttaccattttatggaaaatatttaaaatctgtttttacagggttttttttttttttttttttttgtaatctgtgccatgaaatttgaaaaccaccaaaaatcaagggaacttttatatattcaattccttttctggtgtaatgttaaagttgtatagattattaatgcatgcccactgaatataaccctggttttgtgataaaactgcttagattttgttgatgacattagattagtagttgcattaaataactaaattcccattgtgattaattgaaattttgtctttaagcagagagttatttgtgactataagctttgtgcttagagaatgtatgtgtttttatctgtcagtatgggaggatataaactgcatcattagtgaaattattggttgtgtaatcctttgtgaaatataattctaggtatttgatagggtattgagtgtattttgtgtgtgtgtggatgtgtgttttggggtacggggagaggcgatgctattggccatcactaccaaccagggtttcaaaaagtattacctaagtaatttcttttatcactatctcaactgaggaagaaaaggctcaccacaagtggtgtgaaggctttgggtacttagttctaaatttttttatggtaacatatacatagccacatttacagttttaaccattttaaggcatgtaattcagtggggttaggtacattcacaatgttgtgtaatgatcaccgctgtctacttgtaaaactttttcatcaccccaaacagaaactctgtgtgcaattaaagtaatgcatttctcttcttcttaacccct

SEQ ID NO: 450 - DNA, 3568 bp, human
ccggtcctgagacacgctgtgtggctgaaaagtgaaggcaagagctcatttggcctctgtgctcccctccgcaagggatcgtttctccagaagagctggatattctttcgcccagttatggcagacaagttaacgagaattgctattgtcaaccatgacaaatgtaaacctaagaaatgtcgacaggaatgcaaaaagagttgtcctgtagttcgaatgggaaaattatgcatagaggttacaccccagagcaaaatagcatggatttccgaaactctttgtattggttgtggtatctgtattaagaaatgcccctttggcgccttatcaattgtcaatctaccaagcaacttggaaaaagaaaccacacatcgatattgtgccaatgccttcaaacttcacaggttgcctatccctcgtccaggtgaagttttgggattagttggaactaatggtattggaaagtcagctgctttaaaaattttagcaggaaaacaaaagccaaaccttggaaagtacgatgatcctcctgactggcaggagattttgacttatttccgtggatctgaattacaaaattactttacaaagattctagaagatgacctaaaagccatcatcaaacctcaatatgtagccagattcctaaggctggcaaaggggacagtgggatctattttggaccgaaaagatgaaacaaagacacaggcaattgtatgtcagcagcttgatttaacccacctaaaagaacgaaatgttgaagatctttcaggaggagagttgcagagatttgcttgtgctgtcgtttgcatacagaaagctgatattttcatgtttgatgagccttctagttacctagatgtcaagcagcgtttaaaggctgctattactatacgatctctaataaatccagatagatatatcattgtggtggaacatgatctaagtgtattagactatctctccgacttcatctgctgtttatatggtgtaccaagcgcctatggagttgtcactatgccttttagtgtaagagaaggcataaacatttttttggatggctatgttccaacagaaaacttgagattcagagatgcatcacttgtttttaaagtggctgagacagcaaatgaagaagaagttaaaaagatgtgtatgtataaatatccaggaatgaagaaaaaaatgggagaatttgagctagcaattgtagctggagagtttacagattctgaaattatggtgatgctgggggaaaatggaacgggtaaaacgacatttatcagaatgcttgctggaagacttaaacctgatgaaggaggagaagtaccagttctaaatgtcagttataagccacagaaaattagtcccaaatcaactggaagtgttcgccagttactacatgaaaagataagagatgcttatactcacccacaatttgtgaccgatgtaatgaagcctctgcaaattgaaaacatcattgatcaagaggtgcagacattatctggtggtgaactacagcgagtacgtttacgcctttgcttgggcaaacctgctgatgtctatttaattgatgaaccatctgcatatttggattctgagcaaagactgatggcagctcgagttgtcaaacgtttcatactccatgcaaaaaagacagcctttgttgtggaacatgacttcatcatggccacctatctagcggatcgcgtcatcgtttttgatggtgttccatctaagaacacagttgcaaacagtcctcaaacccttttggctggcatgaataaatttttgtctcagcttgaaattacattcagaagagatccaaacaactataggccacgaataaacaaacttaattcaattaaggatgtagaacaaaagaagagtggaaactactttttcttggatgattagactgactctgagaatattgataagccatttattaaaaggagtatttactagaattttttgtcatataaaacttgaatcaggattttatgccccacatactctggaacttgaagtataatatacttaatataacataaaaagccagttgggttctaaattgtagttgaaacacagaaaatgccacttttctgttcctgaagaggctcttttgtgcataatattctaaaatgaagacatttcaagctatacaaattacttccaagttttcatgatgtatgggaagattttcagtaggtgtattatattcacggtaccaaatgctgaccagtgttgctccattttttaaatcttgaaaagggtttctgtacttacctggtttgccaagtatgccagtgtaatgaaactgcccttattttaaaagccagtcaaagattccactgattgacatttgataaataaacatcaggattatgtttattgtttgttttcagtctttgcactatattaccagtatatggtttccgaggaagattatctactgcaaaacaccactgttggaaaaataggtatttttaaattgtttttaatccttttttggtgcttttaaacatgtttaagcaaaaaccaattcagtccattccccgcaaaaaacccctaactttactctgaactttttttgtttttgcattccatgaggttctgtattcagtcattctctaggtaatgtcatttttgtacacatatatttatataatcactgattgagatttaggaaaaagcatttctaaagaatatttgcttcccttagaactacagactcgaaatctttaaagatggtgcctaagcatctatgtattttttttaagttccacagatttttctgttgggcaggccaaggattataaaccacttccctaaaggcaacattaatgcaaaagtccccagatggcaatacaaagtatcccctggtaccacatatattcatttgtgagtttggatatagagcacattatctaaaccattttgtagttccaaaaacccatctaaatttcttgagttcctgaattttgaacaggattacctggagcctggagccactttaagttgtacttctgactaaactggaattatgagtgaggaagagtgtttactaaataaatgactggggcaagcaaaattgaggaggaaattagaaactgtttgacaaactttaagagctacttgaaataacagaagtcttgattaatatgcaaataatggctagaaagtatggtttaactggaccctattatgccttttaaaaataatttcagtaacccataaatacatgttgtaaaaaattcaaatatacagaatggaataaaaaaatgatctccctttattaccctcccaaaggttaccagcgtttgaatttaataatgtatattctttcatgcttttttctgtgcacttacctaagtgtgaatatgtaaagggtttgttttgtatacaaatgggattatactaaaataagtaatgcctatttttaaggataggttaaatttgtgaatgatcatttcaaatatattgaataaaataagcaaaagctattgttatttactgatcctgaaaaaaaaaaaaaaaaaaaaaaaaaaaaaaaaaaaaaaaaaaa

SEQ ID NO: 451 - DNA, 2824 bp, human
ggagctgttgcggggtccgcggggaagtcttggcggtggagccatggtcggccaactgagcgagggggccattgcggccatcatgcagaagggggatacaaacataaagcccatcctccaagtcatcaacatccgtcccattactacggggaatagtccgccgcgttatcgactgctcatgagtgatggattgaacactctatcctctttcatgttggcgacacagttgaaccctctcgtggaggaagaacaattgtccagcaactgtgtatgccagattcacagatttattgtgaacactctgaaagacggaaggagagtagttatcttgatggaattagaagttttgaagtcagctgaagcagttggagtgaagattggcaatccagtgccctataatgaaggactcgggcagccgcaagtagctcctccagcgccagcagccagcccagcagcaagcagcaggccccagccgcagaatggaagctcgggaatgggttctactgtttctaaggcttatggtgcttcaaagacatttggaaaagctgcaggtcccagcctgtcacacacttctgggggaacacagtccaaagtggtgcccattgccagcctcactccttaccagtccaagtggaccatttgtgctcgtgttaccaacaaaagtcagatccgtacctggagcaactcccgaggggaagggaagcttttctccctagaactggttgacgaaagtggtgaaatccgagctacagctttcaatgagcaagtggacaagttctttcctcttattgaagtgaacaaggtgtattatttctcgaaaggcaccctgaagattgctaacaagcagttcacagctgttaaaaatgactacgagatgaccttcaataacgagacttccgtcatgccctgtgaggacgaccatcatttacctacggttcagtttgatttcacggggattgatgacctcgagaacaagtcgaaagactcacttgtagacatcatcgggatctgcaagagctatgaagacgccactaaaatcacagtgaggtctaacaacagagaagttgccaagaggaatatctacttgatggacacatctgggaaggtggtgactgctacactgtggggggaagatgctgataaatttgatggttctagacagcccgtgttggctatcaaaggagcccgagtctctgatttcggtggacggagcctctccgtgctgtcttcaagcactatcattgcgaatcctgacatcccagaggcctataagcttcgtggatggtttgacgcagaaggacaagccttagatggtgtttccatctctgatctaaagagcggcggagtcggagggagtaacaccaactggaaaaccttgtatgaggtcaaatccgagaacctgggccaaggcgacaagccggactactttagttctgtggccacagtggtgtatcttcgcaaagagaactgcatgtaccaagcctgcccgactcaggactgcaataagaaagtgattgatcaacagaatggattgtaccgctgtgagaagtgcgacaccgaatttcccaatttcaagtaccgcatgatcctgtcagtaaatattgcagattttcaagagaatcagtgggtgacttgtttccaggagtctgctgaagctatccttggacaaaatgctgcttatcttggggaattaaaagacaagaatgaacaggcatttgaagaagttttccagaatgccaacttccgatctttcatattcagagtcagggtcaaagtggagacctacaacgacgagtctcgaattaaggccactgtgatggacgtgaagcccgtggactacagagagtatggccgaaggctggtcatgagcatcaggagaagtgcattgatgtgagaggagcagtgccaatcgggcagaagtttgcaaataggcagaatggaatcgatttcctcccacctccgtgtgacgatcccatgttagctacacagtgcagaggctcttgatggtggactaagcaatttcctcccttgtgcgcatctcagaacccatcggtaggcaaaggaaaatacgctcaggtggttgtggtgtagactgtgtcaggcctacggagtcagccagtggctagcgcaagaccagtcactccctctgccttcaggcttctgtcaatttcattatcatcaagcaggaattatgtcgtaagtcactgaccctaactgcagaccatgaagtaaattatgtaactaggtttttgcttctccagtggtgaccaccccccccccatccccgctcacaacttgggttcttctcagcggggcgagctgagaagcggtcatgagcacctggggattttagtaagtgtgtcttcctagaattcgaaggctctctctttctagaggtgctacatagttggtaatgcttggaatggcaatagggtagaatgattaatcaaaggcatatcttctatatctgaagagtatccttccttcagggtttaatagactgagtcagatgggtctgatattaatcaaaattgtctcttctgaggaccgctgataagcattgacttgctgtcccctaaggaaatccgagcggctacaaagcgtttctttacttttcacttcaattaatgctgcgcttcgcttggtgagtgcgtactttttctacctgtacacattcctgcattcatgtattttgttttttttgactaaagctatgttacatggaaaggattttgaagccttttgtttcccttgctttgttttaataaacagtatattctttggttgtgaatcctaaaaaaaaaaaaaaaaaaaaaaaaaaaaa

SEQ ID NO: 452 - DNA, 950 bp, human
gggaccttaattctctttcccatcttgcaagatggcgggtgaaaaagttgagaagccagatactaaagagaagaaacccgaagccaagaaggttgatgctggtggcaaggtgaaaaagggtaacctcaaagctaaaaagcccaagaaggggaagccccattgcagccgcaaccctgtccttgtcagaggaattggcaggtattcccgatctgccatgtattccagaaaggccatgtacaagaggaagtactcagccgctaaatccaaggttgaaaagaaaaagaaggagaaggttctcgcaactgttacaaaaccagttggtggtgacaagaacggcggtacccgggtggttaaacttcgcaaaatgcctagatattatcctactgaagatgtgcctcgaaagctgttgagccacggcaaaaaacccttcagtcagcacgtgagaaaactgcgagccagcattacccccgggaccattctgatcatcctcactggacgccacaggggcaagagggtggttttcctgaagcagctggctagtggcttattacttgtgactggacctctggtcctcaatcgagttcctctacgaagaacacaccagaaatttgtcattgccacttcaaccaaaatcgatatcagcaatgtaaaaatcccaaaacatcttactgatgcttacttcaagaagaagaagctgcggaagcccagacaccaggaaggtgagatcttcgacacagaaaaagagaaatatgagattacggagcagcgcaagattgatcagaaagctgtggactcacaaattttaccaaaaatcaaagctattcctcagctccagggctacctgcgatctgtgtttgctctgacgaatggaatttatcctcacaaattggtgttctaaatgtcttaagaacctaattaaatagctgactacaaaaaaaaaaaaaaaaaaa

SEQ ID NO: 453 - DNA, 890 bp, human
tttcctttctctctcctcccgccgcccaagatgccgaaaggaaagaaggccaagggaaagaaggtggctccggccccagctgtcgtgaagaagcaggaggctaagaaagtggtgaatcccctgtttgagaaaaggcctaagaattttggcattggacaggacatccagcccaaaagagacctcacccgctttgtgaaatggccccgctatatcaggttgcagcggcagagagccatcctctataagcggctgaaagtgcctcctgcgattaaccagttcacccaggccctggaccgccaaacagctactcagctgcttaagctggcccacaagtacagaccagagacaaagcaagagaagaagcagagactgttggcccgggccgagaagaaggctgctggcaaaggggacgtcccaacgaagagaccacctgtccttcgagcaggagttaacaccgtcaccaccttggtggagaacaagaaagctcagctggtggtgattgcacacgacgtggatcccatcgagctggttgtcttcttgcctgccctgtgtcgtaaaatgggggtcccttactgcattatcaagggaaaggcaagactgggacgtctagtccacaggaagacctgcaccactgtcgccttcacacaggtgaactcggaagacaaaggcgctttggctaagctggtggaagctatcaggaccaattacaatgacagatacgatgagatccgccgtcactggggtggcaatgtcctgggtcctaagtctgtggctcgtatcgccaagctcgaaaaggcaaaggctaaagaacttgccactaaactgggttaaatgtacactgttgagttttctgtacataaaaataattgaaataatacaaattttccttc

SEQ ID NO: 454 - DNA, 894 bp, human
ggccgcgctggtgaacaggacccgtcgccatgggccgtgtgatccgtggacagaggaagggcgccgggtctgtgttccgcgcgcacgtgaagcaccgtaaaggcgctgcgcgcctgcgcgccgtggatttcgctgagcggcacggctacatcaagggcatcgtcaaggacatcatccacgacccgggccgcggcgcgcccctcgccaaggtggtcttccgggatccgtatcggtttaagaagcggacggagctgttcattgccgccgagggcattcacacgggccagtttgtgtattgcggcaagaaggcccagctcaacattggcaatgtgctccctgtgggcaccatgcctgagggtacaatcgtgtgctgcctggaggagaagcctggagaccgtggcaagctggcccgggcatcagggaactatgccaccgttatctcccacaaccctgagaccaagaagacccgtgtgaagctgccctccggctccaagaaggttatctcctcagccaacagagctgtggttggtgtggtggctggaggtggccgaattgacaaacccatcttgaaggctggccgggcgtaccacaaatataaggcaaagaggaactgctggccacgagtacggggtgtggccatgaatcctgtggagcatccttttggaggtggcaaccaccagcacatcggcaagccctccaccatccgcagagatgcccctgctggccgcaaagtgggtctcattgctgcccgccggactggacgtctccggggaaccaagactgtgcaggagaaagagaactagtgctgagggcctcaataaagtttgtgtttatgccaaaaaaaaaaaaaaaaaaaaaaaaaaaaaaaaaaaaaaaaaaaaaaaaaaaaaaaaa

SEQ ID NO: 455 - DNA, 716 bp, human
ttctttctttgctgcgtctactgcgagaatgaagactattctcagcaatcagactgtcgacattccagaaaatgtcgacattactctgaagggacgcacagttatcgtgaagggccccagaggaaccctgcggagggacttcaatcacatcaatgtagaactcagccttcttggaaagaaaaaaaagaggctccgggttgacaaatggtggggtaacagaaaggaactggctaccgttcggactatttgtagtcatgtacagaacatgatcaagggtgttacactgggcttccgttacaagatgaggtctgtgtatgctcacttccccatcaacgttgttatccaggagaatgggtctcttgttgaaatccgaaatttcttgggtgaaaaatacatccgcagggttcggatgagaccaggtgttgcttgttcagtatctcaagcccagaaagatgaattaatccttgaaggaaatgacattgagcttgtttcaaattcagcggctttgattcagcaagccacaacagttaaaaacaaggatatcaggaaatttttggatggtatctatgtctctgaaaaaggaactgttcagcaggctgatgaataagatctaagagttacctggctacagaaagaagatgccagatgacacttaagacctacttgtgatatttaaatgatgcaataaaagacctattgatttggaccttcttctt

SEQ ID NO: 456 - DNA, 632 bp, human
ctctcggctttcggctcggaggaggccaaggtgcaacttccttcggtcgtcccgaatccgggttcatccgacaccagccgcctccaccatgccgccgaagttcgaccccaacgagatcaaagtcgtatacctgaggtgcaccggaggtgaagtcggtgccacttctgccctggcccccaagatcggccccctgggtctgtctccaaaaaaagttggtgatgacattgccaaggcaacgggtgactggaagggcctgaggattacagtgaaactgaccattcagaacagacaggcccagattgaggtggtgccttctgcctctgccctgatcatcaaagccctcaaggaaccaccaagagacagaaagaaacagaaaaacattaaacacagtgggaatatcacttttgatgagattgtcaacattgctcgacagatgcggcaccgatccttagccagagaactctctggaaccattaaagagatcctggggactgcccagtcagtgggctgtaatgttgatggccgccatcctcatgacatcatcgatgacatcaacagtggtgctgtggaatgcccagccagttaagcacaaaggaaaacatttcaataaaggatcatttgacaactggtga

SEQ ID NO: 457 - DNA, 1296 bp, human
ctgggtcctggcctttgggcatcatccagcgccatcggcctggcgcttcagccaacgcgggagtggatgggccccttcttcttcgcagacagcgttcggccgctgcccgggctctaggcgcggccggacggcccagtctggagggttcggggcggaggcccgggggggtgcgcgcgcccggggtccggcctctcactcgctcccctctcgtccgcagccgcagggccgtaggcagccatggcgcccagccggaatggcatggtcttgaagccccacttccacaaggactggcagcggcgcgtggccacgtggttcaaccagccggcccgtaagatccgcagacgtaaggcccggcaagccaaggcgcgccgcatcgccccgcgccccgcgtcgggtcccatccggcccatcgtgcgctgccccacggttcggtaccacacgaaggtgcgcgccggccgcggcttcagcctggaggagctcagggtggccggcattcacaagaaggtggcccggaccatcggcatttctgtggatccgaggaggcggaacaagtccacggagtccctgcaggccaacgtgcagcggctgaaggagtaccgctccaaactcatcctcttccccaggaagccctcggcccccaagaagggagacagttctgctgaagaactgaaactggccacccagctgaccggaccggtcatgcccgtccggaacgtctataagaaggagaaagctcgagtcatcactgaggaagagaagaatttcaaagccttcgctagtctccgtatggcccgtgccaacgcccggctcttcggcatacgggcaaaaagagccaaggaagccgcagaacaggatgttgaaaagaaaaaataaagccctcctggggacttggaatcagtcggcagtcatgctgggtctccacgtggtgtgtttcgtgggaacaactgggcctgggatggggcttcactgctgtgacttcctcctgccaggggatttggggctttcttgaaagacagtccaagccctggataatgctttactttctgtgttgaagcactgttggttgtttggttagtgactgatgtaaaacggttttcttgtggggaggttacagaggctgacttcagagtggacttgtgttttttctttttaaagaggcaaggttgggctggtgctcacagctgtaatcccagcactttgaggttggctgggagttcaagaccagcctggccaacatgtcagaactactaaaaataaagaaatcagccatgaaaaaaaaaaaaaaaaaaaaaaaaa

SEQ ID NO: 458 - DNA, 898 bp, human
tcctctttccctaagcagcctgagggttgactggattggtgaggcccgtgtggctacttctgtggaagcagtgctgtagttactggaagataaaagggaaagcaagcccttggtgggggaaagtatggctgcgatgatggcatttcttaggacacctttggattaataatgaaaacaactactctctgagcagctgttcgaatcatctgatatttatactgaatgagttactgtaagtacgtattgacagaattacactgtactttcctctaggtgatctgtgaaaatggttcgctattcacttgacccggagaaccccacgaaatcatgcaaatcaagaggttccaatcttcgtgttcactttaagaacactcgtgaaactgctcaggccatcaagggtatgcatatacgaaaagccacgaagtatctgaaagatgtcactttacagaaacagtgtgtaccattccgacgttacaatggtggagttggcaggtgtgcgcaggccaagcaatggggctggacacaaggtcggtggcccaaaaagagtgctgaatttttgctgcacatgcttaaaaacgcagagagtaatgctgaacttaagggtttagatgtagattctctggtcattgagcatatccaagtgaacaaagcacctaagatgcgccgccggacctacagagctcatggtcggattaacccatacatgagctctccctgccacattgagatgatccttacggaaaaggaacagattgttcctaaaccagaagaggaggttgcccagaagaaaaagatatcccagaagaaactgaagaaacaaaaacttatggcacgggagtaaattcagcattaaaataaatgtaattaaaaggaaaaaaaaaaaaaaaaaaaaaaaaaa

SEQ ID NO: 459 - DNA, 618 bp, human
cttttgcgggtggcggcgaacgcggagagcacgccatgaaggcctcgggcacgctacgagagtacaaggtagtgggtcgctgcctgcccacccccaaatgccacacgccgcccctctaccgcatgcgaatctttgcgcctaatcatgtcgtcgccaagtcccgcttctggtactttgtatctcagttaaagaagatgaagaagtcttcaggggagattgtctactgtgggcaggtgtttgagaagtcccccctgcgggtgaagaacttcgggatctggctgcgctatgactcccggagcggcacccacaacatgtaccgggaataccgggacctgaccaccgcaggcgctgtcacccagtgctaccgagacatgggtgcccggcaccgcgcccgagcccactccattcagatcatgaaggtggaggagatcgcggccagcaagtgccgccggccggctgtcaagcagttccacgactccaagatcaagttcccgctgccccaccgggtcctgcgccgtcagcacaagccacgcttcaccaccaagaggcccaacaccttcttctaggtgcagggccctcgtccgggtgtgccccaaataaactcaggaacgccccggt

SEQ ID NO: 460 - DNA, 546 bp, human
attggagacccttttcacaagatggcgccgaaagcgaagaaggaagctcctgcccctcctaaagctgaagccaaagcgaaggctttaaaggccaagaaggcagtgttgaaaggtgtccacagccacaaaaagaagaagatccgcacgtcacccaccttccggcggccgaagacactgcgactccggagacagcccaaatatcctcggaagagcgctcccaggagaaacaagcttgaccactatgctatcatcaagtttccgctgaccactgagtctgccatgaagaagatagaagacaacaacacacttgtgttcattgtggatgttaaagccaacaagcaccagattaaacaggctgtgaagaagctgtatgacattgatgtggccaaggtcaacaccctgattcggcctgatggagagaagaaggcatatgttcgactggctcctgattacgatgctttggatgttgccaacaaaattgggatcatctaaactgagtccagctgcctaattctgaatatatatatatatatatcttttcaccat

SEQ ID NO: 461 - DNA, 701 bp, human
gggcgggcgcgctgctccttccgcctcgcggaccccggaagcgcgcgtggccgccatggcgcggaatgtggtgtaccccctgtaccggctgggtggcccacaacttcgggtgttccgaaccaacttcttcattcagctggtgcggcccggtgtggcccagcccgaggacaccgtgcagttccggatccccatggaaatgacaagggtggacctcaggaattacctcgagggcatctataacgtgcccgtggctgctgtgcggacacgggtgcagcatggctctaacaagagaagagatcacagaaacgtgaggatcaagaagccggactacaaggtcgcctacgtgcagctggcccatggacagaccttcacgttcccagatctgtttcccgagaaagacgagagccctgaaggcagcactgccgacgacctctacagcatgctcgaggaggagaggcagcagaggcagagcagcgacccgcggcggggcggcgtccccagctggttcgggctgtgacggggtggccagcagggacgcgccccaggtgggcagctgtggcagagcagcgacccgcggcggggcggcatccccagctggttcgggccgtgacggggcggccagcagggacgcgccccaggtgggcagctgtggcagagcagtcccgacacctaaataaaagtcttgctgcaggagaaagaaa

SEQ ID NO: 462 - DNA, 525 bp, human
cttcccttttgcggccatcaccgaagcgggagcggccaaaatgaagtttaatccctttgtgacttccgaccgaagcaagaatcgcaaaaggcatttcaatgcaccttcccacattcgaaggaagattatgtcttcccctctttccaaagagctgagacagaagtacaacgtgcgatccatgcccatccgaaaggatgatgaagttcaggttgtacgtggacactataaaggtcagcaaattggcaaagtagtccaggtttacaggaagaaatatgttatctacattgaacgggtgcagcgggaaaaggctaatggcacaactgtccacgtaggcattcaccccagcaaggtggttatcactaggctaaaactggacaaagaccgcaaaaagatcctcgaacggaaagccaaatctcgccaagtaggaaaggaaaagggcaaatacaaggaagaaaccattgagaagatgcaggaataaagtaatcttatatacaagctttgattaaaacttgaaacaaagaaaaa

SEQ ID NO: 463 - DNA, 524 bp, human
cctttctcgttccccggccatcttagcggctgctgttggttgggggccgtcccgctcctaaggcaggaagatggtggccgcaaagaagacgaaaaagtcgctggagtcgatcaactctaggctccaactcgttatgaaaagtgggaagtacgtcctggggtacaagcagactctgaagatgatcagacaaggcaaagcgaaattggtcattctcgctaacaactgcccagctttgaggaaatctgaaatagagtactatgctatgttggctaaaactggtgtccatcactacagtggcaataatattgaactgggcacagcatgcggaaaatactacagagtgtgcacactggctatcattgatccaggtgactctgacatcattagaagcatgccagaacagactggtgaaaagtaaaccttttcacctacaaaatttcacctgcaaaccttaaacctgcaaaattttcctttaataaaatttgcttgttttaaaaacattgtaaaaaaaaaaaaaaaaaaaa

SEQ ID NO: 464 - DNA, 514 bp, human
ctttttcgtctgggctgccaacatgccatccagactgaggaagacccggaaacttaggggccacgtgagccacggccacggccgcataggcaagcaccggaagcaccccggcggccgcggtaatgctggtggtctgcatcaccaccggatcaacttcgacaaataccacccaggctactttgggaaagttggtatgaagcattaccacttaaagaggaaccagagcttctgcccaactgtcaaccttgacaaattgtggactttggtcagtgaacagacacgggtgaatgctgctaaaaacaagactggggctgctcccatcattgatgtggtgcgatcgggctactacaaagttctgggaaagggaaagctcccaaagcagcctgtcatcgtgaaggccaaattcttcagcagaagagctgaggagaagattaagagtgttgggggggcctgtgtcctggtggcttgaagccacatggagggagtttcattaaatgctaactacttttaaaaa

SEQ ID NO: 465 - DNA, 737 bp, human
ttccggcgttgttgaccctatttcccgtgctgcaccgcagcccctttctcttccggttctaggcgcttcgggagccgcggcttatggtgcagacatggccaagtccaagaaccacaccacacacaaccagtcccgaaaatggcacagaaatggtatcaagaaaccccgatcacaaagatacgaatctcttaagggggtggaccccaagttcctgaggaacatgcgctttgccaagaagcacaacaaaaagggcctaaagaagatgcaggccaacaatgccaaggccatgagtgcacgtgccgaggctatcaaggccctcgtaaagcccaaggaggttaagcccaagatcccaaagggtgtcagccgcaagctcgatcgacttgcctacattgcccaccccaagcttgggaagcgtgctcgtgcccgtattgccaaggggctcaggctgtgccggccaaaggccaaggccaaggccaaggccaaggatcaaaccaaggcccaggctgcagccccagcttcagttccagctcaggctcccaaacgtacccaggcccctacaaaggcttcagagtagatatctctgccaacatgaggacagaaggactggtgcgaccccccacccccgcccctgggctaccatctgcatggggctggggtcctcctgtgctatttgtacaaataaacctgaggcaggaaaaaaaaaaaaaaaaaaaaaaaaaaaaaaaaaaaaaaaaaaa

SEQ ID NO: 466 - DNA, 521 bp, human
tcttcctcggcgctgcctacggaggtggcagccatctccttctcggcatcatggccgccctcagaccccttgtgaagcccaagatcgtcaaaaagagaaccaagaagttcatccggcaccagtcagaccgatatgtcaaaattaagcgtaactggcggaaacccagaggcattgacaacagggttcgtagaagattcaagggccagatcttgatgcccaacattggttatggaagcaacaaaaaaacaaagcacatgctgcccagtggcttccggaagttcctggtccacaacgtcaaggagctggaagtgctgctgatgtgcaacaaatcttactgtgccgagatcgctcacaatgtttcctccaagaaccgcaaagccatcgtggaaagagctgcccaactggccatcagagtcaccaaccccaatgccaggctgcgcagtgaagaaaatgagtaggcagctcatgtgcacgttttctgtttaaataaatgtaaaaactgccatctggcatcttccttc

SEQ ID NO: 467 - DNA, 849 bp, human
tttttttttcttcctcttccggggacgttgtctgcaggcactcagaatggtccagcgtttgacataccgacgtaggctttcctacaatacagcctctaacaaaactaggctgtcccgaacccctggtaatagaattgtttacctttataccaagaaggttgggaaagcaccaaaatctgcatgtggtgtgtgcccaggcagacttcgaggggttcgtgctgtaagacctaaagttcttatgagattgtccaaaacaaagaaacatgtcagcagggcctatggtggttccatgtgtgctaaatgtgttcgtgacaggatcaagcgtgctttccttatcgaggagcagaaaatcgttgtgaaagtgttgaaggcacaagcacagagtcagaaagctaaataaaaaaatgaaacttttttgagtaataaaaatgaaaagacgctgtccaatagaaaaagttggtgtgctggagctacctcacctcagcttgagagagccagttgtgtgcatctctttccagttttgcatccagtgacgtctgcttggcatcttgagattgttatggtgagagtatttacacctcagcaaatgctgcaaaatcctgttttcccccagagagctggaggttaaatactaccagcacatccctagatactactcaagttacagtatatgatcactaatatagtatgctcttggtaccaggagctctgatatatatctggtacatgtttgataatgacttgattgttattataagtacttattaatacttcgattctgtaaagagtttagggtttgattttataaaatccaaaatgagccttttattgaaaaaaaaaaaaaaaaaa

SEQ ID NO: 468 - DNA, 511 bp, human
ggcctcgtccttctcttaccgccatcttggctcctgtggaggcctgctgggaacgggacttctaaaaggaactatgtctggaaggctgtggtccaaggccatttttgctggctataagcggggtctccggaaccaaagggagcacacagctcttcttaaaattgaaggtgtttacgcccgagatgaaacagaattctatttgggcaagagatgcgcttatgtatataaagcaaagaacaacacagtcactcctggcggcaaaccaaacaaaaccagagtcatctggggaaaagtaactcgggcccatggaaacagtggcatggttcgtgccaaattccgaagcaatcttcctgctaaggccattggacacagaatccgagtgatgctgtacccctcaaggatttaaactaacgaaaaatcaataaataaatgtggatttgtgctcttgtatttttaagtggattaaaaaacttactaccttaaaaaaaaaaaaaaaaaaaaaaaaaaaaaa

SEQ ID NO: 469 - DNA, 549 bp, human
cctttcctgttaggcgagagctgcgaaaggcgagagctgcgaagggccaggtgtcgggcgctgtttctcgttttcatcatatagacaaaacagccctgctgcaaagatggtcaacgtacctaaaacccgaagaaccttctgtaagaagtgtggcaagcatcagcctcacaaagtgacacagtataagaagggcaaggattctttgtatgcccagggaaggaggcgctatgatcggaagcagagtggctatggtgggcagacaaagccaattttccggaagaaggctaagaccacaaagaagattgtgctaaggctggaatgtgttgagcctaactgcagatccaagaggatgctggccattaagagatgcaagcattttgaactgggaggagataagaagagaaagggccaagtgatccagttctaaactttgggatatttttcttcaattttgaagagaaaatggtgaagccatagaaaagttacccgagggaaaataaatacagtgatattcttacgcaaaaaaaaaaaaaaaaaaaaaaaaaaaaa

SEQ ID NO: 470 - DNA, 392 bp, human
cttcctttctgggctcggacctaggtcgcggcgacatggccaaacgtaccaagaaagtcgggatcgtcggtaaatacgggacccgctatggggcctccctccggaaaatggtgaagaaaattgaaatcagccagcacgccaagtacacttgctctttctgtggcaaaaccaagatgaagagacgagctgtggggatctggcactgtggttcctgcatgaagacagtggctggcggtgcctggacgtacaataccacttccgctgtcacggtaaagtccgccatcagaagactgaaggagttgaaagaccagtagacgctcctctactctttgagacatcactggcctataataaatgggttaatttatgtaacaaaaaaaaaaaaaaaaaaa

SEQ ID NO: 471 - DNA, 512 bp, human
cctttcctcagctgccgccaaggtgctcggtccttccgaggaagctaaggctgcgttggggtgaggccctcacttcatccggcgactagcaccgcgtccggcagcgccagccctacactcgcccgcgccatggcctctgtctccgagctcgcctgcatctactcggccctcattctgcacgacgatgaggtgacagtcacggaggataagatcaatgccctcattaaagcagccggtgtaaatgttgagcctttttggcctggcttgtttgcaaaggccctggccaacgtcaacattgggagcctcatctgcaatgtaggggccggtggacctgctccagcagctggtgctgcaccagcaggaggtcctgccccctccactgctgctgctccagctgaggagaagaaagtggaagcaaagaaagaagaatccgaggagtctgatgatgacatgggctttggtctttttgactaaacctcttttataacatgttcaataaaaagctgaacttt

SEQ ID NO: 472 - DNA, 482 bp, human
ttccttttcctccctgtcgccaccgaggtcgcacgcgtgagacttctccgccgcctccgccgcagacgccgccgcgatgcgctacgtcgcctcctacctgctggctgccctagggggcaactcctcccccagcgccaaggacatcaagaagatcttggacagcgtgggtatcgaggcggacgacgaccggctcaacaaggttatcagtgagctgaatggaaaaaacattgaagacgtcattgcccagggtattggcaagcttgccagtgtacctgctggtggggctgtagccgtctctgctgccccaggctctgcagcccctgctgctggttctgcccctgctgcagcagaggagaagaaagatgagaagaaggaggagtctgaagagtcagatgatgacatgggatttggcctttttgattaaattcctgctcccctgcaaataaagcctttttacacatctcaaaaaaaaaaaaaaaaaa

SEQ ID NO: 473 - DNA, 1052 bp, human
gctcgaatgcccggcagccgtggcggctagagcgttcctccccagctcgaatgcccggcggccgaggcggctagagcgtcgcctcctcccggggaaccgcgtgtgaccttccagcccgcggaccgatgctgccggcggccgctcgccccctgtgggggccttgccttgggcttcgggccgctgcgttccgccttgccaggcgacaggtgccatgtgtctgtgccgtgcgacatatgaggagcagcggccatcagaggtgtgaggccctcgctggtgcacccctggataacgcccccaaggagtacccccccaagatacagcagctggtccaggacatcgccagcctcactctcttggaaatctcagacctcaacgagctcctgaagaaaacgttgaagatccaggatgtcgggcttgtgccgatgggtggtgtgatgtctggggctgtccctgctgcagcagcccaggaggcggtggaagaagatatccccatagcgaaagaacggacacatttcaccgtccgcctgaccgaggcgaagcccgtggacaaagtgaagctgatcaaggaaatcaagaactacatccaaggcatcaacctcgtccaggcaaagaagctggtggagtccctgccccaggaaatcaaagccaatgtcgccaaagctgaggcggagaagatcaaggcggccctggaggcggtgggcggcaccgtggttctggagtagcctccagctcggaggacttgtgttcaggggtcctgggccccgggcgaggtcccgccctcccgtggtcactggctccgcccccagcaccaggcgcccagtggagccgtttgggagaattgcctgcgccacgcagcggggccggacaggccgcacagacctactgtggcgggagggaggggcggctgctgcctggtgacggcacccggaggcccaccaggacgcgccaccggtgaatgtgcctctggtggctgctgagaaaaatacactgtgcagctcagaaaaaaaaaaaaaaaaaaaaaaaaaaaaaaaaaaaaaaaaaaaaaaaaaaaa

SEQ ID NO: 474 - DNA, 978 bp, human
caaaacaccaaatggcggatgacgccggtgcagcgggggggcccgggggccctggtggccctgggatggggaaccgcggtggcttccgcggaggtttcggcagtggcatccggggccggggtcgcggccgtggacggggccggggccgaggccgcggagctcgcggaggcaaggccgaggataaggagtggatgcccgtcaccaagttgggccgcttggtcaaggacatgaagatcaagtccctggaggagatctatctcttctccctgcccattaaggaatcagagatcattgatttcttcctgggggcctctctcaaggatgaggttttgaagattatgccagtgcagaagcagacccgtgccggccagcgcaccaggttcaaggcatttgttgctatcggggactacaatggccacgtcggtctgggtgttaagtgctccaaggaggtggccaccgccatccgtggggccatcatcctggccaagctctccatcgtccccgtgcgcagaggctactgggggaacaagatcggcaagccccacactgtcccttgcaaggtgacaggccgctgcggctctgtgctggtacgcctcatccctgcacccaggggcactggcatcgtctccgcacctgtgcctaagaagctgctcatgatggctggtatcgatgactgctacacctcagcccggggctgcactgccaccctgggcaacttcgccaaggccacctttgatgccatttctaagacctacagctacctgacccccgacctctggaaggagactgtattcaccaagtctccctatcaggagttcactgaccacctcgtcaagacccacaccagagtctccgtgcagcggactcaggctccagctgtggctacaacatagggtttttatacaagaaaaataaagtgaattaagcgtgaaaaaaaaaaaaaaaaaaaaaaaaaaaaaaaaaaaaaaaaaaaaaaaa

SEQ ID NO: 475 - DNA, 2346 bp, human
gcacgaggctgcggcgggtccgggcccatgaggcgacgaaggaggcgggacggcttttacccagccccggacttccgagacagggaagctgaggacatggcaggagtgtttgacatagacctggaccagccagaggacgcgggctctgaggatgagctggaggaggggggtcagttaaatgaaagcatggaccatgggggagttggaccatatgaacttggcatggaacattgtgagaaatttgaaatctcagaaactagtgtgaacagagggccagaaaaaatcagaccagaatgttttgagctacttcgggtacttggtaaagggggctatggaaaggtttttcaagtacgaaaagtaacaggagcaaatactgggaaaatatttgccatgaaggtgcttaaaaaggcaatgatagtaagaaatgctaaagatacagctcatacaaaagcagaacggaatattctggaggaagtaaagcatcccttcatcgtggatttaatttatgcctttcagactggtggaaaactctacctcatccttgagtatctcagtggaggagaactatttatgcagttagaaagagagggaatatttatggaagacactgcctgcttttacttggcagaaatctccatggctttggggcatttacatcaaaaggggatcatctacagagacctgaagccggagaatatcatgcttaatcaccaaggtcatgtgaaactaacagactttggactatgcaaagaatctattcatgatggaacagtcacacacacattttgtggaacaatagaatacatggcccctgaaatcttgatgagaagtggccacaatcgtgctgtggattggtggagtttgggagcattaatgtatgacatgctgactggagcacccccattcactggggagaatagaaagaaaacaattgacaaaatcctcaaatgtaaactcaatttgcctccctacctcacacaagaagccagagatctgcttaaaaagctgctgaaaagaaatgctgcttctcgtctgggagctggtcctggggacgctggagaagttcaagctcatccattctttagacacattaactgggaagaacttctggctcgaaaggtggagcccccctttaaacctctgttgcaatctgaagaggatgtaagtcagtttgattccaagtttacacgtcagacacctgtcgacagcccagatgactcaactctcagtgaaagtgccaatcaggtctttctgggttttacatatgtggctccatctgtacttgaaagtgtgaaagaaaagttttcctttgaaccaaaaatccgatcacctcgaagatttattggcagcccacgaacacctgtcagcccagtcaaattttctcctggggatttctggggaagaggtgcttcggccagcacagcaaatcctcagacacctgtggaatacccaatggaaacaagtggcatagagcagatggatgtgacaatgagtggggaagcatcggcaccacttccaatacgacagccgaactctgggccatacaaaaaacaagcttttcccatgatctccaaacggccagagcacctgcgtatgaatctatgacagagcaatgcttttaatgaatttaaggcaaaaaggtggagagggagatgtgtgagcatcctgcaaggtgaaacaagactcaaaatgacagtttcagagagtcaatgtcattacatagaacacttcggacacaggaaaaataaacgtggattttaaaaaatcaatcaatggtgcaaaaaaaaacttaaagcaaaatagtattgctgaactcttaggcacatcaattaattgattcctcgcgacatctttctcaaccttatcaaggattttcatgttgatgactcgaaactgacagtattaagggtaggatgttgctctgaatcactgtgagtctgatgtgtgaagaagggtatcctttcattaggcaagtacaaattgcctataatacttgcaactaaggacaaattagcatgcaagcttggtcaaacttttcccaggcaaaatgggaaggcaaagacaaaagaaacttaccaattgatgttttacgtgcaaacaacctgaatcttttttttatataaatatatatttttcaaatagatttttgattcagctcattatgaaaaacatcccaaactttaaaatgcgaaattattggttggtgtgaagaaagccagacaacttctgtttcttctcttggtgaaataataaaatgcaaatgaatcattgttaacacagctgtggctcgtttgagggattggggtggacctggggtttattttcagtaacccagctgcggagcct

SEQ ID NO: 476 - DNA, 598 bp, human
ctccttcttttccagccccggtaccggaccctgcagccgcagagatgttgatgcctaagaagaaccggattgccatttatgaactcctttttaaggagggagtcatggtggccaagaaggatgtccacatgcctaagcacccggagctggcagacaagaatgtgcccaaccttcatgtcatgaaggccatgcagtctctcaagtcccgaggctacgtgaaggaacagtttgcctggagacatttctactggtaccttaccaatgagggtatccagtatctccgtgattaccttcatctgcccccggagattgtgcctgccaccctacgccgtagccgtccagagactggcaggcctcggcctaaaggtctggagggtgagcgacctgcgagactcacaagaggggaagctgacagagatacctacagacggagtgctgtgccacctggtgccgacaagaaagccgaggctggggctgggtcagcaaccgaattccagtttagaggcggatttggtcgtggacgtggtcagccacctcagtaaaattggagaggattcttttgcattgaataaacttacagccaaaaaaccttaaaaaa

SEQ ID NO: 477 - DNA, 534 bp, human
ctttccctgccgccgccgagtcgcgcggaggcggaggcttgggtgcgttcaagattcagcttcacccgtaacccaccgccatggccgaggaaggcattgctgctggaggtgtaatggacgttaatactgctttacaagaggttctgaagactgccctcatccacgatggcctagcacgtggaattcgcgaagctgccaaagccttagacaagcgccaagcccatctttgtgtgcttgcatccaactgtgatgagcctatgtatgtcaagttggtggaggccctttgtgctgaacaccaaatcaacctaattaaggttgatgacaacaagaaactaggagaatgggtaggcctttgtaaaattgacagagaggggaaaccccgtaaagtggttggttgcagttgtgtagtagttaaggactatggcaaggagtctcaggccaaggatgtcattgaagagtatttcaaatgcaagaaatgaagaaataaatctttggctcacaaaaaaaaaaaaaaaaaaaaaaaaaaaaaaaaaa

SEQ ID NO: 478 - DNA, 529 bp, human
cgctctcctttcgttgcctgatcgccgccatcatgggtcgcatgcatgctcccgggaagggcctgtcccagtcggctttaccctatcgacgcagcgtccccacttggttgaagttgacatctgacgacgtgaaggagcagatttacaaactggccaagaagggccttactccttcacagatcggtgtaatcctgagagattcacatggtgttgcacaagtacgttttgtgacaggcaataaaattttaagaattcttaagtctaagggacttgctcctgatcttcctgaagatctctaccatttaattaagaaagcagttgctgttcgaaagcatcttgagaggaacagaaaggataaggatgctaaattccgtctgattctaatagagagccggattcaccgtttggctcgatattataagaccaagcgagtcctccctcccaattggaaatatgaatcatctacagcctctgccctggtcgcataaatttgtctgtgtactcaagcaataaaatgattgtttaacta

SEQ ID NO: 479 - DNA, 589 bp, human
ctccgccctctcccactctctctttccggtgtggagtctggagacgacgtgcagaaatggcacctcgaaaggggaaggaaaagaaggaagaacaggtcatcagcctcggacctcaggtggctgaaggagagaatgtatttggtgtctgccatatctttgcatccttcaatgacacttttgtccatgtcactgatctttctggcaaggaaaccatctgccgtgtgactggtgggatgaaggtaaaggcagaccgagatgaatcctcaccatatgctgctatgttggctgcccaggatgtggcccagaggtgcaaggagctgggtatcaccgccctacacatcaaactccgggccacaggaggaaataggaccaagacccctggacctggggcccagtcggccctcagagcccttgcccgctcgggtatgaagatcgggcggattgaggatgtcacccccatcccctctgacagcactcgcaggaaggggggtcgccgtggtcgccgtctgtgaacaagattcctcaaaatattttctgttaataaattgccttcatgtaaaaaaaaaaaaaaaaaaaaaaaaaaaaaaaa

SEQ ID NO: 480 - DNA, 515 bp, human
ctgcgcaggcgcggaccaaagcgatctcttctgaggatccggcaagatggcagaagtagagcagaagaagaagcggaccttccgcaagttcacctaccgcggcgtggacctcgaccagctgctggacatgtcctacgagcagctgatgcagctgtacagtgcgcgccagcggcggcggctgaaccggggcctgcggcggaagcagcactccctgctgaagcgcctgcgcaaggccaagaaggaggcgccgcccatggagaagccggaagtggtgaagacgcacctgcgggacatgatcatcctacccgagatggtgggcagcatggtgggcgtctacaacggcaagaccttcaaccaggtggagatcaagcccgagatgatcggccactacctgggcgagttctccatcacctacaagcccgtaaagcatggccggcccggcatcggggccacccactcctcccgcttcatccctctcaagtaatggctcagctaataaaggcgcacatgactcc

SEQ ID NO: 481 - DNA, 621 bp, human
aaggcgcctgcgcagaccctgaaaagcggccagggtggcccctagctttccttttccggttgcggcgccgcgcggtgaggttgtctagtccacgctcggagccatgccgtccaagggcccgctgcagtctgtgcaggtcttcggacgcaagaagacagcgacagctgtggcgcactgcaaacgcggcaatggtctcatcaaggtgaacgggcggcccctggagatgattgagccgcgcacgctacagtacaagctgctggagccagttctgcttctcggcaaggagcgatttgctggtgtagacatccgtgtccgtgtaaagggtggtggtcacgtggcccagatttatgctatccgtcagtccatctccaaagccctggtggcctattaccagaaatatgtggatgaggcttccaagaaggagatcaaagacatcctcatccagtatgaccggaccctgctggtagctgaccctcgtcgctgcgagtccaaaaagtttggaggccctggtgcccgcgctcgctaccagaaatcctaccgataagcccatcgtgactcaaaactcacttgtataataaacagtttttgagggattttaaagtttcaaaaaaaaaaaaaaaa

SEQ ID NO: 482 - DNA, 515 bp, human
cctcttttaccaaggacccgccaacatgggccgcgttcgcaccaaaaccgtgaagaaggcggcccgggtcatcatagaaaagtactacacgcgcctgggcaacgacttccacacgaacaagcgcgtgtgcgaggagatcgccattatccccagcaaaaagctccgcaacaagatagcaggttatgtcacgcatctgatgaagcgaattcagagaggcccagtaagaggtatctccatcaagctgcaggaggaggagagagaaaggagagacaattatgttcctgaggtctcagccttggatcaggagattattgaagtagatcctgacactaaggaaatgctgaagcttttggacttcggcagtctgtccaaccttcaggtcactcagcctacagttgggatgaatttcaaaacgcctcggggacctgtttgaattttttctgtagtgctgtattattttcaataaatctgggacaacagcaaaaaaaaaaaaaaaaaaaaaaaaaaaaaaaaaa

SEQ ID NO: 483 - DNA, 549 bp, human
ctctcttccacaggaggcctacacgccgccgcttgtgctgcagccatgtctctagtgatccctgaaaagttccagcatattttgcgagtactcaacaccaacatcgatgggcggcggaaaatagcctttgccatcactgccattaagggtgtgggccgaagatatgctcatgtggtgttgaggaaagcagacattgacctcaccaagagggcgggagaactcactgaggatgaggtggaacgtgtgatcaccattatgcagaatccacgccagtacaagatcccagactggttcttgaacagacagaaggatgtaaaggatggaaaatacagccaggtcctagccaatggtctggacaacaagctccgtgaagacctggagcgactgaagaagattcgggcccatagagggctgcgtcacttctggggccttcgtgtccgaggccagcacaccaagaccactggccgccgtggccgcaccgtgggtgtgtccaagaagaaataagtctgtaggccttgtctgttaataaatagtttatatacaaaaaaa

SEQ ID NO: 484 - DNA, 539 bp, human
ctttctttttgaggaagacgcggtcgtaagggctgaggatttttggtccgcacgctcctgctcctgactcaccgctgttcgctctcgccgaggaacaagtcggtcaggaagcccgcgcgcaacagccatggcttttaaggataccggaaaaacacccgtggagccggaggtggcaattcaccgaattcgaatcaccctaacaagccgcaacgtaaaatccttggaaaaggtgtgtgctgacttgataagaggcgcaaaagaaaagaatctcaaagtgaaaggaccagttcgaatgcctaccaagactttgagaatcactacaagaaaaactccttgtggtgaaggttctaagacgtgggatcgtttccagatgagaattcacaagcgactcattgacttgcacagtccttctgagattgttaagcagattacttccatcagtattgagccaggagttgaggtggaagtcaccattgcagatgcttaagtcaactattttaataaattgatgaccagttgttaaaaaaaaaaaaaaaaaa

SEQ ID NO: 485 - DNA, 356 bp, human
ctttctctctcgcgcgcggtgtggtggcagcaggcgcagcccagcctcgaaatgcagaacgacgccggcgagttcgtggacctgtacgtgccgcggaaatgctccgctagcaatcgcatcatcggtgccaaggaccacgcatccatccagatgaacgtggccgaggttgacaaggtcacaggcaggtttaatggccagtttaaaacttatgctatctgcggggccattcgtaggatgggtgagtcagatgattccattctccgattggccaaggccgatggcatcgtctcaaagaacttttgactggagagaatcacagatgtggaatatttgtcataaataaataatgaaaacct

SEQ ID NO: 486 - DNA, 537 bp, human
cttttcctccttggctgtctgaagatagatcgccatcatgaacgacaccgtaactatccgcactagaaagttcatgaccaaccgactacttcagaggaaacaaatggtcattgatgtccttcaccccgggaaggcgacagtgcctaagacagaaattcgggaaaaactagccaaaatgtacaagaccacaccggatgtcatctttgtatttggattcagaactcattttggtggtggcaagacaactggctttggcatgatttatgattccctggattatgcaaagaaaaatgaacccaaacatagacttgcaagacatggcctgtatgagaagaaaaagacctcaagaaagcaacgaaaggaacgcaagaacagaatgaagaaagtcagggggactgcaaaggccaatgttggtgctggcaaaaagtgagctggagattggatcacagccgaaggagtaaaggtgctgcaatgatgttagctgtggccactgtggatttttcgcaagaacattaataaactaaaaacttcatgtgt

SEQ ID NO: 487 - DNA, 514 bp, human
cttcctttttgtccgacatcttgacgaggctgcggtgtctgctgctattctccgagcttcgcaatgccgcctaaggacgacaagaagaagaaggacgctggaaagtcggccaagaaagacaaagacccagtgaacaaatccgggggcaaggccaaaaagaagaagtggtccaaaggcaaagttcgggacaagctcaataacttagtcttgtttgacaaagctacctatgataaactctgtaaggaagttcccaactataaacttataaccccagctgtggtctctgagagactgaagattcgaggctccctggccagggcagcccttcaggagctccttagtaaaggacttatcaaactggtttcaaagcacagagctcaagtaatttacaccagaaataccaagggtggagatgctccagctgctggtgaagatgcatgaataggtccaaccagctgtacatttggaaaaataaaactttattaaatcaaaaaaaaaaaaaaaaaaaaaaaaa

SEQ ID NO: 488 - DNA, 459 bp, human
cctgtctccggtccgtgcctccaagatgacaaagaaaagaaggaacaatggtcgtgccaaaaagggccgcggccacgtgcagcctattcgctgcactaactgtgcccgatgcgtgcccaaggacaaggccattaagaaattcgtcattcgaaacatagtggaggccgcagcagtcagggacatttctgaagcgagcgtcttcgatgcctatgtgcttcccaagctgtatgtgaagctacattactgtgtgagttgtgcaattcacagcaaagtagtcaggaatcgatctcgtgaagcccgcaaggaccgaacacccccaccccgatttagacctgcgggtgctgccccacgtcccccaccaaagcccatgtaaggagctgagttcttaaagactgaagacaggctattctctggagaaaaataaaatggaaattgtacttaaaaaaaaaaaaaaaaaaa

SEQ ID NO: 489 - DNA, 15359 bp, human
tctacctcgcgggtgcctctggtgtctccagaggtctccgaccccagcccgcccccagccctcccgcccagcccgcagccccctccctctgttccccgacctcagaccctgggcttccgacctcgacatcatgggtgacgcagaaggcgaagacgaggtccagttcctgcggacggacgatgaggtggtcctgcagtgcagcgctaccgtgctcaaggagcagctcaagctctgcctggccgccgagggcttcggcaaccgcctgtgcttcctggagcccactagcaacgcgcagaatgtgccccccgatctggccatctgttgcttcgtcctggagcagtccctgtctgtgcgagccctgcaggagatgctggctaacacggtggaggctggcgtggagtcatcccagggcgggggacacaggacgctcctgtatggccatgccatcctgctccggcatgcacacagccgcatgtatctgagctgcctcaccacctcccgctccatgactgacaagctggccttcgatgtgggactgcaggaggacgcaacaggagaggcttgctggtggaccatgcacccagcctccaagcagaggtctgaaggagaaaaggtccgcgttggggatgacatcatccttgtcagtgtctcctccgagcgctacctgcacctgtcgaccgccagtggggagctccaggttgacgcttccttcatgcagacactgtggaacatgaaccccatctgctcccgctgcgaagagggcttcgtgacgggaggtcacgtcctccgcctctttcatggacatatggatgagtgtctgaccatttcccctgctgacagtgatgaccagcgcagacttgtctactatgaggggggagctgtgtgcactcatgcccgctccctctggaggctggagccactgagaatcagctggagtgggagccacctgcgctggggccagccactccgagtccggcatgtcactaccgggcagtacctagcgctcaccgaggaccagggcctggtggtggttgacgccagcaaggctcacaccaaggctacctccttctgcttccgcatctccaaggagaagctggatgtggcccccaagcgggatgtggagggcatgggcccccctgagatcaagtacggggagtcactgtgcttcgtgcagcatgtggcctcaggactgtggctcacctatgccgctccagaccccaaggccctgcggctcggcgtgctcaagaagaaggccatgctgcaccaggagggccacatggacgacgcactgtcgctgacccgctgccagcaggaggagtcccaggccgcccgcatgatccacagcaccaatggcctatacaaccagttcatcaagagcctggacagcttcagcgggaagccacggggctcggggccacccgctggcacggcgctgcccatcgagggcgttatcctgagcctgcaggacctcatcatctacttcgagcctccctccgaggacttgcagcacgaggagaagcagagcaagctgcgaagcctgcgcaaccgccagagcctcttccaggaggaggggatgctctccatggtcctgaattgcatagaccgcctaaatgtctacaccactgctgcccactttgctgagtttgcaggggaggaggcagccgagtcctggaaagagattgtgaatcttctctatgaactcctagcttctctaatccgtggcaatcgtagcaactgtgccctcttctccacaaacttggactggctggtcagcaagctggatcggctggaggcctcgtctggcatcctggaggtcctgtactgtgtcctcattgagagtccagaggttctgaacatcatccaggagaatcacatcaagtccatcatctccctcctggacaagcatgggaggaaccacaaggtcctggacgtgctatgctccctgtgtgtgtgtaatggtgtggctgtacgctccaaccaagatcttattactgagaacttgctgcctggccgtgagcttctgctgcagacaaacctcatcaactatgtcaccagcatccgccccaacatctttgtgggccgagcggaaggcaccacgcagtacagcaaatggtactttgaggtgatggtggacgaggtgactccatttctgacagctcaggccacccacttgcgggtgggctgggccctcaccgagggctacaccccctaccctggggccggcgagggctggggcggcaacggggtcggcgatgacctctattcctacggctttgatggactgcatctctggacaggacacgtggcacgcccagtgacttccccagggcagcacctcctggcccctgaagacgtgatcagctgctgcctggacctcagcgtgccgtccatctccttccgcatcaacggctgccctgtgcagggtgtctttgagtccttcaacctggacgggctcttcttccctgttgtcagcttctcggctggtgtcaaggtgcggttcctccttggtggccgccatggtgaattcaagttcctgcccccacctggctatgctccatgccatgaggctgtgctccctcgagagcgactccatcttgaacccatcaaggagtatcgacgggaggggccccgggggcctcacctggtgggccccagtcgctgcctctcacacaccgacttcgtgccctgccctgtggacactgtccagattgtcctgccgccccatctggagcgcattcgggagaagctggcggagaacatccacgagctctgggcgctaacccgcatcgagcagggctggacctacggcccggttcgggatgacaacaagaggctgcacccgtgtcttgtggacttccacagccttccagagcctgagaggaactacaacctgcagatgtctggggagacgctcaagactctgctggctctgggctgccacgtgggcatggcggatgagaaggcggaggacaacctgaagaagacaaaactccccaagacgtatatgatgagcaatgggtacaagccggctccgctggacctgagccacgtgcggctgacgccggcgcagacaacactggtggaccgtctggcagaaaatgggcacaacgtgtgggcccgagaccgcgtgggccagggctggagctacagcgcagtgcaggacatcccagcgcgccgaaaccctcggctggtgccctaccgcctgctggatgaagccaccaagcgcagcaaccgggacagcctctgccaggccgtgcgcaccctcctgggctacggctacaacatcgagcctcctgaccaggagcccagtcaggtggagaaccagtctcgttgtgaccgggtgcgcatcttccgggcagagaaatcctatacagtgcagagcggccgctggtacttcgagtttgaagcagtcaccacaggcgagatgcgcgtgggctgggcgaggcccgagctgaggcctgatgtagagctgggagctgacgagctggcctatgtcttcaatgggcaccgcggccagcgctggcacttgggcagtgaaccatttgggcgcccctggcagccgggcgatgtcgttggctgtatgatcgacctcacagagaacaccattatcttcaccctcaatggcgaggtcctcatgtctgactcaggctccgaaacagccttccgggagattgagattggggacggcttcctgcccgtctgcagcttgggacctggccaggtgggtcatctgaacctgggccaggacgtgagctctctgaggttctttgccatctgtggcctccaggaaggcttcgagccatttgccatcaacatgcagcgcccagtcaccacctggttcagcaaaggcctgccccagtttgagccagtgccccttgaacaccctcactatgaggtatcccgagtggacggcactgtggacacgcccccctgcctgcgcctgacccaccgcacctggggctcccagaacagcctggtggagatgcttttcctgcggctgagcctcccagtccagttccaccagcacttccgctgcactgcaggggccaccccgctggcacctcctggcctgcagccccccgccgaggacgaggcccgggcggcggaacccgaccctgactacgaaaacctgcgccgctcagctgggggctggagcgaggcagagaacggcaaagaagggactgcgaaggagggcgcccccgggggcaccccgcaggcggggggagaggcgcagcccgccagggcggagaatgagaaggatgccaccaccgagaagaacaagaagagaggcttcttattcaaggccaagaaggtcgccatgatgacccagccaccggccacccccacgctgccccgactccctcacgacgtggtgcctgcagacaaccgcgatgaccccgagatcatcctcaacaccaccacgtactattactccgtgagggtctttgctggacaggagcccagctgcgtgtgggcgggctgggtcacccctgactaccatcagcacgacatgagcttcgacctcagcaaggtccgggtcgtgacggtgaccatgggggatgaacaaggcaacgtccacagcagcctcaagtgtagcaactgctacatggtgtggggcggagactttgtgagtcccgggcagcagggccggatcagccacacggaccttgtcattgggtgcctggtggacttggccactggcttaatgacctttacagccaatggcaaagagagcaacacctttttccaggtggaacccaacactaagctatttcctgccgtcttcgtcctgcccacccaccagaacgtcatccagtttgagctggggaagcagaagaacatcatgccgttgtcagccgccatgttccaaagcgagcgcaagaacccggccccgcagtgcccaccgcggctggagatgcagatgctgatgccagtgtcctggagccgcatgcccaaccacttcctgcaggtggagacgaggcgtgccggcgagcggctgggctgggccgtgcagtgccaggagccgctgaccatgatggcgctgcacatccccgaggagaaccggtgcatggacatcctggagctgtcggagcgcctggacctgcagcgcttccactcgcacaccctgcgcctctaccgcgctgtgtgcgccctgggcaacaatcgcgtggcgcacgctctgtgcagccacgtagaccaagctcagctgctgcacgccctggaggacgcgcacctgccaggcccactgcgcgcaggctactatgacctcctcatcagcatccacctcgaaagtgcctgccgcagccgccgctccatgctctctgaatacatcgtgcccctcacgcctgagacccgcgccatcacgctcttccctcctggaaggagcacagaaaatggtcacccccggcatggcctgccgggagttggagtcaccacttcgctgaggcccccgcatcatttctcgcccccctgtttcgtggccgctctgccagctgctggggcagcagaggccccggcccgcctcagccctgccatcccgctggaggccctgcgggacaaggcactgaggatgctgggggaggcggtgcgcgacggtgggcagcacgctcgcgaccccgtcggggcctccgtggagttccagtttgtgcctgtgctcaagctcgtgtccaccctgctggtgatgggcatctttggcgatgaggatgtgaaacagatcttgaagatgattgagcctgaggtcttcactgaggaagaggaggaggaggacgaggaggaagagggtgaagaggaagatgaggaggagaaggaggaggatgaggaggaaacagcacaggaaaaggaagatgaggaaaaagaggaagaggaggcagcagaaggggagaaagaagaaggcttggaggaagggctgctccagatgaagttgccagagtctgtgaagttacagatgtgccacctgctggagtatttctgtgaccaagagctgcagcaccgtgtggagtccctggcagcctttgcggagcgctatgtggacaagctccaggccaaccagcggagccgctatggcctcctcataaaagccttcagcatgaccgcagcagagactgcaagacgtacccgtgagttccgctccccaccccaggaacagatcaatatgctattgcaattcaaagatggtacagatgaggaagactgtcctctccctgaagagattcgacaggatttgcttgactttcatcaagacctgctggcacactgtggaattcagctagatggagaggaggaggaaccagaggaagagaccaccctgggcagccgcctcatgagcctgttggagaaagtgcggctggtgaagaagaaggaagagaaacctgaggaggagcggtcagcagaggagagcaaaccccggtccctgcaggagctggtgtcccacatggtggtgcgctgggcccaagaggacttcgtgcagagccccgagctggtgcgggccatgttcagcctcctgcaccggcagtacgacgggctgggtgagctgctgcgtgccctgccgcgggcgtacaccatctcaccgtcctccgtggaagacaccatgagcctgctcgagtgcctcggccagatccgctcgctgctcatcgtgcagatgggcccccaggaggagaacctcatgatccagagcatcgggaacatcatgaacaacaaagtcttctaccaacacccgaacctgatgagggcgctgggcatgcacgagacggtcatggaggtcatggtcaacgtcctcgggggcggcgagtccaaggagatccgcttccccaagatggtgacaagctgctgccgcttcctctgctatttctgccgaatcagccggcagaaccagcgctccatgtttgaccacctgagctacctgctggagaacagtggcatcggcctgggcatgcagggctccacgcccctggacgtggctgctgcctccgtcattgacaacaatgagctggccttggcattgcaggagcaggacctggaaaaggttgtgtcctacctggcaggctgtggcctccagagctgccccatgcttgtggccaaagggtacccagacattggctggaacccctgtggtggagagcgctacctggacttcctgcgctttgctgtcttcgtcaacggcgagagcgtggaggagaacgccaatgtggtggtgcggctgctcatccggaagcctgagtgcttcggacccgccctgcggggtgagggtggctcagggctgctggctgccatcgaagaggccatccgcatctccgaggaccctgcgagggatggcccaggcatccgcagggaccggcggcgcgagcactttggtgaggaaccgcctgaagaaaaccgggtgcacctgggacacgccatcatgtccttctatgccgccttgatcgacctgctcggacgctgtgcaccagagatgcatctaatccaagccggcaagggtgaggccctgcggatccgcgccatcctccgctcccttgtgcccttggaggaccttgtgggcatcatcagcctcccactgcagattcccaccctgggcaaagatggggctctggtgcagccaaagatgtcagcatccttcgtgccggaccacaaggcgtccatggtgctcttcctggaccgtgtgtatggcatcgagaaccaggacttcttgctgcacgtgctggacgtggggttcctgcccgacatgagggcagccgcctcgctggacacggccactttcagcaccaccgagatggcgctggccgtgaaccgctacctgtgcctggccgtgctgccgctcatcaccaagtgtgcgccgctctttgcgggcacagaacaccgcgccatcatggtggactctatgctgcataccgtgtaccgcctgtctcggggtcgttcgctcaccaaggcgcagcgtgacgtcatcgaggactgcctcatgtcgctctgcaggtacatccgcccgtcgatgctgcagcacctgttgcgccgcctggtgttcgacgtgcccatcctcaacgagttcgccaagatgccactcaagctcctcaccaaccactatgagcgctgttggaagtactactgcctacccacgggctgggccaacttcggggtcacctcagaggaggagctgcacctcacacggaaactcttctggggcatctttgactctctggcccataagaaatacgacccggagctgtaccgcatggccatgccttgtctgtgcgccattgccggggctctgccccccgactatgtggatgcctcatactcatctaaggcagagaaaaaggccacagtggatgctgaaggcaactttgatccccggcctgtggagaccctcaatgtgatcatcccggagaagctggactccttcattaacaagtttgcggagtacacacacgagaagtgggccttcgacaagatccagaacaactggtcctatggagagaacatagacgaggagctgaagacccaccccatgctgaggccctacaagaccttttcagagaaggacaaagagatttaccgctggcccatcaaggagtccctgaaggccatgattgcctgggaatggacgatagagaaggccagggagggtgaggaggagaagacggaaaagaaaaaaacgcggaagatatcacaaagtgcccagacctatgatcctcgagaaggctacaaccctcagccccccgaccttagtgctgttaccctgtcccgggagctgcaggccatggcagaacaactggcagaaaattaccacaacacgtggggacggaagaagaagcaggagctggaagccaaaggcggtgggacccaccccctgctggtcccctacgacacgctcacggccaaggagaaggcacgagatcgagagaaggcccaggagctactgaaattcctgcagatgaatggctacgcggttacaagaggccttaaggacatggaactggactcgtcttccattgaaaagcggtttgcctttggcttcctgcagcagctgctgcgctggatggacatttctcaggagttcattgcccacctggaggctgtggtcagcagtgggcgagtggaaaagtccccacatgaacaggagattaaattctttgccaagatcctgctccctttgatcaaccagtacttcaccaaccactgcctctatttcttgtccactccggctaaagtgctgggcagcggtggccacgcctctaacaaggagaaggaaatgatcaccagcctcttctgcaaacttgctgctctcgtccgccaccgagtctctctctttgggacagacgccccagctgtggtcaactgtcttcacatcctggcccgctccctggatgccaggacagtgatgaagtcaggccctgagatcgtgaaggctggcctccgctccttcttcgagagtgcctcggaggacatcgagaagatggtggagaacctgcggctgggcaaggtgtcgcaggcgcgcacccaggtgaaaggcgtgggccagaacctcacctacaccactgtggcactgctgccggtcctcaccaccctcttccagcacatcgcccagcaccagttcggagatgacgtcatcctggacgacgtccaggtctcttgctaccgaacgctgtgcagtatctactccctgggaaccaccaagaacacttatgtggaaaagcttcggccagccctcggggagtgcctggcccgtctggcagcagccatgccggtggcgttcctggagccgcagctgaacgagtacaacgcctgctccgtgtacaccaccaagtctccgcgggagcgggccatcctggggctccccaacagtgtggaggagatgtgtcccgacatcccggtgctggagcggctcatggcagacattggggggctggccgagtcaggtgcccgctacacagagatgccgcatgtcatcgagatcacgctgcccatgctatgcagctacctgccccgatggtgggagcgcgggcccgaggcacccccttccgccctgcccgccggcgcccccccaccctgcacagctgtcacctctgaccacctcaactccctgctggggaatatcctgagaatcatcgtcaacaacctgggcattgacgaggcctcctggatgaagcggctggctgtgttcgcacagcccattgtgagccgtgcacggccggagctcctgcagtcccacttcatcccaactatcgggcggctgcgcaagagggcagggaaggtggtgtccgaggaggagcagctgcgcctggaggccaaggcggaggcccaggagggcgagctgctggtgcgggacgagttctctgtgctctgccgggacctctacgccctgtatccgctgctcatccgctacgtggacaacaacagggcgcagtggctgacggagccgaatcccagcgcggaggagctgttcaggatggtgggcgagatcttcatctactggtccaagtcccacaacttcaagcgcgaggagcagaactttgtggtccagaatgagatcaacaacatgtccttcctgactgctgacaacaaaagcaaaatggctaaggcgggagatatacagtccggtggctcggaccaggaacgcaccaagaagaagcgccggggggaccggtactctgtgcagacgtcactgatcgtggccacactgaagaagatgctgcccatcggcctgaatatgtgtgcgcccaccgaccaagacctcatcacgctggccaagacccgttacgccctgaaagacacagatgaggaggtccgggaatttctgcacaacaaccttcaccttcagggaaaggtcgaaggctccccgtctctgcgctggcagatggctctgtaccggggcgtcccgggtcgcgaggaggacgccgatgaccccgagaaaatcgtgcgcagagtccaggaagtgtcagccgtgctctactacctggaccagaccgagcacccttacaagtctaagaaggccgtgtggcacaagcttttgtccaaacagcgccggcgggcagtcgtggcctgtttccgtatgacgcccctgtacaacctgcccacgcaccgggcatgtaacatgttcctggagagctacaaggctgcatggatcctgactgaagaccacagttttgaggaccgcatgatagatgacctttcaaaagctggggagcaggaggaggaggaggaagaggtggaagagaagaagccagaccccctgcaccagttggtcctgcacttcagccgcactgccctgacggaaaagagcaaactggatgaggattacctgtacatggcctatgctgatatcatggcaaagagctgccacctggaggagggaggggagaacggtgaagctgaagaggaggttgaggtctcctttgaggagaaacagatggagaagcagaggctcttgtaccagcaagcacggctgcacacccggggggcggccgagatggtgctgcagatgatcagtgcctgcaaaggagagacaggtgccatggtgtcctccaccctgaagctgggcatctccatcctcaatggaggcaatgctgaggtccagcagaaaatgctggattatcttaaggacaagaaggaagttggcttcttccagagtatccaggcactgatgcaaacatgcagcgtcctggatctcaatgcctttgagagacaaaacaaggccgaggggctgggcatggtgaatgaggatggcactgtcatcaatcgccagaacggagagaaggtcatggcggatgatgaattcacacaagacctgttccgattcctacaattgctctgtgaggggcacaataatgatttccagaactacctacggacacagacagggaacacgaccactattaacatcatcatttgcactgtggactacctcctgcggctgcaggaatccatcagcgacttctactggtactactcgggcaaggatgtcattgaagagcagggcaagaggaacttctccaaagccatgtcggtggctaagcaggtgttcaacagcctcactgagtacatccagggtccctgcaccgggaaccagcagagcctggcgcacagtcgcctatgggacgcagtggtgggattcctgcacgtgttcgcccacatgatgatgaagctcgctcaggactcaagccagatcgagctgctgaaggagctgctggatctgcagaaggacatggtggtgatgttgctgtcgctactagaagggaacgtggtgaacggcatgatcgcccggcagatggtggacatgctcgtggaatcctcatccaatgtggagatgatcctcaagttcttcgacatgttcctgaaactcaaggacattgtgggctctgaagccttccaggactacgtaacggatccccgtggcctcatctccaagaaggacttccagaaggccatggacagccagaagcagttcagcggtccagaaatccagttcctgctttcgtgctccgaagcggatgagaacgaaatgatcaactgcgaagagttcgccaaccgcttccaggagccagcacgcgacatcggcttcaacgtggcggtgctgctgaccaacctgtcggagcatgtgccgcatgaccctcgcctgcacaacttcctggagctggccgagagcatccttgagtacttccgcccctacctgggccgcatcgagatcatgggcgcgtcacgccgcatcgagcgcatctacttcgagatctcagagaccaaccgcgcccagtgggagatgccccaggtgaaggagtccaagcgccagttcatcttcgacgtggtgaacgagggcggcgaggctgagaagatggagctcttcgtgagtttctgcgaggacaccatcttcgagatgcagatcgccgcgcagatctcggagcccgagggcgagccggagaccgacgaggacgagggcgcgggcgcggcggaggcgggcgcggaaggcgcggaggagggcgcggcggggctcgagggcacggcggccacggcggcggcgggggcgacggcgcgggttgtggcggccgcaggccgggccctgcgaggcctcagctaccgcagcctgcggcggcgcgtgcggcggctgcggcggcttacggcccgcgaggcggccaccgcagtggcggcgctgctctgggcagcagtgacgcgcgctggggccgctggcgcgggggcggcggcgggcgcgctgggcctgctctggggctcgctgttcggcggcggcctggtggagggcgccaagaaggtgacggtgaccgagctcctggcaggcatgcccgaccccaccagcgacgaggtgcacggcgagcagccggccgggccgggcggagacgcagacggcgagggtgccagcgagggcgctggagacgccgcggagggcgctggagacgaggaggaggcggtgcacgaggccgggccgggcggtgccgacggggcggtggccgtgaccgatgggggccccttccggcccgaaggggctggcggtctcggggacatgggggacacgacgcctgcggaaccgcccacacccgagggctctcccatcctcaagaggaaattgggggtggatggagtggaggaggagctcccgccagagccagagcccgagccggaaccagagctggagccggagaaagccgatgccgagaatggggagaaggaagaagttcccgagcccacaccagagccccccaagaagcaagcacctccctcaccccctccaaagaaggaggaagctggaggcgaattctggggagaactggaggtgcagagggtgaagttcctgaactacctgtcccggaacttttacaccctgcggttccttgccctcttcttggcatttgccatcaacttcatcttgctgttttataaggtctcagactctccaccaggggaggacgacatggaaggctcagctgctggggatgtgtcaggtgcaggctctggtggcagctctggctggggcttgggggccggagaggaggcagagggcgatgaggatgagaacatggtgtactacttcctggaggaaagcacaggctacatggaacccgccctgcggtgtctgagcctcctgcatacactggtggcctttctctgcatcattggctataattgtctcaaggtgcccctggtaatctttaagcgggagaaggagctggcccggaagctggagtttgatggcctgtacatcacggagcagcctgaggacgatgacgtgaaggggcagtgggaccgactggtgctcaacacgccgtctttccctagcaactactgggacaagtttgtcaagcgcaaggtcctggacaaacatggggacatctacgggcgggagcggattgctgagctactgggcatggacctggccacactagagatcacagcccacaatgagcgcaagcccaacccgccgccagggctgctgacctggctcatgtccatcgatgtcaagtaccagatctggaagttcggggtcatcttcacagacaactccttcctgtacctgggctggtatatggtgatgtccctcttgggacactacaacaacttcttctttgctgcccatctcctggacatcgccatgggggtcaagacgctgcgcaccatcctgtcctctgtcacccacaatgggaaacagctggtgatgaccgtgggccttctggcggtggtcgtctacctgtacaccgtggtggccttcaacttcttccgcaagttctacaacaagagcgaggatgaggatgaacctgacatgaagtgtgatgacatgatgacgtgttacctgtttcacatgtacgtgggtgtccgggctggcggaggcattggggacgagatcgaggaccccgcgggtgacgaatacgagctctacagggtggtcttcgacatcaccttcttcttcttcgtcatcgtcatcctgttggccatcatccagggtctgatcatcgacgcttttggtgagctccgagaccaacaagagcaagtgaaggaggatatggagaccaagtgcttcatctgtggaatcggcagtgactactttgatacgacaccgcatggcttcgagactcacacgctggaggagcacaacctggccaattacatgtttttcctgatgtatttgataaacaaggatgagacagaacacacgggtcaggagtcttatgtctggaagatgtaccaagagagatgttgggatttcttcccagctggtgattgtttccgtaagcagtatgaggaccagcttagctgacacacccccagctggccctccacccccacctcaagtgccttattctcacagcaagccccttagtccccaagcccctccccctaaggcagctgggggagaggtgacctagtac

SEQ ID NO: 490 - DNA, 15731 bp, human
cgcgcggccccctccagcccccggctcccggcagcagaagcagaaggcagcgccaggggccgccgccgccgccgagctccgcggggctcgggagccggccccggcgaggaggcgcggaaccatggccgatgggggcgagggcgaagacgagatccagttcctgcgaactgatgatgaagtggttctgcagtgcaccgcaaccatccacaaagaacaacagaagctatgcttggcagcagaaggatttggcaacagactttgtttcttggagtccacttccaattccaagaatgtgcccccagacctctccatctgcacctttgtgctggagcagtccctctctgtccgggcgctgcaggagatgctggctaacaccgtggagaaatcagaagggcaagttgatgtggaaaaatggaaattcatgatgaagactgctcaaggtggtggtcatcgaacactcctctacggacatgccatattgctgcgccattcctatagtggcatgtatctgtgctgcctgtccacctcccggtcttcaactgataagctggcttttgatgttggcttgcaagaggacaccacaggggaggcttgttggtggaccatacaccctgcctctaagcagcgatcagaaggagaaaaagtacgagttggagatgacctcatcttagttagcgtgtcctctgaaaggtacttgcacttgtcttatggcaacggcagcttacacgtggatgccgctttccagcagactctctggagcgtggccccaatcagctcaggaagtgaggcagcccaagggtatctcattggtggtgatgtcctcaggttgctgcatggacacatggacgagtgtctcactgtcccttcaggagaacatggtgaagagcagcggagaactgttcattatgaaggtggcgctgtgtctgttcatgcacgttccctttggagactagagacgctaagagttgcgtggagtggaagccacataagatggggacagccattccgactacgccatgtcacaacaggaaaatacttgagtctcatggaagacaaaaaccttctactcatggacaaagagaaagctgatgtaaaatcaacagcatttaccttccggtcttccaaggaaaaattggatgtaggggtgagaaaagaagtagatggcatgggaacatctgaaataaaatacggtgactcagtatgctatatacaacatgtagacacaggcctatggcttacttaccagtctgtggacgtgaaatccgtgagaatgggatctatacaacgtaaggctattatgcatcatgaaggccacatggatgatggcataagtttgtcgagatcccagcatgaagaatcacgcacagcccgagttatccggagcacagtcttccttttcaatagatttataaggggccttgatgctctcagcaagaaagcgaaggcttccacagtcgatttgcctatagagtccgtaagcctaagtctgcaggatctcattggctacttccaccccccagatgagcatttagagcatgaagacaaacagaacagactacgagccctgaagaatcggcaaaatctcttccaggaagagggaatgatcaacctcgtgcttgagtgcatagaccgtttgcacgtctacagcagtgcagcacactttgctgatgttgctgggcgagaagcaggagagtcttggaaatccattctgaattctctgtatgagttgctggcggctctaattagaggaaatcgtaaaaactgtgctcaattttctggctccctcgactggttgatcagcagattggaaagactggaagcttcttcaggcattctggaagttttacactgtgttttagtagaaagtccagaagctctaaatattattaaagaaggacatattaaatctattatctcacttttagacaaacatggaagaaatcacaaggttctggatgtcttgtgctcactctgtgtttgccacggggttgcagtccgttctaaccagcatctcatctgtgacaatctcctaccaggaagagacttgttattgcagacacgtcttgtgaaccatgtcagcagcatgagacccaatatttttctgggcgtcagtgaaggttctgctcagtataagaaatggtactatgaattgatggtggaccacacagagccctttgtgacagctgaagcaactcacctgcgagtgggctgggcttccactgaaggatattctccctaccctggagggggcgaagagtggggtggaaatggtgttggagatgatctcttctcctatggatttgatggccttcatctctggtcaggttgtattgctcgtactgtaagctcaccaaaccaacatctgttaagaactgatgatgtcatcagttgctgtttagatctgagtgccccaagcatctcgttccgaattaatggacaacctgttcaaggaatgtttgagaatttcaacatcgatggcctcttctttccagtcgttagtttctctgcaggaataaaagtacgctttctgcttggagggcgacatggagaattcaaatttcttcctccacctgggtatgctccttgttatgaagctgttctgccaaaagaaaagttgaaagtggaacacagccgagagtacaagcaagaaagaacttacacacgcgacctgctgggccccacagtttccctgacgcaagctgccttcacacccatccctgtggataccagccagatcgtgttgcctcctcatctagaaagaataagagaaaaactggcagagaatatccatgaactctgggttatgaataaaattgagcttggctggcagtatggtccggttagagatgacaacaagagacaacacccatgcctggtggagttctccaagctgcctgaacaggagcgcaattacaacttacaaatgtcgcttgagaccctgaagactttgttggcattaggatgtcatgtgggtatatcagatgaacatgctgaagacaaggtgaaaaaaatgaagctacccaagaattaccagctgacaagtggatacaagcctgcccctatggacctgagctttatcaaactcaccccatcgcaagaagcaatggtggacaagttggcagaaaatgcacataatgtgtgggcgcgggatcgaatccggcagggctggacttatggcatccaacaggacgtaaagaacagaagaaatcctcgccttgttccctacactcctctggatgaccgaaccaagaaatccaacaaggacagcctccgcgaggctgtgcgcacgctgctggggtacggctacaacttggaagcaccagatcaagatcatgcagccagagccgaagtgtgcagcggcaccggggaaaggttccgaatcttccgtgccgagaagacctatgcagtgaaggccggacggtggtattttgaatttgagacggtcactgctggagacatgagggttggttggagtcgtcctggttgtcaaccggatcaggagcttggctcagatgaacgtgcctttgcctttgatggcttcaaggcccagcggtggcatcagggcaatgaacactatgggcgctcttggcaagcaggcgatgtcgtggggtgtatggttgacatgaacgaacacaccatgatgttcacactgaatggtgaaatccttcttgatgattcaggctcagaactggctttcaaggactttgatgttggcgatggattcatacctgtgtgtagccttggagtggctcaagtgggtaggatgaactttggaaaggatgtcagcaccttgaaatatttcaccatctgtggcttacaagagggctatgaaccatttgccgttaatacaaacagggatattaccatgtggctgagcaagaggcttcctcagtttcttcaagttccatcaaaccatgaacatatagaggtgaccagaatagacggcaccatagacagttccccatgtttaaaggtcactcagaagtcttttggttctcagaacagcaacactgatatcatgttttatcgcctgagcatgccgatcgagtgcgcggaggtcttctccaagacggtggctggagggctccctggggctggcctttttgggcccaagaatgacttggaagattatgatgctgattctgactttgaggttctgatgaagacagctcatggccatctagtgcccgatcgtgttgacaaagacaaagaagctactaaaccagagtttaacaaccacaaagattatgcccaggaaaagccctctcgtctgaaacaaagatttttgcttagaagaacaaagccagattacagcacaagccattctgcaagactcaccgaagatgtccttgctgatgatcgggatgactatgatttcttgatgcaaacgtccacgtactattactcagtgagaatctttcctggacaagaacctgctaatgtctgggtgggctggattacatcagatttccatcagtatgacacaggctttgacttggacagagttcgcacagtaacagttactctaggagatgaaaaaggaaaagtgcatgaaagcatcaaacgcagcaactgctatatggtatgtgcgggtgagagcatgagccccgggcaaggacgcaacaataatggactggagattggctgtgtggtggatgctgccagcgggctgctcacattcattgccaatggcaaggaactgagcacatactatcaggtggaaccgagtacaaaattatttcctgcggtttttgcacaagctacaagtcccaatgttttccagtttgagttgggaagaataaagaatgtgatgcctctctcggcgggattattcaagagtgagcacaagaaccccgtgccgcagtgccccccgcgcctccacgtgcagttcctgtcacacgtcctgtggagcagaatgcccaaccagtttttgaaggtagatgtgtctcgaataagtgaacgccaaggctggttggtgcagtgtttggatcctctgcagttcatgtctcttcatatccctgaggaaaacagatctgttgacatcttagagttgacagagcaggaggaattgctgaaatttcactatcacactctccggctctactcagccgtctgtgctcttgggaaccaccgggtggcccatgccctgtgcagccatgtggatgaacctcagctcctctatgccattgagaacaagtacatgcctggtttgctgcgtgctggctactatgacctgctgattgacatccacctgagctcctatgccactgccaggctcatgatgaacaacgagtacattgtccccatgacggaggagacgaagagcatcaccctgttccctgatgagaacaaaaaacacggccttccagggatcggcctcagcacctccctcaggccacggatgcagttttcctcccccagttttgtaagcattagtaatgaatgttaccagtacagtccagagttcccactggacatcctcaagtccaaaaccatacagatgctgacagaagctgttaaagagggcagtcttcatgcccgggacccagttggagggactactgaattcctctttgtacctctcatcaagcttttctataccctgctgatcatgggcatctttcacaacgaggacttgaagcacatcttgcagttgattgagcccagtgtgtttaaagaagctgccactccggaggaggagagtgacacgctggagaaagagctcagtgtggacgatgcaaagctgcaaggagctggtgaggaagaagccaaggggggcaagcggcccaaggaaggcctgctccaaatgaaactgccagagccagttaaattgcagatgtgcctactgcttcagtacctctgtgactgccaggtccggcaccggatagaagccattgtagccttttcagatgattttgtggctaagctccaagacaatcaacgtttccgatacaacgaagtcatgcaagccttaaacatgtcagctgcactcacagccaggaagacaaaggaatttagatcaccacctcaagaacagatcaatatgcttctcaattttaaggatgacaaaagtgaatgtccatgtccagaagaaattcgtgaccaactattggatttccatgaagatttgatgacacattgtggaattgagctggatgaagatgggtctctggatggaaacagtgatttaacaattagagggcgtctgctatccctggtagaaaaggtgacatatctgaagaagaagcaagcagaaaaaccagttgagagtgactccaaaaagtcctccactctgcagcagctgatttctgagaccatggtccgatgggctcaggagtctgtcattgaagaccccgagctggtgagggccatgtttgtgttgctccatcggcagtatgacggcattgggggtcttgttcgggccctgccaaagacctacacgataaatggtgtgtccgtggaggacaccatcaacctgctggcatcccttggtcagattcggtccctgctgagtgtgagaatgggcaaagaagaagagaagctcatgattcgtggattaggggatattatgaataacaaagtgttttaccagcaccctaatctcatgagggcactggggatgcacgagactgtgatggaggtcatggtgaacgtccttggaggtggagagtccaaggaaatcacctttcccaagatggtggccaactgttgccgttttctctgttacttctgtcgtataagtaggcagaatcaaaaagctatgtttgatcatctcagttatttactggaaaacagcagtgttggtcttgcctccccagctatgagaggttcaacaccactggatgtggctgcagcttcggtgatggataataatgaactagcattagctctgcgtgagccggatctagaaaaggtagttcgttatttggctggttgtggactgcaaagttgccagatgctggtgtctaagggctatccagacattgggtggaacccagttgaaggagagagatatcttgactttctcagatttgctgtcttctgtaatggggagagtgtggaggaaaatgcaaatgtcgtggtgagattgctcattcggaggcctgagtgttttggtcctgctttgagaggagaaggtgggaatgggcttcttgcagcaatggaagaagccatcaaaatcgccgaggatccttcccgagatggtccctcaccaaatagcggatccagtaaaacacttgacacagaggaggaggaagatgacactatccacatggggaacgcgatcatgaccttctattcagctttgattgacctcttgggacgctgtgctcctgagatgcatttgattcatgccgggaagggagaagccatcagaattaggtccattttgagatccctcattcccctgggagatttggtgggcgttatcagcatcgcttttcagatgccaacaatagccaaagatgggaatgtggtggaacctgacatgtctgcggggttttgcccagatcacaaggcagccatggttttattccttgacagggtctatgggattgaggttcaagacttcctcctccatcttcttgaggttggctttctgccagatctccgggcggctgcttctttagatacggcagctttgagtgctacagacatggccttggccctcaatcggtacctttgcacagccgtcttgccattgttaacaagatgtgctcctctctttgctggcacagagcaccacgcttctctcattgactcattacttcatactgtgtatagactttctaagggctgttcacttaccaaagctcagcgggattccatagaagtttgtttactctctatttgtggacaactgagaccttctatgatgcagcacttactcagaagattagtatttgatgtcccattattaaatgaacacgcaaagatgcctcttaaactgctgacaaatcattatgaaagatgctggaaatattactgcctgcctggagggtggggaaactttggtgctgcctcagaagaagaacttcatttatcaagaaagttgttctggggcatttttgatgccctgtctcaaaagaaatatgaacaagaacttttcaaactggcactgccttgcctgagtgcagttgcgggagctttgcctccagactacatggagtcaaattatgtcagtatgatggaaaaacagtcatcaatggattctgaagggaactttaacccacaacctgttgatacctcaaatattacaattcctgagaaattggaatacttcattaacaaatatgcagaacactcccatgacaaatggtcaatggacaagttggcaaatggatggatttatggagaaatatattcagactcttctaaggttcagccattaatgaagccatataagctattgtctgaaaaggaaaaagaaatttatcgctggccaatcaaagaatctttaaaaactatgctggctaggactatgagaactgaaagaactcgggagggagacagcatggccctttacaaccggactcgtcgtatttctcagacaagccaggtttctgtggacgctgcccatggttacagtccccgggccattgacatgagcaatgttacactatctagagacctgcatgctatggcagaaatgatggctgaaaactaccataatatatgggcaaagaaaaagaaaatggagttggagtccaaaggaggaggaaaccatcctctgctggtgccctatgatacactgacagccaaagagaaagccaaggatagagaaaaagcacaggacatcctcaagttcttgcagatcaatggatatgctgtatccagaggatttaaggacctggaactggacacgccttctattgagaaacgatttgcctatagtttcctccaacaactcattcgctatgtggatgaagcccatcagtatatcctggagtttgatggtggcagcagaggcaaaggagaacatttcccttatgaacaagaaatcaagttctttgcaaaagtcgttcttcctttaattgatcagtatttcaaaaaccatcgtttatacttcttatctgcagcaagcagacctctctgctctggaggacatgcttccaacaaagagaaagaaatggtgactagcctattctgcaaacttggagttcttgtcaggcataggatttcactatttggcaatgatgcaacatcaattgtcaactgtcttcatattttgggtcagactttggatgcaaggacagtgatgaagactggcctggagagtgttaaaagtgcactcagagcttttctggacaacgctgcagaggatctggagaagaccatggaaaacctcaagcagggccagttcactcacacccgaaaccagcccaaaggggttactcagattatcaattacaccacagtggccctgctgccaatgctgtcgtcattatttgaacatattggccagcatcagttcggagaagacctaatattggaagatgtccaggtgtcttgttatagaattctgactagcttatatgctttgggaaccagcaagagtatttacgtggagaggcaacgttctgcattaggagaatgtctagctgcctttgctggtgcttttcctgtagcatttttggaaactcatctggacaaacataatatttactccatctacaataccaagtcttcacgagaaagagcagctctcagtttgccaactaatgtggaagatgtttgtccaaacattccgtctttggagaaactcatggaagaaatcgtggaattagccgagtccggcattcgctacactcaaatgccacatgtcatggaagtcatactgcccatgctttgcagctacatgtctcgttggtgggagcatggacctgagaacaatccagaacgggccgagatgtgctgcacagccctgaactcagagcacatgaacacacttctagggaacatattgaaaatcatatataataacttggggattgatgagggagcctggatgaagaggctagcagtgttttcccagcctataataaataaagtgaaacctcagctcttgaaaactcatttcttgccgttaatggagaaactcaagaaaaaggcagctacggtggtgtctgaggaagaccacctgaaagctgaggccaggggggacatgtcggaggcagaactcctcatcctagatgagttcaccacactggccagagatctctatgccttctaccctctcttgattagatttgtggactataacagggcaaagtggctaaaggagcctaacccagaagcagaggagctcttccgcatggtggctgaagtgtttatctactggtcgaagtcccataatttcaaaagagaagagcagaacttcgttgtacagaatgaaatcaacaatatgtctttccttattactgataccaagtcaaagatgtcaaaggcagctgtttctgatcaggaaaggaagaaaatgaagcgcaaaggagatcggtattccatgcagacctctctgattgtagcagctctgaagcggttactgcccattgggttgaacatctgtgcccctggggaccaggagctcattgctctggccaaaaatcgatttagcctgaaagatactgaggatgaagtacgagatataatccgcagcaatattcatttacaaggcaagttggaggatcctgctattagatggcaaatggctctttacaaagacttaccaaacaggactgatgatacctcagatccagagaagacggtagaaagagtattggatatagcaaatgtgctttttcatcttgaacagaagtctaaacgtgtgggtcgaagacattactgtctggtggaacatcctcagagatctaaaaaggctgtatggcataaactactgtctaagcagaggaaaagggctgttgtagcctgcttccggatggcccccttatataatctgccaaggcatcgggctgtcaatctctttcttcagggatatgaaaagtcttggattgaaacagaagaacattactttgaagataaactgatagaagatttagcaaaacctggggctgaacctccagaagaagatgaaggcactaagagagttgatcctctacatcagctgatccttctgtttagtcggacagctttaacagagaaatgcaaactggaggaagattttttatatatggcctatgcagatattatggcaaagagttgtcatgatgaggaagatgacgatggtgaagaggaagtgaagagttttgaagaaaaagaaatggaaaagcaaaagcttctataccagcaagcccgactccacgatcgtggcgcggctgagatggtgctacagacaatcagtgccagcaaaggtgaaactggaccaatggtagcagctactctgaaacttggaattgctattttaaatggtgggaactccacagtacagcagaaaatgcttgactacctcaaggagaaaaaggatgtgggcttctttcagagcctggccggcctgatgcagtcatgtagtgtccttgacctaaatgcatttgagcgacaaaacaaagctgaaggtcttgggatggtgacagaggaaggatcaggagaaaaggttctgcaggacgatgagttcacctgtgacctcttccgattcctgcaactactctgtgagggacacaactcagattttcagaattatctgagaactcagactggcaataatacaactgtcaacataattatctccactgtagactacctactgagagttcaggaatcaattagtgacttttattggtattactctgggaaagatgttattgatgaacaaggacaacggaatttctccaaagctatccaagtggcaaaacaagtctttaacactcttacagagtatattcagggtccttgcactgggaatcaacagagtttggcacacagcaggctgtgggatgctgtggtcggctttcttcatgtgtttgcccatatgcagatgaagctgtcgcaggattccagtcaaattgagctattaaaagaattaatggatctgcagaaggatatggtggtcatgttgctgtccatgttagaaggtaatgttgttaatggaacgattggcaaacagatggtggatatgcttgtggaatcttccaacaacgtggagatgattctcaaattttttgacatgttcttaaaactaaaggatttgacgtcgtctgatacttttaaagaatatgaccccgatggcaagggagtcatttccaagagggacttccacaaagcgatggagagccataagcactacacgcagtcagaaacggaatttcttttgtcttgtgcggagacggatgagaatgaaaccctcgactacgaagagttcgtcaaacgcttccacgaacctgcgaaggacatcggcttcaacgtcgccgtccttctgacaaacctctctgagcacatgcccaacgatacccgacttcagacttttctggaattagcagagagcgtcctgaattatttccagccctttctgggccgcatcgaaatcatgggaagcgccaaacgcatcgagagggtctattttgaaatcagtgagtccagccgaacccagtgggagaagccccaggtcaaggagtccaaaagacagttcatatttgacgtggtcaacgaaggcggagagaaagagaagatggaactctttgtgaacttctgcgaggacaccatctttgaaatgcagctggcggctcagatctcggagtcggacttgaacgagaggtcagcgaataaggaagaaagcgagaaggagaggccggaagagcaggggccgaggatggctttcttctccattctgacggtcaggtcggccctgtttgcgctcaggtacaatatcttgacccttatgcgaatgctcagtctgaagagcctgaagaagcagatgaaaaaagtaaaaaagatgaccgtgaaggacatggtcacggccttcttttcatcctactggagtattttcatgaccctcttgcacttcgtggccagcgttttcagaggctttttccgcatcatttgcagcctgctgcttgggggaagcctcgtcgaaggtgctaaaaagatcaaagttgcagaactgttagccaacatgccagaccccactcaggatgaggttagaggagatggggaggagggagagaggaaacccctggaagccgccctgccctccgaggatctgaccgacttaaaggagctgacagaggaaagtgaccttctttcggacatctttggcctggatctgaagagagaaggaggacagtacaaactgattcctcataatccaaatgctgggctcagtgacctcatgagcaacccagtccccatgcctgaggtgcaggaaaaatttcaggaacagaaggcaaaagaagaagaaaaggaagaaaaagaagaaaccaaatctgaacctgaaaaagccgagggagaagatggagaaaaagaagagaaagccaaggaagacaagggcaaacaaaagttgaggcagcttcacacacacagatacggagaaccagaagtgccagagtcagcattctggaagaaaatcatagcatatcaacagaaacttctaaactattttgctcgcaacttttacaacatgagaatgttagccttatttgtcgcatttgctatcaatttcatcttgctcttttataaggtctccacttcttctgtggttgaaggaaaggagctccccacgagaagttcaagtgaaaatgccaaagtgacaagcctggacagcagctcccatagaatcatcgcagttcactatgtactagaggagagcagcggctacatggagcccacgttgcgtatcttagctattctgcacacggtcatttctttcttctgcatcattggatactactgcttgaaagtcccattggttatttttaagcgagaaaaggaagtggcacggaaattggaatttgatgggctttatattacagaacagccttcagaagatgatattaaaggccagtgggatagactcgtaatcaacacacagtcatttcccaacaactactgggacaaatttgttaaaagaaaggttatggataaatatggagagttctacggccgagacagaatcagtgaattacttggcatggacaaggcagctctggacttcagtgatgccagagaaaagaagaagccaaagaaagacagctccttatcagctgtactgaactccattgatgtgaagtatcagatgtggaaactaggagtcgttttcactgacaactccttcctctacctagcctggtatatgactatgtctgttcttggacactataacaactttttttttgccgctcaccttctcgacattgctatgggattcaagacattaagaaccatcttgtcctcagtaactcacaatggcaaacagctcgtattaaccgttggcttattagctgttgttgtatacctatacactgtggtggcattcaattttttccgaaaattctacaataaaagtgaagatggtgatacaccagatatgaaatgtgacgatatgctaacatgctatatgttccacatgtatgttggagttcgtgctggaggagggatcggggatgaaatcgaagacccagcaggagatgaatatgagatctatcgaatcatctttgacatcactttcttcttctttgttattgtcattctcttggccataatacaaggtctaattattgatgcttttggagaactaagagaccaacaggaacaagtcaaagaagacatggagaccaaatgcttcatctgtgggataggcaatgattacttcgacacagtgccacatggctttgaaacccacactttacaggagcacaacttggctaattacttgttttttctgatgtatcttataaacaaagatgaaacagaacacacaggacaggaatcttatgtctggaagatgtatcaagaaaggtgttgggaatttttcccagcaggggattgcttccggaaacagtatgaagaccagctaaattaaactcagacccaatcacctctaaaaaccaaaaccctacccctctctctccctctctcaatttctctgctctcttggaaacattttgctgattttgtgaattgccagcgatgtgtgttttctgggagcatcgaagctctgtttcggaagagctgtttcctccccccaccttttgtatttactttgagactaaagactgaagaataatctaaattcatactcagacaaaaaaaggaattctggaaagaaaaccattctggacactgtcataacacacatagatagattttcttctgagactcccggagtcttctcgagctacgagaccttcacagagacacgtggcagccacactcacccagcctctttatttcaccatcctggaaggaaactgtctgtctaatggtcacagagcactgtagcacttaacagattgccatggacaccagttgcgaagggaaatagtgccttactatatgtgggttgagctatgcagaagatacgtgcatgaaaaaacatctttattttctttatgtcgacctttcttttcttagattgattttgtgaggttttttttttttcctttagtcttttctttagtgggggagggtaagaaaagcagtttgcacttaaaaagaaaaaaaaaaaacgggtggtgtgtctcaggacaaaaggaggctcttctcattcagctaaattcacatttgcc

SEQ ID NO: 491 - DNA, 15563 bp, human
cgcacgccgagcggctgccgggggaagcagaggcgccggaggctggggcaccgccgacgcctcgggagccatggccgaagggggagaaggaggcgaggacgagatccagtttctgaggactgaggatgaagtggtactccagtgcatcgccaccattcataaggagcagaggaagttctgcctggcagccgagggacttgggaatcgcctgtgcttcttggaacccacttcagaagccaagtacattcctccagatctctgcgtctgcaattttgtgctggaacagtccctatctgtcagagccctgcaggaaatgcttgccaacacaggtgaaaatggcggcgaaggggcagcacaaggaggtggccacaggaccctgttatacggccatgcagttctcctgaggcactctttcagcggaatgtatctaacatgcttgactacatcaagatcccagacagacaaacttgcctttgatgtaggtctacgggaacatgccacaggagaagcctgttggtggactatacatcctgcttccaaacagaggtccgaaggagagaaagttcgaattggcgatgacctcatcctcgtcagcgtgtcctctgaaagataccttcatctctcagtatcaaatggtaacatacaagtggatgcctcctttatgcaaacactctggaatgtacatcctacgtgctcaggaagtagcatcgaagaaggatacctacttggtgggcatgtagtacgtcttttccatggtcatgatgaatgtttgacgataccatctacagaccagaatgattcccagcacaggaggatattctacgaagctgggggagctgggactcgagccaggtctctttggagagtggaaccccttcggataagctggagtggcagtaacatcagatggggccaggctttccgactccggcatctcaccacaggccactacctggccttgacagaagaccaaggccttatactgcaagaccgggcaaagtcagacaccaagtccacagctttctctttccgggcatcaaaggaactcaaggagaaattagactccagtcacaagcgagacatagaaggcatgggagttccagaaatcaagtatggagattctgtctgctttgtgcagcatatagccagtggtctgtgggtgacctacaaagcacaagacgccaaaacttcccgcctgggacctctaaaaagaaaggtcatactccatcaggaaggccacatggatgatggattaacactgcagagatgccagcgtgaggagtcccaggctgctcggatcatccggaacactacagccttattcagccagtttgtcagtggaaacaatcgcacagctgcccccatcaccctgcctatagaagaagtcctgcagaccctacaggacttgatcgcctacttccagcccccagaggaggagatgcgacatgaagacaagcagaacaagctccgctcactcaaaaacagacaaaatcttttcaaggaagagggaatgttggcccttgtcttaaattgcattgaccgcttaaatgtctacaatagcgtagcacactttgcagggattgcaagggaagagagtggcatggcctggaaagaaattctgaacctcctctacaaattgctggctgctctcattcgcggaaacagaaacaattgcgctcaattctccaataaccttgattggctcatcagtaaattggacagactagaatcttcctcaggtatcttggaagttttgcactgcatcttaactgaaagcccagaagccttaaatctgatagcggagggccacatcaagtcgatcatctccctgttggataagcacgggcggaatcacaaggttctggatatcctgtgctccctctgtctctgcaatggggttgcagtgagagccaaccagaatctgatctgtgacaacttgctgccccggagaaacctactcctgcagacacgactgattaacgatgtaaccagtatccggccaaacatcttcctgggagtcgcggagggctcagcccagtacaagaagtggtacttcgagctgattatcgaccaggtggaccccttcctaacagcagagcccacacatctgcgggtgggctgggcctcttcttcaggctatgccccatacccaggaggtggagaaggatggggaggcaatggtgttggtgacgacctgtactcctatggctttgatggacttcacctttggtcaggccggatacccagagctgtggcttccatcaaccagcacctcctgagatcggatgacgtggtaagctgctgcctggacctcggggtgcccagcatctcattccgcatcaatgggcagcccgtgcaggggatgtttgagaacttcaacacagacgggctcttcttccctgtgatgagcttttcagcaggtgtcaaagtacgtttcctgatgggtggacgtcatggagagtttaagttcctgcctccctctggctatgccccttgctatgaagccttacttccaaaagagaagatgagattggagcctgtcaaagaatataaacgtgatgctgatggcattagagatctcttgggtaccacccagttcctctcccaagcctctttcatcccatgccccgtagacaccagtcaggttattttgccacctcacctagaaaagatccgagacagactagctgaaaacatccatgagctttggggaatgaataaaatagaacttggctggactttcggcaagatacgagatgacaataaaagacaacacccttgccttgtggagttttcaaagctcccagaaactgagaagaactataacctgcaaatgtcaactgaaaccttaaaaaccctcttggccctggggtgccacattgctcatgttaacccagctgctgaggaggatctcaagaaggtcaaactgcccaaaaactatatgatgtccaacggctataagccagcccctttggatttgtctgatgtgaagctgttacctcctcaagaaattttagtggataagcttgcagaaaatgcacacaatgtttgggcaaaagacagaataaaacaaggatggacctatggcatccaacaggatttgaagaacaaaagaaatccccgtctggtgccatatgcattactggatgagcgtaccaagaagtcaaacagggacagcctgcgggaagctgtgcgcacttttgttggttacgggtataacattgagccatcagaccaagaactagctgactcggctgtggagaaggtcagcatagacaagatccgatttttccgggtagagcgatcttatgcagtgagatctggaaagtggtattttgagtttgaagtggtgactggaggagacatgcgagtcggctgggcgaggccaggctgtcgacctgatgtcgagctgggggccgatgaccaagcctttgtgtttgaaggcaacaggggccagcgttggcatcaaggaagtgggtattttgggcgtacctggcagccaggggatgtggtcggatgtatgattaacctggatgatgcttcaatgatcttcacactgaatggggagctgctgatcaccaacaaaggctctgaacttgccttcgctgactacgagattgagaatggcttcgtgcccatctgctgtctgggtctatctcagatcggccgcatgaatctcgggacagatgccagtaccttcaagttttataccatgtgcggtctccaagagggctttgagccttttgctgtcaacatgaacagagatgttgctatgtggttcagcaagcgcctcccgacgtttgtcaacgtgccaaaggatcatccacacatagaggtcatgaggattgatggcaccatggacagccctccgtgtctcaaggtgacgcataagacatttggcacacagaatagcaatgccgacatgatctattgccgcttgagcatgcctgtcgagtgccactcctccttcagccacagcccctgtctggacagtgaagctttccagaaaaggaaacagatgcaagaaatactctctcatacaacaacacagtgctactacgccatccgcatctttgctggacaggatccatcctgtgtctgggtcggatgggtgactccagactatcacttgtacagtgaaaagtttgacctgaataaaaactgcacagtgactgtcaccctaggggatgaaagaggccgggtccatgaaagtgtgaaacgcagcaactgctacatggtctggggtggagacattgtagccagttcccagagatcaaatcggagcaacgtggacctggagatcggctgtctcgtggatctggccatgggcatgttgtccttctcagccaatggaaaggaactgggcacctgctaccaggtggagcctaataccaaagtgtttccagcagtcttcctgcagcctacaagtacttctttgtttcagtttgaacttggaaagctgaagaacgcaatgcccctgtcagcggccatattcaggagtgaagagaagaacccagtcccacagtgtccacctcggctggacgtccaaaccatccagcccgtgctctggagccgcatgcccaacagcttcctgaaggtggagaccgagcgtgtgagcgagcgccacggctgggtggtgcagtgcctggagcccctgcagatgatggcgctccacatccccgaggagaacaggtgtgtggatatcctggagctctgtgagcaggaggacctgatgcggttccattaccacacgctgaggctctacagcgcggtgtgcgccctgggaaacagccgcgtggcctacgccctgtgcagccacgtggacctctcccagctcttctatgccattgacaacaagtacctccccggcctccttcgatctggtttctatgacctgctcatcagcatccacctggccagcgccaaggagaggaagctgatgatgaagaacgagtacatcatccccattaccagcaccaccaggaatatctgcctcttcccggacgagtccaagaggcatggactgcctggggtgggcctgagaacatgtctcaagcccgggttcaggttctccaccccttgctttgttgtgactggtgaggatcaccaaaagcagagccccgagattcccttggagagtctcaggacgaaggctctgagtatgctgacagaggcagtgcagtgcagcggggcccacatccgagaccctgtaggggggtctgtggagttccagtttgtgcctgtgctgaaactcattggaaccctgctggtcatgggcgtgtttgatgatgatgatgttcggcagatcctcctcctgattgatccctctgtgtttggggagcatagtgcggggacagaggagggagcagaaaaggaggaagtgacccaggtggaggagaaggctgtggaggctggggagaaggccggcaaggaggctcctgtcaaaggcttgttgcagactcgattacccgaatccgtcaagctgcagatgtgtgagctcctcagctatctctgcgactgtgagctgcagcaccgagtggaggccattgtggcatttggtgacatttatgtctccaagctgcaggcaaatcagaagttccgctacaatgagctcatgcaggccctgaacatgtctgcggccctgactgcccggaagaccaaggagttccgctcacccccacaggagcagatcaacatgctgcttaactttcaactgggagagaactgcccctgcccagaggagattcgggaggagctgtatgatttccatgaggaccttctccttcactgtggggttcctttggaagaagaggaagaggaggaggaggacacctcctggacaggaaaactctgtgccttggtttacaaaatcaaaggcccacccaagccagagaaggagcagccgacggaggaggaggagagatgccccacaacattgaaggaactcatctcacagacgatgatctgctgggcccaggaggaccagatccaggattcagagctggtccgaatgatgttcaacctcctccggaggcagtatgacagcattggggagctgctgcaggcgctgcggaagacctacaccatcagccacacctctgtaagcgacaccatcaacctgctggctgccctgggccaaatccgctccctcctcagtgtcaggatgggcaaggaagaggagttgctcatgatcaatgggctgggagacataatgaacaacaaggtgttttaccagcatcccaacctcatgagagtcctgggcatgcacgagacggtgatggaggtgatggtgaacgtgttgggtacagagaaatctcagattgcatttccaaagatggttgctagctgctgccgtttcctttgctatttctgtcgaattagccggcaaaatcagaaggccatgtttgagcatctgagttatcttctggagaatagcagtgttggcctagcctccccgtcgatgaggggatccaccccgctggatgtggcagcttcctctgtgatggacaacaatgagttagcgctgagcttagaggaaccagacctcgagaaggtggtgacctacttggcaggctgtggcctacagagctgccccatgcttctggccaaaggataccctgatgtcggctggaaccccattgaaggggaacgctacctgtccttcctgaggtttgctgtcttcgtgaacagtgagagtgtggaagaaaacgccagcgttgtggtcaagctgctcatcagacgcccagagtgcttcggcccggccctgcggggtgaggggggaaacgggctcttggcagccatgcagggtgccattaagatctctgagaacccagcgctcgacctcccctctcaaggatacaaaagagaagtcagcacggaggacgatgaagaggaagaagaaatcgtgcatatgggcaatgcaattatgtcattttattcggcccttatagatctactgggccgctgtgctcctgaaatgcacctcatccagacaggaaagggggaagccatccgcatcaggtccatcctgcgctccctggtccccacagaagacctggttgggatcatcagcatccccttgaaactgccctccctcaacaaagatgggtcggtcagtgagccagatatggcggccaatttctgccctgaccacaaggcacctatggtgctgttcttggaccgcgtttatggcattaaggatcaaacttttctgctccacttgctggaggttggatttttacctgacctaagagcttctgcctctctagatacagtttccctaagcaccacagaggctgcgcttgcactaaataggtatatatgttctgctgtgctcccgctcctcacaagatgtgcccctctctttgccggaacagaacactgcacctctctgattgattccacactgcagacaatatacaggctatccaagggacgttccctcaccaaagcacaaagggacactatagaagaatgtttgcttgccatttgcaatcacttgaggccttccatgttacagcaactcctgcgacgcctcgtttttgatgtgccgcaactcaatgaatactgcaaaatgcctctcaagcttctgacgaatcactatgaacagtgttggaagtattactgcctgccttcaggatgggggagctacgggctagctgtggaagaagagctgcacctaacggagaagcttttctgggggatttttgactcgctctcccataagaaatatgacccagatcttttccgaatggccctgccttgtctcagtgctatagctggggccttgccaccagattatttagataccagaatcacagccacgttggagaaacagatctcagtggatgcggatggcaactttgacccaaaacctattaacaccatgaatttttccttgcctgaaaaattggaatacatcgtcaccaagtatgctgagcattcacatgataaatgggcctgtgacaagagtcagagtggatggaaatatgggatttccctggatgaaaatgtgaagacccacccactgataaggcctttcaagacattaacggagaaggagaaggaaatttatcgctggcctgcgcgagagtccctgaaaaccatgctggctgtgggctggactgtggagaggaccaaagagggagaagctttggttcaacagcgggaaaatgagaagcttcgaagtgtgtcccaggccaaccagggcaacagctacagtcctgctcccctcgacctctcaaacgttgtgctctccagagagctccagggaatggtggaggtcgtggctgagaactatcacaatatctgggccaagaagaagaagctggagctggagagcaaaggtggtggcagccaccctcttctggtaccatatgacaccttgactgccaaggaaaagttcaaggaccgggagaaggcacaggacctgtttaagttcctccaagtgaatggcatcatagtttccaggggtatgaaggatatggagctggatgcctcctccatggagaagaggtttgcctataagttcttgaagaagatcctgaaatacgttgattctgctcaagaatttattgcccatttagaagccattgtcagcagtgggaaaactgaaaagtctccccgtgaccaggagatcaaattctttgccaaagttctcctcccgctggttgaccagtacttcaccagtcattgcctctacttcttgtcatcccctctgaagccccttagcagcagcggatatgcctcccataaggagaaagaaatggtggccggcctgttctgcaaacttgccgctctcgttagacacagaatttccctctttggtagtgattctactacaatggtgagctgtcttcacatcttagctcagacacttgacacaaggactgtcatgaagtcaggctcagagctggtgaaggctgggttacgagcattctttgaaaatgctgcagaagatttggagaagacttcagaaaacctgaaacttgggaagttcacccattcccgaacgcagattaaaggcgtttctcagaatattaactacactacagtggctctgctccccatcctgacgtccatctttgagcacgtcactcagcatcagtttggaatggatctactcttgggtgatgtgcagatttcatgctaccacatactgtgcagcctctactcccttgggacgggaaagaacatttatgttgaaaggcaacgccctgcccttggagaatgtctggcctcgctggcagctgccataccagtggcattcctggagcccacccttaatcgctacaatccactctcggtcttcaacaccaaaacccccagggagaggtctattctggggatgccagacacggtagaagacatgtgtcctgacatcccccagctggaaggcctgatgaaggaaatcaacgacctggccgagtcaggggcccggtacacagagatgccccatgtcatcgaggtgatcttacccatgctctgcaactacttgtcctactggtgggagcggggtcctgagaacctgccccccagcacagggccatgctgcaccaaggtcacctctgaacacctcagtctcatcctgggcaacattctgaaaatcatcaacaacaacctgggcatcgatgaggcctcctggatgaagcgcattgcagtgtatgcacagcccatcatcagcaaagccaggcccgacctgctgagaagccacttcatcccaactctggagaagctgaagaaaaaggctgtcaagacggtgcaggaggaggagcagttgaaagccgatggcaaaggggacacccaggaggcagaactcctcatcctggacgagttcgcggtcctctgcagagatctctatgccttctaccccatgctgatccgctacgtggacaacaacagatctaactggctgaaaagtcctgatgctgattctgaccagctcttccgcatggtggcagaagtcttcattctgtggtgtaaatctcataacttcaagagagaagagcaaaattttgtgattcagaatgaaattaataatttggcatttttaactggagacagcaaaagcaagatgtcaaaagccatgcaagtaaagtctggaggacaagaccaggagcggaagaagacaaagcggcggggagacttgtattccatccagacctccctcatcgtggctgcactcaagaaaatgctgcccattggtttgaatatgtgtactccaggcgaccaggagctgatctccctcgcaaaatcgcgatacagccatagggacacagatgaagaggtcagagaacatctgcggaacaacttgcacttgcaggaaaagtctgatgacccagctgtaaaatggcaactgaacctctacaaggatgttctgaagagtgaagaacctttcaatccggaaaagacagtggagcgtgtgcagagaatttcagcagctgtcttccacctggaacaggtggaacagcctttgaggtccaagaaggccgtctggcacaaactgttatcaaagcaacggaaacgggcagtggtggcctgtttcaggatggcccctctctacaacctgcccaggcaccgctctattaacctcttcctccatggctatcagagattttggatagaaacagaggagtattcctttgaagagaaactagtacaggatttggctaaatctccaaaggtggaagaggaggaggaggaagagacagaaaaacaacctgacccactacatcagatcattctctattttagccgcaacgctctcacggagaggagcaaattggaagacgaccctttgtacacctcctattccagcatgatggccaagagttgtcaaagtggtgaggatgaagaagaagatgaagacaaggaaaaaacattcgaagagaaagagatggagaagcaaaaaaccctctatcagcaagctcggctgcatgagcgtggtgctgcagagatggtccttcagatgataagcgctagcaaaggtgagatgagccccatggtggttgagacgctgaagctggggatcgccattctgaacggaggcaatgctggtgtgcaacagaaaatgctagattacctaaaggagaaaaaggatgctggattctttcaaagcctttctggtcttatgcagtcttgcagtgtccttgatttgaatgcatttgagaggcagaataaagctgaaggcctggggatggtgactgaagaaggaacactcattgttcgggaacgtggtgaaaaagtactccagaatgacgagttcacgcgtgatctctttagattcctacagttactttgtgagggacataacagtgactttcagaacttcctgcggactcagatgggcaacaccaccaccgtgaatgtcatcatcagcactgtggactaccttctgcgtctgcaggaatcaatcagtgatttctactggtattattcagggaaggacatcattgatgaatctggacagcacaatttttccaaagctctggcagtcaccaagcagattttcaattctcttacagaatacatccagggcccttgcattggtaatcaacagagcctggctcacagcaggctgtgggacgcagtggttggcttcctccatgtctttgctaatatgcagatgaaactctctcaggattccagtcagatcgagctgctgaaggaactcttggatctccttcaggacatggtggtgatgcttctgtccctcctggaagggaatgtggtaaatggcaccattggcaagcagatggttgacacactggtagaatcatctaccaatgtagaaatgatcttgaaattctttgacatgttcttgaaacttaaagacttaaccagctcagacaccttcaaagaatatgacccagatggtaaaggaattatctccaaaaaagaattccagaaggccatggaagggcaaaaacagtacacgcagtcagagattgactttctcctgtcgtgtgcagaagctgatgagaatgacatgtttaattacgttgattttgtagaccggttccatgagccagccaaggacatagggtttaatgtggctgtgttattgacaaatctttctgaacacatgccaaacgattcccgcctgaagtgtctgttggacccagcagaaagtgtgctaaattacttcgaaccctacctaggacgcatcgagatcatgggtggggccaagaagattgagcgtgtttattttgagatcagtgaatccagtcgcactcagtgggagaagccccaggtgaaggaatctaagcgacagttcatttttgatgttgtcaatgaaggtggggagcaggaaaagatggagctgtttgtgaacttctgtgaggacaccatctttgaaatgcagttagcatctcagatctctgaatccgattcagctgacaggccagaagaggaggaagaagatgaagattcttcttacgtgttagaaattgcgggtgaagaggaagaagacgggtctcttgagccggcctctgcatttgctatggcctgtgcctctgtgaagaggaatgtcaccgacttcctgaagagagcaaccctgaagaacctcaggaagcagtacaggaacgtgaaaaagatgactgcgaaggagctggtgaaggtgctcttctcctttttctggatgctgttcgtggggctattccagttgctcttcaccatcctgggaggaatctttcagatcctctggagcacagtgtttggagggggcctggtagaaggggcaaagaacatcagagtgaccaagatcctgggtgacatgcctgacccaacccaatttggtatccatgatgacactatggaggctgagagggcagaggtgatggagccaggtatcaccactgaactagtacacttcataaagggggagaagggagatacagatatcatgtcagacctctttggactccacccaaagaaagagggcagcttaaagcatgggcctgaagtgggtttgggtgacctctcagaaattattggcaaggatgaaccccctacattagagagtactgtacagaagaagaggaaagctcaggcagcagaaatgaaagcagcaaatgaagcagaaggaaaagtagaatccgagaaggcagacatggaagatggagagaaggaagacaaagacaaagaagaggagcaagctgagtacctgtggacagaagtgacaaaaaagaagaagcggcggtgtggtcagaaggttgagaagccggaagctttcacagccaatttctttaaagggctggaaatctatcagaccaagttactgcattacctggccaggaatttctacaacctgaggttccttgctctgtttgtagccttcgctatcaacttcatcctgcttttttataaggtcactgaagaacctttagaagaagagacagaggatgttgcaaacctatggaattcctttaatgacgaggaagaggaagaagcgatggtattctttgtccttcaggagagcaccgggtatatggcaccaaccctgcgtgccctggccatcatccataccatcatctctctagtctgtgtggtgggctactactgcctgaaggtgcctttggtggttttcaaaagggaaaaagaaatcgccaggaagctggagtttgatggcctatatatcaccgaacagccatctgaagatgacatcaaggggcagtgggaccgcttggtgatcaacacaccatcttttcctaataactactgggacaagtttgtaaagagaaaggtgatcaacaagtatggagatctctacggagcagaacgcattgctgaacttctgggtttggacaaaaatgctcttgactttagcccagtagaagagaccaaagcagaagcggcttctctggtgtcatggctaagttccatagacatgaagtaccatatctggaagcttggagttgtttttactgacaactcctttctctaccttgcctggtatacaaccatgtcagtcctgggccactacaataacttcttctttgctgctcacctattggacatcgcaatgggcttcaagacactgaggaccattctgtcatctgtaactcacaatggcaaacagttggttctgactgtcggtctcctggccgtggtggtttatctctatactgtggtggctttcaacttcttccgcaagttctacaacaaaagcgaagacgatgacgagcccgatatgaagtgcgacgacatgatgacgtgttaccttttccacatgtacgtgggagtgagagcaggaggtggcattggtgatgaaattgaagaccctgctggtgatccttatgaaatgtatcgcattgtctttgacattacctttttcttcttcgtcattgtcatcttgctggccatcattcaaggtcttattattgatgctttcggagagctaagagaccagcaggaacaagtacgagaagatatggagactaaatgtttcatctgtgggattggcaatgactactttgacacaacccctcatggttttgaaacacatacattacaagagcacaacttagccaactacttgttctttctgatgtatttgattaataaagatgaaacagagcacacgggtcaggaatcttatgtctggaagatgtaccaagaaaggtgttgggatttcttcccagccggtgactgctttcgtaaacaatatgaagatcagcttggataaatctgaatcaaagaagcgcgacaattctggacagtcaacttcccatgaaataaagtcccctttttacagttctgcaacatatctgaaatgtgacattttctaaatgcctcccttaaaaaaaaaactgctgaaaatctgtgctattttgaaattgatttggctttttgtgcctaatggacatacactgtgggagagaacctgtcaaaatgtcgaagaaggaaggcgaagaatcaagtaatctctaggcaaatgccttcaagttttccagttctgaggtaactagttcagtttgttgggatggaagcatgaaggaaagggctagagaagtatgaaatctcgaatgtgtaatacctgaaaatttaaacacttgaatgtcatcatggtatccaacttgtgactcatagggtctgaactcactccaaaagataataactgcagtctaatttttcccatggtacttgctagtgactgtatccagaaaagctttaagcagttaaagaaacagaaaaaaaccgacactttgtcgacactgaaatatcgattaagtgccttaaaacctctttagacatagctatgcaagttttttatgtttgtgttccagaaggacagttccattcattagttgtgatcttccgtcttactttatgaaactgcacttgaaggttattcatacaagtttttttagtaacagctgtcagtcaactgctgttattagaagaaaagtactgtactgaaaattcagaaaaaaaatctcaaccttatgccaaaatggagtaatgctttatggtcccttgtaagtagtggagctgctctgtttaggtgaatctcctcaaatacaatgaagtgcccactgcaataaagtaatacgtaccaataaaaa

SEQ ID NO: 492 - DNA, 2985 bp, human
tcgtaaggttcataggtaagagaacagcgaaggttccggggctagtttgtgtttcagacttccatatttccatttgcagttgggtgaagtggttagagctgaaaggggacagctggagtcaaacaacttaactcaaatatctgggaacgatttcgcgctgaggaagaccctttgggacttgtagctccactccggggaacggactcgccgggactgacagttgccggaagtgaggctgcggggaatggccgccgctgcgaccatggcggctgcggcccgggaactggtgttgcgggctgggacctcagatatggaggaggaagagggcccgctggcgggtggtcctgggctccaggaaccactgcaacttggggagttggatatcacttctgatgaattcatcctggatgaagtggatgttcacattcaggcaaatctggaggatgagttagtaaaggaagctcttaaaacgggtgtagatctccgtcactattcaaagcaagttgagctggagctacagcagattgaacagaaatccattcgggattatattcaagagagtgagaatatagcatctctacacaaccagatcacagcctgtgatgctgtcctggagcgaatggagcagatgttgggagcttttcagagtgacctcagctccatcagctctgagatccggacactgcaggaacagtcaggagccatgaacattcgacttcgaaatcgccaggcagttcgggggaaacttggggagcttgttgatggtctggtggtgccttctgctctggtcacggcaattctggaggctccagtgacagagcccaggttcttggagcagctacaggagctggatgccaaggcagccgcagtcagagagcaggaagctagaggcacagcagcctgcgcagatgtcagaggcgtgctcgatcggctccgggtcaaggcagtgacgaagatccgagagtttatcctccagaagatttattccttcaggaaacccatgaccaactatcagatcccccagacggccctgctgaagtacaggttcttctatcagtttctgctgggcaatgaacgagcaacagcaaaggagatcagggatgaatatgtggagacgctgagcaagatttacctgtcttactaccgctcttacctggggcggctcatgaaggtgcagtatgaggaagtcgctgagaaagatgatctaatgggtgtggaagatacagcaaagaaaggattcttctcaaagccatcgctccgcagcaggaacaccattttcaccctaggaacccgcggctctgtcatctcccccactgaacttgaggcccccatcctggtgcctcacacagcgcagcgcggagagcagaggtatccatttgaggccctcttccgcagccagcactacgccctcctagacaattcctgccgcgaataccttttcatctgtgaattttttgttgtgtctggcccagctgcacacgacctgttccatgctgtcatgggccgtacactcagcatgaccctgaaacacctggattcttatctagctgactgctacgatgccattgctgtttttctctgtatccacattgttctccggttccgtaacattgcagcaaagagggatgttcctgccctggacaggtactgggaacaggtgcttgccttgctatggccacggtttgaactgatcctggagatgaatgttcagagcgtccgaagcactgacccccagcgcctaggggggttggatactcggccccactatatcacacgccgctatgcagagttctcctccgctcttgtcagtatcaaccagacaattcctaatgaacggaccatgcaattgctgggacagctgcaggtggaggtggagaattttgtcctccgagtggcagctgagttctcctcaaggaaggagcagcttgtgtttctgatcaacaactatgacatgatgctgggtgtgctgatggagcgggctgcagatgacagcaaagaggttgagagcttccagcagctgctcaatgctcggacacaggaattcattgaagagttgctgtctcccccttttgggggtttagtggcatttgtgaaggaggctgaggctttgattgagcgtggacaggctgagcgacttcgaggggaagaagcccgggtaactcagctgatccgtggctttggtagttcctggaaatcatcagtggaatctctgagtcaggatgtaatgcggagtttcaccaacttcagaaatggcaccagtatcattcagggagcgctgacccagctgatccagctctatcatcgcttccaccgggtgctgtcccagccgcagctccgagccctccctgcccgggctgagctcatcaacattcaccaccttatggtggagctcaagaagcataagcccaacttctgatgtgccagaaaccgccctgagatctgccggtcatctccatggacttctgcaccccattccatacccttcttcacctggggtaccccttccagttttccccttgcttcccaggcccttgacatggcttacctgccttcactcccagcaccttgcccaacaggataagctggatccccttggccttctgaatatcccagtgtcttcaggtttcccaagaccacttccctgtgggcttccaaaatggcctttatcatttctccagtctgtcaccctcctttcctgctcccatacacccaaggcttgtttcttcccctgtaaaaaccactgcctcaatctctggttcactcaactagtcaccatgtcctgaggcatgaagcctcctcagctcttggaattgctggcaaggggtgactgcctctgagtcattgtgtttttcaaagtgatttcttttctgtagctttttgacctaagatctcagcaatttgaacactaacctctcccctcctggctcaagaattactccgaagtcagtctgcagaaaataaatatttagtatgacatgacactta

SEQ ID NO: 493 - DNA, 4481 bp, human
acccccgagaaagcaacccagcgcgccgcccgctcctcacgtgtccctcccggccccggggccacctcacgttctgcttccgtctgacccctccgacttccggtaaagagtccctatccgcacctccgctcccacccggcgcctcggcgcgcccgccctccgatgcgctcagcggccgcagctcctcggagtcccgcggtggccaccgagtctcgccgcttcgccgcagccaggtggcccgggtggcgctcgctccagcggccggcgcggcggagcgggcggggcggcggtggcgcggccccgggaccgtatccctccgccgcccctcccccgcccggccccggcccccctccctcccggcagagctcgcctccctccgcctcagactgttttggtagcaacggcaacggcggcggcgcgtttcggcccggctcccggcggctccttggtctcggcgggcctccccgccccttcgtcgtcgtccttctccccctcgccagcccgggcgcccctccggccgcgccaacccgcgcctccccgctcggcgcccgtgcgtccccgccgcgttccggcgtctccttggcgcgcccggctcccggctgtccccgcccggcgtgcgagccggtgtatgggcccctcaccatgtcgctgaagccccagcagcagcagcagcagcagcagcaacagcagcagcagcaacagcagcagcagcagcagcagcagccgccgcccgcggctgccaatgtccgcaagcccggcggcagcggccttctagcgtcgcccgccgccgcgccttcgccgtcctcgtcctcggtctcctcgtcctcggccacggctccctcctcggtggtcgcggcgacctccggcggcgggaggcccggcctgggcagaggtcgaaacagtaacaaaggactgcctcagtctacgatttcttttgatggaatctatgcaaatatgaggatggttcatatacttacatcagttgttggctccaaatgtgaagtacaagtgaaaaatggaggtatatatgaaggagtttttaaaacttacagtccgaagtgtgatttggtacttgatgccgcacatgagaaaagtacagaatccagttcggggccgaaacgtgaagaaataatggagagtattttgttcaaatgttcagactttgttgtggtacagtttaaagatatggactccagttatgcaaaaagagatgcttttactgactctgctatcagtgctaaagtgaatggcgaacacaaagagaaggacctggagccctgggatgcaggtgaactcacagccaatgaggaacttgaggctttggaaaatgacgtatctaatggatgggatcccaatgatatgtttcgatataatgaagaaaattatggtgtagtgtctacgtatgatagcagtttatcttcgtatacagtgcccttagaaagagataactcagaagaatttttaaaacgggaagcaagggcaaaccagttagcagaagaaattgagtcaagtgcccagtacaaagctcgagtggccctggaaaatgatgataggagtgaggaagaaaaatacacagcagttcagagaaattccagtgaacgtgaggggcacagcataaacactagggaaaataaatatattcctcctggacaaagaaatagagaagtcatatcctggggaagtgggagacagaattcaccgcgtatgggccagcctggatcgggctccatgccatcaagatccacttctcacacttcagatttcaacccgaattctggttcagaccaaagagtagttaatggaggtgttccctggccatcgccttgcccatctccttcctctcgcccaccttctcgctaccagtcaggtcccaactctcttccacctcgggcagccacccctacacggccgccctccaggcccccctcgcggccatccagacccccgtctcacccctctgctcatggttctccagctcctgtctctactatgcctaaacgcatgtcttcagaagggcctccaaggatgtccccaaaggcccagcgacatcctcgaaatcacagagtttctgctgggaggggttccatatccagtggcctagaatttgtatcccacaacccacccagtgaagcagctactcctccagtagcaaggaccagtccctcggggggaacgtggtcatcagtggtcagtggggttccaagattatcccctaaaactcatagacccaggtctcccagacagaacagtattggaaatacccccagtgggccagttcttgcttctccccaagctggtattattccaactgaagctgttgccatgcctattccagctgcatctcctacgcctgctagtcctgcatcgaacagagctgttaccccttctagtgaggctaaagattccaggcttcaagatcagaggcagaactctcctgcagggaataaagaaaatattaaacccaatgaaacatcacctagcttctcaaaagctgaaaacaaaggtatatcaccagttgtttctgaacatagaaaacagattgatgatttaaagaaatttaagaatgattttaggttacagccaagttctacttctgaatctatggatcaactactaaacaaaaatagagagggagaaaaatcaagagatttgatcaaagacaaaattgaaccaagtgctaaggattctttcattgaaaatagcagcagcaactgtaccagtggcagcagcaagccgaatagccccagcatttccccttcaatacttagtaacacggagcacaagaggggacctgaggtcacttcccaaggggttcagacttccagcccagcatgtaaacaagagaaagacgataaggaagagaagaaagacgcagctgagcaagttaggaaatcaacattgaatcccaatgcaaaggagttcaacccacgttccttctctcagccaaagccttctactaccccaacttcacctcggcctcaagcacaacctagcccatctatggtgggtcatcaacagccaactccagtttatactcagcctgtttgttttgcaccaaatatgatgtatccagtcccagtgagcccaggcgtgcaacctttatacccaatacctatgacgcccatgccagtgaatcaagccaagacatatagagcagtaccaaatatgccccaacagcggcaagaccagcatcatcagagtgccatgatgcacccagcgtcagcagcgggcccaccgattgcagccaccccaccagcttactccacgcaatatgttgcctacagtcctcagcagttcccaaatcagccccttgttcagcatgtgccacattatcagtctcagcatcctcatgtctatagtcctgtaatacagggtaatgctagaatgatggcaccaccaacacacgcccagcctggtttagtatcttcttcagcaactcagtacggggctcatgagcagacgcatgcgatgtatgcatgtcccaaattaccatacaacaaggagacaagcccttctttctactttgccatttccacgggctcccttgctcagcagtatgcgcaccctaacgctaccctgcacccacatactccacaccctcagccttcagctacccccactggacagcagcaaagccaacatggtggaagtcatcctgcacccagtcctgttcagcaccatcagcaccaggccgcccaggctctccatctggccagtccacagcagcagtcagccatttaccacgcggggcttgcgccaactccaccctccatgacacctgcctccaacacgcagtcgccacagaatagtttcccagcagcacaacagactgtctttacgatccatccttctcacgttcagccggcgtataccaacccaccccacatggcccacgtacctcaggctcatgtacagtcaggaatggttccttctcatccaactgcccatgcgccaatgatgctaatgacgacacagccacccggcggtccccaggccgccctcgctcaaagtgcactacagcccattccagtctcgacaacagcgcatttcccctatatgacgcacccttcagtacaagcccaccaccaacagcagttgtaaggctgccctggaggaaccgaaaggccaaattccctcctcccttctactgcttctaccaactggaagcacagaaaactagaatttcatttattttgtttttaaaatatatatgttgatttcttgtaacatccaataggaatgctaacagttcacttgcagtggaagatacttggaccgagtagaggcatttaggaacttgggggctattccataattccatatgctgtttcagagtcccgcaggtaccccagctctgcttgccgaaactggaagttatttattttttaataacccttgaaagtcatgaacacatcagctagcaaaagaagtaacaagagtgattcttgctgctattactgctaaaaaaaaaaaaaaaaaaa

SEQ ID NO: 494 - DNA, 1694 bp, human
ctctctgcccacctctgcttcctctaggaacacaggagttccagatcacatcgagttcaccatgaattcactcagtgaagccaacaccaagttcatgttcgacctgttccaacagttcagaaaatcaaaagagaacaacatcttctattcccctatcagcatcacatcagcattagggatggtcctcttaggagccaaagacaacactgcacaacagattaagaaggttcttcactttgatcaagtcacagagaacaccacaggaaaagctgcaacatatcatgttgataggtcaggaaatgttcatcaccagtttcaaaagcttctgactgaattcaacaaatccactgatgcatatgagctgaagatcgccaacaagctcttcggagaaaaaacgtatctatttttacaggaatatttagatgccatcaagaaattttaccagaccagtgtggaatctgttgattttgcaaatgctccagaagaaagtcgaaagaagattaactcctgggtggaaagtcaaacgaatgaaaaaattaaaaacctaattcctgaaggtaatattggcagcaataccacattggttcttgtgaacgcaatctatttcaaagggcagtgggagaagaaatttaataaagaagatactaaagaggaaaaattttggccaaacaagaatacatacaagtccatacagatgatgaggcaatacacatcttttcattttgcctcgctggaggatgtacaggccaaggtcctggaaataccatacaaaggcaaagatctaagcatgattgtgttgctgccaaatgaaatcgatggtctccagaagcttgaagagaaactcactgctgagaaattgatggaatggacaagtttgcagaatatgagagagacacgtgtcgatttacacttacctcggttcaaagtggaagagagctatgacctcaaggacacgttgagaaccatgggaatggtggatatcttcaatggggatgcagacctctcaggcatgaccgggagccgcggtctcgtgctatctggagtcctacacaaggcctttgtggaggttacagaggagggagcagaagctgcagctgccaccgctgtagtaggattcggatcatcacctacttcaactaatgaagagttccattgtaatcaccctttcctattcttcataaggcaaaataagaccaacagcatcctcttctatggcagattctcatccccgtagatgcaattagtctgtcactccatttggaaaatgttcacctgcagatgttctggtaaactgattgctggcaacaacagattctcttggctcatatttcttttctttctcatcttgatgatgatcgtcatcatcaagaatttaatgattaaaatagcatgcctttctctctttctcttaataagcccacatataaatgtactttttcttccagaaaaattctccttgaggaaaaatgtccaaaataagatgaatcacttaataccgtatcttctaaatttgaaatataattctgtttgtgacctgttttaaatgaaccaaaccaaatcatactttttctttgaatttagcaacctagaaacacacatttctttgaatttaggtgatacctaaatccttcttatgtttctaaattttgtgattctataaaacacatcatcaataaaatagtgacataaaatca

SEQ ID NO: 495 - DNA, 5329 bp, human
  misc_feature 1986: n = A,T,C or G
gtggtgtcggtgtcggcagcatccccggcgccctgctgcggtcgccggagccctcggcctctgttctcctccccctcccgcccttacctccacgcgggaccgcccgcgccagtcaactcctcgcactttgcccctgcttggcagcggataaaagggggctgaggaaataccggacacgtccacccgttgccagctctagcctttaaattcccggctcgggacctccacgcaccgggctagcgccgacaaccagctagcgtgcaaggcgccgcggctcagcgcgtaccggcgggcttcgaaaccgcagtcctccggcgaccccgaactccgctccggagcctcagccccctggaaagtgatcccggcatcggagagccaagatgccggcccacttgctgcaggacgatatctctagctcctataccaccaccaccaccattacagcgcctccctccagggtcctgcagaatggaggagataagttggagacgatgcccctctacttggaagacgacattcgccctgatataaaagatgatatatatgaccccacctacaaggataaggaaggcccaagccccaaggttgaatatgtctggagaaacatcatccttatgtctctgctacacttgggagccctgtatgggatcactttgattcctacctgcaagttctacacctggctttggggggtattctactattttgtcagtgccctgggcataacagcaggagctcatcgtctgtggagccaccgctcttacaaagctcggctgcccctacggctctttctgatcattgccaacacaatggcattccagaatgatgtctatgaatgggctcgtgaccaccgtgcccaccacaagttttcagaaacacatgctgatcctcataattcccgacgtggctttttcttctctcacgtgggttggctgcttgtgcgcaaacacccagctgtcaaagagaaggggagtacgctagacttgtctgacctagaagctgagaaactggtgatgttccagaggaggtactacaaacctggcttgctgctgatgtgcttcatcctgcccacgcttgtgccctggtatttctggggtgaaacttttcaaaacagtgtgttcgttgccactttcttgcgatatgctgtggtgcttaatgccacctggctggtgaacagtgctgcccacctcttcggatatcgtccttatgacaagaacattagcccccgggagaatatcctggtttcacttggagctgtgggtgagggcttccacaactaccaccactcctttccctatgactactctgccagtgagtaccgctggcacatcaacttcaccacattcttcattgattgcatggccgccctcggtctggcctatgaccggaagaaagtctccaaggccgccatcttggccaggattaaaagaaccggagatggaaactacaagagtggctgagtttggggtccctcaggttcctttttcaaaaaccagccaggcagaggttttaatgtctgtttattaactactgaataatgctaccaggatgctaaagatgatgatgttaacccattccagtacagtattcttttaaaattcaaaagtattgaaagccaacaactctgcctttatgatgctaagctgatattatttcttctcttatcctctctctcttctaggcccattgtcctccttttcactttaatcgccctcctttcccttattgcctcccaggcaagcagctggtcagtctttgctcagtgtccagcttccaaagcctagacaacctttctgtagcctaaaacgaatggtctttgctccagataactctctttccttgagctgttgtgagctttgaagtaggtggcttgagctagagataaaacagaatcttctgggtagtcccctgttgattatcttcagcccaggcttttgctagatggaatggaaaagcaacttcatttgacacaaagcttctaaagcnaggtaaattgtcgggggagagagttagcatgtatgaatgtaaggatgagggaagcgaaggaacctctcgccatgatcagacatacagctgcctacctaatgaggacttcaagccccaccacatagcatgcttcctttctctcctggctcggggtaaaaagtggctgcggtgtttggcaatgctaattcaatgccgcaacatatagttgaggccgaggataaagaaaagacattttaagtttgtagtaaaagtggtctctgctggggaagggttttcttttctttttttctttaataacaaggagatttcttagttcatatatcaagaagtcttgaagttgggtgtttccagaattggtaaaaacagcagctcatagaattttgagtattccatgagctgctcattacagttctttcctctttctgctctgccatcttcaggatattggttcttcccctcatagtaataagatggctgtggcatttccaaacatccaaaaaaagggaaggatttaaggaggtgaagtcgggtcaaaaataaaatatatatacatatatacattgcttagaacgttaaactattagagtatttcccttccaaagagggatgtttggaaaaaactctgaaggagaggaggaattagttgggatgccaatttcctctccactgctggacatgagatggagaggctgagggacaggatctataggcagcttctaagagcgaacttcacataggaagggatctgagaacacgttcaggggttgagaaggttactgagtgagttattgggagtcttaataaactagatattaggtccattcattaattagttccagtttctccttgaaatgagtaaaaactagaaggcttctctccacagtgttgtgccccttcactcatttttttttgaggagaagggggtctctgttaacatctagcctaaagtatacaaactgcctggggggcagggttaggaatctcttcactaccctgattcttgattcctggctctaccctgtctgtcccttttctttgaccagatctttctcttccctgaacgttttcttctttccctggacaggcagcctcctttgtgtgtattcagaggcagtgatgacttgctgtccaggcagctccctcctgcacacagaatgctcagggtcactgaaccactgcttctcttttgaaagtagagctagctgccactttcacgtggcctccgcagtgtctccacctacacccctgtgctcccctgccacactgatggctcaagacaaggctggcaaaccctcccagaaacatctctggcccagaaagcctctctctccctccctctctcatgagaagccaagcgctcatgttgagccagtgggccagccacagagcaaaagagggtttattttcagtcccctctctctgggtcagaaccagagggcatgctgaatgccccctgcttacttggtgagggtgccccgcctgagtcagtgctctcagctggcagtgcaatgcttgtagaagtaggaggaaacagttctcactgggaagaagcaagggcaagaacccaagtgcctcacctcgaaaggaggccctgttccctggagtcagggtgaactgcaaagctttggctgagacctgggatttgagataccacaaaccctgctgaacacagtgtctgttcagcaaactaaccagcattccctacagcctagggcagacaatagtatagaagtctggaaaaaaacaaaaacagaatttgagaaccttggaccactcctgtccctgtagctcagtcatcaaagcagaagtctggctttgctctattaagattggaaatgtacactaccaaacactcagtccactgttgagccccagtgctggaagggaggaaggcctttcttctgtgttaattgcgtagaggctacaggggttagcctggactaaaggcatccttgtctttgagctattcacctcagtagaaaaggatctaagggaagatcactgtagtttagttctgttgacctgtgcacctaccccttggaaatgtctgctggtatttctaattccacaggtcatcagatgcctgcttgataatatataaacaataaaaacaactttcacttcttcctattgtaatcgtgtgccatggatctgatctgtaccatgaccctacataaggctggatggcacctcaggctgagggccccaatgtatgtgtggctgtgggtgtgggtgggagtgtgtctgctgagtaaggaacacgattttcaagattctaaagctcaattcaagtgacacattaatgataaactcagatctgatcaagagtccggatttctaacagtccttgctttggggggtgtgctggcaacttagctcaggtgccttacatcttttctaatcacagtgttgcatatgagcctgccctcactccctctgcagaatccctttgcacctgagaccctactgaagtggctggtagaaaaaggggcctgagtggaggattatcagtatcacgatttgcaggattcccttctgggcttcattctggaaacttttgttagggctgcttttcttaagtgcccacatttgatggagggtggaaataatttgaatgtatttgatttataagtttttttttttttttgggttaaaagatggttgtagcatttaaaatggaaaattttctccttggtttgctagtatcttgggtgtattctctgtaagtgtagctcaaataggtcatcatgaaaggttaaaaaagcgaggtggccatgttatgctggtggttgccagggcctccaaccactgtgccactgacttgctgtgtgaccctgggcaagtcacttaactataaggtgcctcagttttccttctgttaaaatggggataataatactgacctacctcaaagggcagttttgaggcatgactaatgctttttagaaagcattttgggatccttcagcacaggaattctcaagacctgagtattttttataataggaatgtccaccatgaacttgatacgtccgtgtgtcccagatgctgtcattagtctatatggttctccaagaaactgaatgaatccattggagaagcggtggataactagccagacaaaatttgagaatacataaacaacgcattgccacggaaacatacagaggatgccttttctgtgattgggtgggattttttccctttttatgtgggatatagtagttacttgtgacaagaataattttggaataatttctattaatatcaactctgaagctaattgtactaatctgagattgtgtttgttcataataaaagtgaagtgaatctgattgcactg

SEQ ID NO: 496 - DNA, 2572 bp, human
cggtcccgcactggtgcagccatgtcctcttccccgtgggagcctgcgaccctgcgccgggtgttcgtggtgggggttggcatgaccaagtttgtgaagcctggagctgagaattcaagagactaccctgacttggcagaagaagcaggcaagaaggctttagctgatgcacagatcccttattcagcagtggaccaggcatgtgttggctatgtttttggtgactctacctgtgggcagagggctatctatcacagtttgggaatgactggaattcctataatcaatgtcaacaataactgtgctactggttctactgctttgtttatggcccgccagctgattcagggtggtgtggcagaatgtgtcttggctcttgggtttgagaagatgagtaagggaagccttggaataaaattttcagatagaaccattcccactgataagcatgttgacctcctgatcaataagtatggattgtctgctcacccagttgctcctcagatgtttgggtatgctggaaaagaacatatggaaaaatatggaacaaaaattgaacactttgcaaaaattggatggaaaaatcataaacattcagttaataacccgtattcccagttccaagatgaatacagtttagatgaagtgatggcatctaaagaagtttttgattttttgactatcttacaatgttgtcccacttcagatggtgctgcagcagcaattttggccagtgaagcatttgtacagaagtatggcctgcaatccaaagctgtggaaattttggcacaagaaatgatgactgatttgccaagctcgtttgaagaaaaaagcattattaaaatggttggctttgatatgagtaaagaagctgcaagaaaatgctatgagaaatctggcctgacaccaaatgatattgacgtaatagaacttcacgattgcttttctaccaacgaactcctgacttatgaagcactcggactctgtccagaaggacaaggtgcaacgctggttgatagaggagataatacatatggaggaaagtgggtcataaatcctagtggtggactgatttcaaagggacacccactaggcgctacaggtcttgctcagtgtgcagaactctgctggcagctgagaggggaagccggaaagaggcaagttcctggtgcaaaggtggctctgcagcataatttaggcattggaggagctgtggttgtaacactctacaagatgggttttccggaagccgccagttcttttagaactcatcaaattgaagctgttccaaccagctctgcaagtgatggatttaaggcaaatcttgtttttaaggagattgagaagaaacttgaagaggaaggggaacagtttgtgaagaaaatcggtggtatttttgccttcaaggtgaaagatggccctgggggtaaagaggccacctgggtggtggatgtgaagaatggcaaaggatcagtgcttcctaactcagataagaaggctgactgcacaatcacaatggctgactcagacttcctggctttaatgactggtaaaatgaatcctcagtcggccttctttcaaggcaaattgaaaatcactggcaacatgggtctcgctatgaagttacaaaatcttcagcttcagccaggcaacgctaagctctgaagaactccctttggctacttttgaaaatcaagatgagatatatagatatatatccatacattttattgtcagaatttagactgaaactacacattggcaaatagcgtggataggatttgtttcttaatgggtgtgaccaatcctgtttttcctatgctctgggtgaatagagcctgatggtatactactgctttgcggaattgcatacaactgtgcattacaaagttaatatggtaattatggtctggggtaaaattgagtttcagaataaaattaggaacagtaaaatccaaagaactatgtaaacaaaaaagcttttgttttgcttacaaagtatatttaaggattattctgctgaagattcagtttaagagttttccttgggagaactaagtaagaaacacaatgccaacagctggccagtaattagtgttgtgcacttcatgtcattaatcaatttctcaatagttcttaaaattagtgagattaaaaatctaaaaattttgcatttcatgctatcagaaacagtattttcttcccaaatcaaaataaaagaaatatgatcagagcttgaacacaggcttatttttaaaataaaaatatttttaacatgggtttccttattgaaaaatcagtgtattagtcataaaacaccatcattaagaataattgaacaataaagtttgctttcagatgcagttttcaaattataatctcatttcaatttataacgttctcagtcctttgttataattttcctttttcatgtaagtttaattatctgcatttatcttttttcctagtttttctaatactaatgttatttcttaaaattcagtgagatataggataaaataatgctttgagaagaatgtttaatagaaaattaaaataactttttctggca

SEQ ID NO: 497 - DNA, 2277 bp, human
gactgcgcggcggcaacagcagacatgtcgggggtccggggcctgtcgcggctgctgagcgctcggcgcctggcgctggccaaggcgtggccaacagtgttgcaaacaggaacccgaggttttcacttcactgttgatgggaacaagagggcatctgctaaagtttcagattccatttctgctcagtatccagtagtggatcatgaatttgatgcagtggtggtaggcgctggaggggcaggcttgcgagctgcatttggcctttctgaggcagggtttaatacagcatgtgttaccaagctgtttcctaccaggtcacacactgttgcagcgcagggaggaatcaatgctgctctggggaacatggaggaggacaactggaggtggcatttctacgacaccgtgaagggctccgactggctgggggaccaggatgccatccactacatgacggagcaggcccccgccgccgtggtcgagctagaaaattatggcatgccgtttagcagaactgaagatgggaagatttatcagcgtgcatttggtggacagagcctcaagtttggaaagggcgggcaggcccatcggtgctgctgtgtggctgatcggactggccactcgctattgcacaccttatatggacggtctctgcgatatgataccagctattttgtggagtattttgccttggatctcctgatggagaacggggagtgccgtggtgtcatcgcactgtgcatagaggacgggtccatccatcgcataagagcaaagaacactgttgttgccacaggaggctacgggcgcacctacttcagctgcacgtctgcccacaccagcactggcgacggcacggccatgatcaccagggcaggccttccttgccaggacctagagtttgttcagttccaccccacaggcatatatggtgctggttgtctcattacggaaggatgtcgtggagagggaggcattctcattaacagtcaaggcgaaaggtttatggagcgatacgcccctgtcgcgaaggacctggcgtctagagatgtggtgtctcggtcgatgactctggagatccgagaaggaagaggctgtggccctgagaaagatcacgtctacctgcagctgcaccacctacctccagagcagctggccacgcgcctgcctggcatttcagagacagccatgatcttcgctggcgtggacgtcacgaaggagccgatccctgtcctccccaccgtgcattataacatgggcggcattcccaccaactacaaggggcaggtcctgaggcacgtgaatggccaggatcagattgtgcccggcctgtacgcctgtggggaggccgcctgtgcctcggtacatggtgccaaccgcctcggggcaaactcgctcttggacctggttgtctttggtcgggcatgtgccctgagcatcgaagagtcatgcaggcctggagataaagtccctccaattaaaccaaacgctggggaagaatctgtcatgaatcttgacaaattgagatttgctgatggaagcataagaacatcggaactgcgactcagcatgcagaagtcaatgcaaaatcatgctgccgtgttccgtgtgggaagcgtgttgcaagaaggttgtgggaaaatcagcaagctctatggagacctaaagcacctgaagacgttcgaccggggaatggtctggaacacagacctggtggagaccctggagctgcagaacctgatgctgtgtgcgctgcagaccatctacggagcagaggcgcggaaggagtcacggggcgcgcatgccagggaagactacaaggtgcggattgatgagtacgattactccaagcccatccaggggcaacagaagaagccctttgaggagcactggaggaagcacaccctgtcctttgtggacgttggcactgggaaggtcactctggaatatagacccgtaatcgacaaaactttgaacgaggctgactgtgccaccatcccgccagccattcgctcctactgatgagacaagatgtggtgatgacagaatcagcttttgtaattatgtataatagctcatgcatgtgtccatgtcataactgtcttcatacgcttctgcactctggggaagaaggagtacattgaagggagattggcacctagtggctgggagcttgccaggaacccagtggccagggagcgtggcacttacctttgtcccttgcttcattcttgtgagatgataaaactgggcacagctcttaaataaaatataaatgag

SEQ ID NO: 498 - DNA, 1315 bp, human
cacttccgtccagaccggaacccaagatggctgcgctgttgctgagacacgttggtcgtcattgcctccgagcccactttagccctcagctctgtatcagaaatgctgttcctttgggaaccacggccaaagaagagatggagcggttctggaataagaatataggttcaaaccgtcctctgtctccccacattactatctacagttggtctcttcccatggcgatgtccatctgccaccgtggcactggtattgctttgagtgcaggggtctctctttttggcatgtcggccctgttactccctgggaactttgagtcttatttggaacttgtgaagtccctgtgtctggggccagcactgatccacacagctaagtttgcacttgtcttccctctcatgtatcatacctggaatgggatccgacacttgatgtgggacctaggaaaaggcctgaagattccccagctataccagtctggagtggttgtcctggttcttactgtgttgtcctctatggggctggcagccatgtgaagaaaggaggctcccagcatcatcttcctacacattattacattcacccatctttctgtttgtcattcttatctccagcctgggaaaagttctccttatttgtttagatccttttgtattttcagatctccttggagcagtagagtacctggtagaccataatagtggaaaagggtctagttttccccttgtttctaaagatgaggtggctgcaaaaactccccttttttgcccacagcttgcctactctcggcctagaagcagttattctctctccatattgggctttgatttgtgctgagggtcagcttttggctccttcttcctgagacagtggaaacaatgccagctctgtggcttctgccctggggatgggccgggttggggggtgggttgggtgaagctttgggttgccactgcctgtgggtttgctggcttaaaggacaattctctttcattggtgagagcccaggccattaacaactaacacagtgttattgaaagaagagaggtgggggtggaggggaattagtctgtcccagctagagggagataaagagggctagttagttcttggagcagctgcttttgaggagaaaatatatagctttggacacgaggaagatctagaaaattatcattgaacatattaatggttatttctttttcttggatttccagaaaagcctcttaattttatgctttctcatcgaagtaatgtaccctttttttctgaaactgaattaaatactcattttaaaaaaaaaaaaaaaaaaaaa

SEQ ID NO: 499 - DNA, 1428 bp, human
cgttgctgcccggaggctcctacgccacggcccgtcgggcccggcgccggaagtgagctgttccgaggcgccgccgggagctgccacgtccgagacctggagcagccaccgccgcaatcatggtgtcagtaattaacactgtggatacctcccatgaggacatgattcacgacgcccagatggactactatggcacccgcctggcaacctgctcatcagacaggtccgtcaaaatctttgatgtgcgcaatggagggcagatccttatcgccgacctcaggggtcatgagggtcctgtgtggcaagtggcctgggctcaccccatgtacggcaacatcctggcatcgtgctcctatgaccggaaagtcattatctggagagaggaaaacggcacctgggagaagagccacgagcatgcgggacacgactcctcagtgaactcggtgtgctgggccccccatgactacggcctgatcctggcctgtgggagctcggatggggccatctccctgctgacttacaccggggaaggccaatgggaagtaaagaagatcaacaacgctcacaccattggctgcaatgccgtcagctgggcccctgctgttgtacctggaagcctcatagaccacccatcggggcagaaacccaattacatcaagaggtttgcatcaggtggctgtgacaacctcatcaagctgtggaaggaggaggaggacggccagtggaaggaggagcagaagctagaagcgcacagtgactgggttcgagatgtggcctgggccccctccatcggcctgcccaccagcaccatcgccagctgctcccaggatggtcgtgtgttcatttggacctgtgatgatgcctcaagcaatacgtggtcccctaaattgttgcacaagttcaacgatgtggtgtggcatgtgagctggtccatcacagccaacatcctggctgtctctggtggagacaataaggtgaccctgtggaaggagtcagttgatgggcagtgggtgtgcatcagtgatgtcaacaagggccagggctccgtatcagcatcagtgacagagggccagcagaacgagcagtgacaagacaggtggggcctggctccccacccgccagctccaggactgccccttcctgggccaactaaccagacaactgggaagagcccccaactccaacaggattattttcccaggaggagttacagatgcagccacagattgatcatctgccttaacgtgatcggagatgctttgtaatctactgtccagctgaaagcactcatgttacgaggaagaaactacaagtgatgttcaaatctattttgggtcatttttatgtacctttgggttcaggcattatttggggggttttgtttccaaaggaactaaataaagtcatattgcttataaaaaaaaaaaa

SEQ ID NO: 500 - DNA, 5434 bp, human
caagtgccgtcgccgcgccccttccccctcccgcctccccggccccctccccggaaccggcggtcgagctacggtcgcggacgagtggaaccgagactgccccgcggagccgccggtatgagcgcccctcgccaccccgtgtcccaggcccggcctttctgacaagagctagacttcgggctccttgaggatattcagttttgtatgtttgaatatcctctcaccatgttcagcataaagtaccattcttaatgattatcctcaacaagacaggtgtgagagggttgctgttgcattgcaatcatggtgcaaaaataccagtccccagtgagagtgtacaaatacccctttgaattaattatggctgcctatgaaaggaggttccctacatgtcctttgattccgatgttcgtgggcagtgacactgtgagtgaattcaagagcgaagatggggctattcatgtcattgaaaggcgctgcaagctggatgtagatgcacccagactgctgaagaagattgcaggagttgattatgtttattttgtccagaaaaactcactgaattctcgggaacgtactttgcacattgaggcttataatgaaacgttttccaatcgggtcatcattaatgagcattgctgctacaccgttcaccctgaaaatgaagattggacctgttttgaacagtctgcaagtttagatattaaatctttctttggttttgaaagtacagtggaaaaaattgcaatgaaacaatataccagcaacattaaaaaaggaaaggaaatcatcgaatactaccttcgccaattagaagaagaaggcataacctttgtgccccgttggagtccgccttccatcacgccctcttcagagacatcttcatcatcctccaagaaacaagcagcgtccatggccgtcgtcatcccagaagctgccctcaaggaggggctgagtggtgatgccctcagcagccccagtgcacctgagcccgtggtgggcacccctgacgacaaactagatgccgaccacatcaagagatacctgggcgatttgactccgctgcaggagagctgcctcattagacttcgccagtggctccaggagacccacaagggcaaaattccaaaagatgagcatattcttcggttcctccgtgcacgggattttaatattgacaaagccagagagatcatgtgtcagtctttgacgtggagaaagcagcatcaggtagactacattcttgaaacctggacccctcctcaggtccttcaggattactacgcgggaggctggcatcatcacgacaaagatgggcggcccctctacgtgctcaggctggggcagatggacaccaaaggcttggtgagagcgctcggggaggaagccctgctgagatacgttctctccgtaaatgaagaacggctaaggcgatgcgaagagaatacaaaagtctttggtcggcctatcagctcatggacctgcctggtggacttggaagggctgaacatgcgccacttgtggagacctggtgtgaaagcgctgctgcggatcatcgaggtggtggaggccaactaccctgagacactgggccgccttctcatcctgcgggcgcccagggtatttcctgtgctctggacgctggttagtccgttcattgatgacaacaccagaaggaagttcctcatttatgcaggaaatgactaccagggtcctggaggcctgctggattacatcgacaaagagattattccagatttcctgagtggggagtgcatgtgcgaagtgccagagggtggactggtccccaaatctctgtaccggactgcagaggagctggagaacgaagacctgaagctctggactgagaccatctaccagtctgcaagcgtcttcaaaggagccccacatgagattctcattcagattgtggatgcctcgtcagtcatcacttgggatttcgacgtgtgcaaaggggacattgtgtttaacatctatcactccaagaggtcgccacaaccacccaaaaaggactccctgggagcccacagcatcacctctccgggtgggaacaatgtgcagctcatagacaaagtctggcagctgggccgcgactacagcatggtggagtcgcctctgatctgcaaagaaggagaaagcgtgcagggttcccatgtgaccaggtggccgggcttctacatcctgcagtggaaattccacagcatgcctgcgtgcgccgccagcagccttccccgggtggacgacgtgcttgcgtccctgcaggtctcttcgcacaagtgtaaagtgatgtactacaccgaggtgatcggctcggaggatttcagaggttccatgacgagcctggagtccagccacagcggcttctcccagctgagtgccgccaccacctcctccagccagtcccactccagctccatgatctccaggtagtgccgcgctgcctgcacctagtgtgcagaggggacggccgcccctcctcggacagcagctgcacccgcccacccagcggcgacattgtacagactcctctcacctctagatagcaaatagctctcagatggtaaacgtagtcgtttgatcccaaaactaccttggcaggtagttttaactctgatcctaacttaactcaatagccatagattttgtatacgttgtgcacaaaatccaaccagagcgcaagggctctcttgaaagaaaagtagtttctgtaccaattaaaggattgacgtggtctcagatattgatgcaaaaaatttttccaacgaactccgcattgtccattagtgaatgaattcctgtgacatcctccagagatggcccctcctcacctgggacggaagctgccagctcgcttcccccaagctgcctcatggcccgcacgccgcctcacggcccccatgcttcccgccagtcaagatggtctgtggacttagggccagcccttgaggtccttatcctctgaggattcagaggttgcctgcggagtaccttgtcccagggccagacacacccacaccacccactgtctgcagtggggccgggggctcaggaggggctctcagggactcctggtgactccaggaaaatgctgccatcgttaaacattactttctctttcctccttttcaaatctttttgatactttttagagcaggatttttctgtatgtgaacttgggtgggggggttcttcccgtttccttccgtgcgtcgcccctctcacctgcagtcagctcccagcccagtgtaggccatctcctctgtgccctctggaggctcattgtctcagagcccagacagttccagccactaggaggccgtcttggaaccagcaagtcgcatttgccacttgacactgtccatggggttttattagtagctaagcagcagctctcgcatccacttcagggtggcgtgtggcatgtaggagtcctgcttctttgtacatgggaattgtggactcatgcgtgtgtgtgtgtgcatgtgctgtgtgtgtgcatgtgtgcatgacggtgggggtgctggggggacggggtgagtggaaacttagtttgagtaatgaaggaatcttcacagaagcaaatcagaatatgggatttgtttgccttttacattttgtttaattcctgattttaaagcctgctctatctggtacaggcccttattttttcagctttttatgggaaaagcaggttatttgagaatctgtccagaagttgcataggggatggcctccacgataaggacatgcaacacgtgtttctgtgtgcagcagaggccgtgtttttcatgccaaaccccacgcggctgtcaactgtgtgcgtggtaggcatggagatcctggttgtgccgtctcagctccgctctgaaggcactgtgtgggtgctgcgtgactggagagctgtgtggaggccatgtgtgccccgtgcagggatcaggagggcgggggagggaccgagcagccctcttgcccggtcgggtcagccctagtggctgcctgcacactgtagacgtcccagggcctgtgctgtgatcacctgcctttggaccacatttgtgtttgctcttagagatcgagctcctcagtggtacctgaagcctttgcttccggaaagcgcggtagggttcgtaggtagggctagtaggtagggttagtaggtagggctagtaggtagggctagtaggtagggttagtaggtagggttcgtaggtagggctggtaggtagggttagtaggtagggctagtaggtagggttcgtaggtagggctagtaggtagggttagtaggtagggctagtaggtagggctagtaggtagggttagtaggtagggttcgtaggtagggctggtaggtagggttagtaggtagggctagtaggtagggttcgtaggtagggctagtaggtagggttagtaggtagggctagtaggtagggctagtaggtagggttagtaggtagggttcgtaggtagggctggtaggtagggttagtaggtagggctagtaggtagggctagtaggtagggctagtaggtagggttagtaggtagggctagtaggtagggctagtaggtagggttagtaggtagggttcgtaggtagggctggtaggtagggttagtaggtagggctagtaggtagggctagtaggtagggctagtaggtagggctagtaggtagggctagtaggtagggctagtaggtagggctagtaggtagggttcgtaggtagggttcgtaggtagggttcgtaggtagggttagtagcgcgtctgtgctgcttccacctggtgcttcctgttcccaaatcacaagggcctgaaggtggtccctgctttctctttctctttctctgtgtctcagatggcgattttgctgacagctgccaagaaaatgcttcactcaacagtcctcatgtgcccagagatgtttatagaactgtttgaattgcagccatcccctgccccctcccaggctgaagatctgttctttttaagttgattcgggagtggcattcttttatacccaaagactgtagtgcatcttgaagagctcaaagcacatgaccgcacaaatgcttacagggtttcctcccgagtaatccaatctcactccccttgtaagggaattctggggcagctatggtttgagtatgcagtttgcatcgtgtttctacctttagtaccttgccactcttttaaaacgctgctgtcatttcccatttcttagtactaatgattctttgattctccctctattatgtcttaattcactttccttcctaaatttgttatttgcatatcaaattctgtaaatgttttgtaaacatattacctcacttggtaatacaatactgatagtctttaaaagatttttttattgttatcaataataaatgtgaactatttaaag

SEQ ID NO: 501 - DNA, 2765 bp, human
gggagacgtggtgccgctgcgggctcgctctgccgtgcgctaggcttggtgggaaggcctgttctcgagtccgcgcttttcgtcaccgccatgtcgggaggtggtgtgattcgtggccccgcagggaacaacgattgccgcatctacgtgggtaacttacctccagacatccgaaccaaggacattgaggacgtgttctacaaatacggcgctatccgcgacatcgacctcaagaatcgccgcgggggaccgcccttcgccttcgttgagttcgaggacccgcgagacgcggaagacgcggtgtatggtcgcgacggctatgattacgatgggtaccgtctgcgggtggagtttcctcgaagcggccgtggaacaggccgaggcggcggcgggggtggaggtggcggagctccccgaggtcgctatggccccccatccaggcggtctgaaaacagagtggttgtctctggactgcctccaagtggaagttggcaggatttaaaggatcacatgcgtgaagcaggtgatgtatgttatgctgatgtttaccgagatggcactggtgtcgtggagtttgtacggaaagaagatatgacctatgcagttcgaaaactggataacactaagtttagatctcatgagggagaaactgcctacatccgggttaaagttgatgggcccagaagtccaagttatggaagatctcgatctcgaagccgtagtcgtagcagaagccgtagcagaagcaacagcaggagtcgcagttactccccaaggagaagcagaggatcaccacgctattctccccgtcatagcagatctcgctctcgtacataagatgattggtgacactttttgtagaacccatgttgtatacagttttcctttattcagtacaatcttttcattttttaattcaaactgttttgttcagaatgggctaaagtgttgaattgcattcttgtaatatccccttgctcctaacatctacattcccttcgtgtctttgataaattgtattttaagtgatgtcatagacaggattgtttaaatttagttaactccatactcttcagactgtgatattgtgtaaatgtctatctgccctggtttgtgtgaactgggatgttgggggtgtttgtggttatcttacctggggaagttcttatgtttatcttgcttttcatgtgtctttctgtagacatatctgaagagatggattaagaatgctttggattaaggattgtggagcacatttcaatcattttaggattgtcaaaaggaggattgaggaggatcagatcaataatggaggcaatggtatgactccaagtgctattgtcacagatgaaattggcagtattgaccttatactaaaaggcaggggttaaaaatgattatatacattttccttaaaacacttgcaaacattttattcagttgtctttagctacaattgctttgctttttaaaccttggcaattgtggcaaaattatattgcccattttgtagcaacttattttgctcccttccccccatttttgttttaatagggactaatgtgggaagaactggctaatttgtcacagtgcttagttacaactgttaatgtgtgacctgctgttggtgtacatgtgggtacagggtgtttttaaatccaacaagatagagtataatatcaatactgctaaatctgcatgtcctctgtgtgactgatagagcgttgctatttcatttttttaagacaaaatgaaagcaaaatatagagttccaatgtattggtgtagataatctagttgggaatacttttaagtctcaccttcccctttaaactaatattcataattggttcatatgtttaaaagactttaatttacaaattaaattgcaaatgggagcattagatttagttttagacttaggtgggtagcaatgccagtaaacttaaattacgtaacttcttgcaaccacgaaacctgtaatacgctgtacagtaacaagtgttggcattatcagttgaactgtaaatacaaaatgcttcttccaattagtctctatgatgattaagtttctaaaatttatctgaacaccattcagaaacttgttttggggaatttgatagttattgatgtgcatctgttaaactgatgacagacataactcatcattccccagaaaccttttttgattacagtatctaacattttgcctcctcttttttggttttgctggttataaaggtttggattggagagggctcactggatcccaatccttggagctggatcattggattcaaatcataatgtggataggatagggaggatgaattacccaggattcatggagcgggatcagattaccaggaacataggagtggattcctgccccaaccaaaccgcattcgtgtggatttttttattcaacttaattggctattccaaagattttttttttcctatttttgacgattggagcccttaagatgcacgatggaattgtgttttgcgttttttggtaaaaggagcaaagcgaggacctggagataaacgctggagcaatctccttggaaggattcagcacgagtagatggtaaacatttaaaggggaaagggggggtttgtttaaaatagtaaatcagtaagtcacttctaaatttaaagaaaacaaaattggagttgaagaataagtaggtttccaattggctattgccgttttctttgaaaaaataaacattttttaaaaaactaaaaaaaaaaaaaaa

SEQ ID NO: 502 - DNA, 1972 bp, human
gaattcggcacgagggcgaccggcgcgtcgtgcggggctgcggcggagcctccttaaggaaggtgcaagaggttggcagcttcgattgaagcacatcgaccggcgacagcagccaggagtcatgagcgacagcggcgagcagaactacggcgagcgggaatcccgttctgcttccagaagtggaagtgctcacggatcggggaaatctgcaaggcatacccctgcaaggtctcgctccaaggaagattccaggcgttccagatcaaagtccaggtcccgatctgaatctaggtctagatccagaagaagctcccgaaggcattatacccggtcacggtctcgctcccgctcccatagacgatcacgtagcaggtcttacagtcgagattatcgtagacggcacagccacagccattctcccatgtctactcgcaggcgtcatgttgggaatcgggcaaatcctgatcctaactgttgtcttggagtatttgggctgagcttgtacaccacagaaagagatctaagagaagtgttctctaaatatggtcccattgccgatgtgtctattgtatatgaccagcagtctaggcgttcaagaggatttgcctttgtatattttgaaaatgtagatgatgccaaggaagctaaagaacgtgccaatggaatggagcttgatgggcgtaggatcagagttgatttctctataacaaaaagaccacatacgccaacaccaggaatttacatggggagacctacctatggcagctctcgccgtcgggattactatgacagaggatatgatcggggctatgatgatcgggactactatagcagatcatacagaggaggaggtggaggaggaggaggatggagagctgcccaagacagggatcagatttatagaaggcggtcaccttctccttactatagtcgtggaggatacagatcacgttccagatctcgatcatactcacctcgtcgctattaaagcatgaagactttctgaaacctgccctagagctgggatattgtttgtgggcaatattttttattgtctcttgtttaaaaagtgaacagtgcctagtgaagttaggtgacttttacaccttttacgatgactacttttggtggagttgaaatgctgttttcattctgcatttgtgtagtttggtgctttgttccaagttaagtgttttcagaaaagtatgttttgcatgtatttttttacagtctaaattttgactgctgagaagtttctattgtacaaaacttcatttaaaaggtttttctactgaatccagggtattctgaagatcgaagcctgtgtaaaatgctaccaaatggcaaaaagcaacaataaacagtttgatttttacttttctttctaacatatcaatgcttagcagaactattcagattgtcagtagtaaatttaaagacaaatgcccgttttcctccagtccatgaaacataccatacttatatacctgcaactaagtgtttaaaattatgctctgtaactctgtactgctagtattagaactaaaaatcttaaaatacagccagtgcttaatgcttatatcaatgtggatttgtcggcttttatgtaatctgtaatatgtatagcaggaaatacgaagagttacacagtgtatgccttaaaaggctgtttcttaaaggtgttacaaggggataatggtatttcaactagttatcagcaagtgacaatacattccaccacaaatacactcttgttcttctagcttttagactatatgaaaaaaccgggtgcttcaaagtacatgataagggaacactatacctgtcatggatgaactgaagactttgcctgttcattttttaaatattattttcaggtcctttgcttaccaaaggaggcccaatttcactcaaatgttttgagaactgtgtttaaataaacgcaaatgaaaagaaaaaaaaaaaaaaaaaa

SEQ ID NO: 503 - DNA, 11692 bp, human
caccctcggagcccccggagctccccgccaagcgccatccccgcgggcggaggggagcgcgggtcgcgcgccgtggagagccgggacgcggattagcgcccgcaggagcctcctgcgcccgttgaggcgctaaagggcttaccccggaggcgggtggaagggcgggcagaggctcctcttaaataccgctcccggccgcacttcgcgctcaccccggcgtccgctttctccctcgcccacagctgccggatagtgctgaagaggagggggcgttccccagaccatggcatctacggaaggtgccaacaatatgcccaagcaggtggaagtgcgaatgcacgacagtcatcttggctcagaggaacccaagcaccggcacctgggcctgcgcctgtgtgacaagctggggaagaatctgctgctcaccctgacggtgtttggtgtcatcctgggagcagtgtgtggagggcttcttcgcttggcatctcccatccaccctgatgtggttatgttaatagccttcccaggggatatactcatgaggatgctaaaaatgctcattctccctctaatcatctccagcttaatcacagggttgtcaggcctggatgctaaggctagtggccgcttgggcacgagagccatggtgtattacatgtccacgaccatcattgctgcagtactgggggtcattctggtcttggctatccatccaggcaatcccaagctcaagaagcagctggggcctgggaagaagaatgatgaagtgtccagcctggatgccttcctggaccttattcgaaatctcttccctgaaaaccttgtccaagcctgctttcaacagattcaaacagtgacgaagaaagtcctggttgcaccaccgccagacgaggaggccaacgcaaccagcgctgttgtctctctgttgaacgagactgtgactgaggtgccggaggagactaagatggttatcaagaagggcctggagttcaaggatgggatgaacgtcttaggtctgatagggtttttcattgcttttggcatcgctatggggaagatgggagatcaggccaagctgatggtggatttcttcaacattttgaatgagattgtaatgaagttagtgatcatgatcatgtggtactctcccctgggtatcgcctgcctgatctgtggaaagatcattgcaatcaaggacttagaagtggttgctaggcaactggggatgtacatggtaacagtgatcataggcctcatcatccacgggggcatctttctccccttgatttactttgtagtgaccaggaaaaaccccttctccttttttgctggcattttccaagcttggatcactgccctgggcaccgcttccagtgctggaactttgcctgtcacctttcgttgcctggaagaaaatctggggattgataagcgtgtgactagattcgtccttcctgttggagcaaccattaacatggatggtacagccctttatgaagcggtggccgccatctttatagcccaaatgaatggtgttgtcctggatggaggacagattgtgactgtaagcctcacagccaccctggcaagcgtcggcgcggccagtatccccagtgccgggctggtcaccatgctcctcattctgacagccgtgggcctgccaacagaggacatcagcctgctggtggctgtggactggctgctggacaggatgagaacttcagtcaatgttgtgggtgactcttttggggctgggatagtctatcacctctccaagtctgagctggataccattgactcccagcatcgagtgcatgaagatattgaaatgaccaagactcaatccatttatgatgacatgaagaaccacagggaaagcaactctaatcaatgtgtctatgctgcacacaactctgtcatagtagatgaatgcaaggtaactctggcagccaatggaaagtcagccgactgcagtgttgaggaagaaccttggaaacgtgagaaataaggatatgagtctcagcaaattcttgaataaactccccagcgtatcctatggtaactgatggtataaacaagctttctttaaaaaggaaaaaaatgcgtatatttctatgtttacttaatctgttagccgaggcttagaggagctcttctgagtcagtgatgacaggcacggtgctgtgtctttgccaaataatgctttataaccgtctaattttctcacttgtattattatttgaatggatgctgctggaggaatcagttggaattgaagacacgttcttgccagcttcccttttctcccaagatgcagaaatgtggatgctcttttcccaggggacatgagtaaagcagtgtggtacactccagggacttgggaaaatgagcaaacacacagcgtgttattccttaaagtgttctccatgtctcgccttgttatgcacaagagattctattaaaagcctctagaagtaactccccttaaaatgtctagtaaagcttgcacatggattgattaaaagcaaatacctgtcttagggaattctgacaatttatcttccatatgctcttcaagtaaaatgtttcaaagacagttttaaagggagccatgctcttaaaggcagttgattaaagaacctgttacatctctgccttaccctgtgtaatctgtgagaacaatggttgaaatttcaaagtatgtttcattattctttctaaatttgataattgattaggaagtattttatatataaccactgtagatattgacaaaagtaagagagcacagtcaacataaagtttaaccagagttaaatattcaaatttatttatgttcggtttgccttcacctggtgtagtaaaatcaaatgagattatttggtatgtgttttgctttgtttaacccaaaagattattttttggttcctaaagaataagatatttttaatctgtcaattatttcagtcatcatctcatcgtcctagaaagcctggtcattttactgtcctcacacatggaagacacttgtgttggctgtgcctcttttaatgtcatctcttgatgaaacaaaaatactggtatttatccaatatgttgaaagcgttttgttatcttctatcaaagcacataaaaccagttataggacacagttggaagcagagccagtcttcctcctcagtcttctcagtagaaaggaacagaaaacaaacatctgtgcaaaaccctataaaagtgatattcctatggcagtgtccaggcagccttgaacaatgacatggcaacaaaggatggctctgtacaacttcacagatggaatcttgtttaaggctgtgaagttttaaggaaaaaataatataattggtgtagcacagtgccttgcatgcagtaggcagccaacaaatccttaatgattggtaatgcaagctaaaatttttaatgtctctactatccttttttattgaataacgcacagtattttcctaaggttgctgggtttgggagtaagcttgggacttgaatcattgagaaataaagcacatttgactctaagaagtatgtagaaccttgtttataggtgagaataggctgtattacatgaaaccagcggagggatgctgagacagtcatggtttatagaatccaaattctctgagatgagggtgcttatggacctcaaatagcctttcttatctgctccttgtgacttctctcttttaaatcagatacctttgaaacatacaagagacatgagattccagttgtttttgtctcccaaaccctagtgatttttggataaggatcactactgaacagtattaggcaacttttcatttttgcttttcaaatgacattggtctttatttccagtagatgggcagtaaacagggtcagggtggtcaagggatatgattaagtgtagtagtagaaaatgcattctttttttttttttttagacagagtcttgctctgttgctcaggctggagtacagtggcacgatctcagctcactgcactgcaatgtccacctttctagttcaagcgattctcctgtctcagccacccgagtagctgggactacaggcacatgccaccatgcctgggtaattttttgtatttttagtacagatgggtttcattatgttagccaggatgggctcgatctcctgacctcatgatccacccgccatggcctcccaaagtgctgggattacaggcgtgagccaccatgcccggccagaaaatacattctttacagcaaatgttataggttaaggagacagttcctgggtttagctgtgaaactgtttaggattttctctaagtggtgttcccaagagcttttttctggtaagttggaggctataggcaaagcgtctaggagcttgttgttttttgctatggaaggccagctttgggatctatatacatgggcatgtttctcaatggagtggtcacaggattctcttctcagaactccgcctgaaacctttccggtgtgttttgtcttcaactttttcctagctatcctattagcctgtaaatatgtcagcagacaatgtgtttggaagaaacaaggtgtacaacttcacaaagcaagttttttctggtctgagacttactgtgtgcaggaagtctcgtgagaatatacttagaaaatcacacttatctggaaattcaataagtcatattaaaaatatacaatttcttgaactcaggactagcctgaaaatccaaaatgcatgtagagttgacatgttgacatatgtctatgtcctctgtttttatgtaagcctcatttatttctcccttgccatgcccatttgggattttctttgcccagcatatgtgccataaacagaacaaatggatccagggtatacctctaataacctttatctaaatagaatacatttaacctgtcaattatatgtatagatttatcctaattggttcaacatatatatgaatgcttgtaatagtctgttactatttgataatgcataaatgttatatttatatacagttacagcaggccagaaacatacatacactgcatcctgtaaggtctgtaaatcagggcttcggcaatgccattttgctatagactcattcatgttttttaggaatcagaatcatttcaggagaaaaccaactaagtagactttaattcttctctttctcattcttgccctttgagaaacccaagtggaatcatcacttaattacttactcaaattcaatgaatcaaatccaatccaatcagtgagaagaatagcttatctttcaaggtaatactttaccttagatctttgagggcatgcttcccatacaaagagcatcagaaaatcagggcaatcatctagatctcacagatcttcaacataggactctaggttatgagagctgaaccacatagctatcagtttcagtttttacttcctattgagtgtgtagaaacacagcctatggttttgctgtctgcagaagttaccataccctgtaaaagacaaatatttctttctcctctcgaaccactagtcagcctggatattcatgaaagctgaaagaaggggtgccaaaatgcctagctcctggatttagactcatggaatatgagaaaggcttagggaaaattcaagtcatggggagattcctgctaggtgatgccaggaatctcaatgacctgttgattagagggtctctggtcatttccacttgtgtgtggagaaatacatcatttgcatatgtatctagtcaagaagcccttttggagcaaagtggttgggaaactcatttactgggtccaccaaaggaaacccaattctgccatggttttgcaaatactacacgtccctttgctctcaatagcaaaagtgatgttatagttttttttacttttgtcagaatcaaggcttcggccacctgtgcaatattttcccatggagtgcagcagtaaatccaagtaggtatatccgtgctcagagagaattctccatagttctgactcctgaaaaacaagtctcattagctctcatctagtttgatgactaaaagtgcacagcagttataccccagtggaagtgatttttctcacctagctgctctctaactcttacggctatctagttgtctgagctgctggtttgttttacttattctccaactgaactcattccaaaccaagaaaaaggaccaaatgaaattttcagttattatcatacttgctccttgaataagaatgctagagtctggaggcagaagaagactaagttaaaaaaacagcctgaaggaattctggagtgagttttgtaagtctaattgtcaaagaagataaatggtctcagtatctgtagtaatttctgggtaagcctagagggatcactgagtgccaatccaagcaggtggcactagaggcagattgttctcctagcatagagtgagtttccagctgctcatgacacattttcttatgattttccctaaaagaaaaccaaattttctactccacctcttcctttcctatcattccacttattgttgctgctttgctaacagccagcttagtaagccatcacacaagttagtgtgaggcttggttttaaaatagataacagagaatcttgattaaatagtatccaactttgtagcataacacagctaattcaggcaatgacatagagatgataagaaacaacatggtttggtagagggaacatttgatttagactctgcccatttttagctgtatgacttacataagtcattttgtgtccaagcctcattttctcccatatgaaaagtgaaggggttggattaaatgactaaaatccccttccagccctatgagcccaatgtattatgatctctgctttgtttccttcttaagaggcttcctactataaaatgtgacctatttacattttaagttgaagtagcccacaataatgaataatcaatttagatttttctcatctcctttgggagaaattaaattcaagcctctattcatttgatgttttacaacaagcttcaaagttggccatgttcattcacagtttgatattttgagacaccaataaaagttttttaataaaagttcccttgacttaaactcaccttcctaatagaagtagtgatttggctcacggaaaaatgtttccagagtcaacatgagaggactggatgaacctacagcctcactcaagctgttgcatcattgctgctgtagcaacagagccctctctgaatacccaaaacacacaattttctccaacaattctaattgcccacccagtatgggaatttgagagcctttggtgaataaccttgatcactcttttgaaatttggtgcaacacttgcacaatcacggcaactgtttgtaaatatcttttcttctccgccagtatgtagacatgcacacccattcacaagtaagcccgcaaattcattttcacattttcctcttggtttgtttttatcatgggtatcacattgcaggaagagatgctctaacttacaagaatggaattttctgactatcattgccctcttcaaggcctgattagtttgtagggtggatgggatacaatgcatggtctacaaggtccatgtcaccagccatgatctttaaacaacctcttgcactttctggcactgctgcaatggcccatggtggacacctctgctgtttgtccaaacttctgctaaatagagtagtgttggtatttgttgtgttgtgaactcctttgttgtcagagaagacttcagctcttcaggtttgcaagggcaagatgtaaagctaggactgaaaggattgggttttgtttttcggccggcttttttccattagtgcaaaaaacctgatgcaagggcagcaagataaacacaatttcttcattgacccagataagaacctgtagaaaagtgagagatgcccctaagttcctatttcatttatcctaaataatatcctgaataactactgattagtttttttctatgtccagccttgcttcactttccaacctccaggccaaatattcattttgatattttacaaaatccttctggtttttacacagggcccttttgtgctgagaataaaaccagctattggaacagacctcactgctttgtagagtcagaagttgacctagagaatgggtagcaacaggtcctcagtttctctggagacacccccaatccttgggtgagtgttgaaacccgacaactgactgttagccttgtcatcatcctcactggagatggagatgttgcagtcggagcctcactccttctggggcactgtttcttctcatggcaaccattttgcctgcctggaaacagcctgttgcctttgctagggggcaaatacacacactagccaaggaagttgatccagcacatctctgaggtttctcccccatggacccatggagcgaattccctgagataaatgatcagaaagttggctgtctggtggtttaatactccataagagttacttcccttatagaaagtcatcctttggcatctagatttttctacaaatcaccttaactccctccctttctctttctcctggaaaacctcagcattgcatctccatgttgcacaacacagatcagattatctggtcactatagagattttgtatataaaaaaactacttttttgaggattttggatattgggttttctatttgttttccacagcttgaggaaagagctggcaaatctgtgaatctaacttgatcttgttgccagcagatatattttggcttcctggtaagagtctgtgttcccagggacaatatattgccctctgatcagtattgcaccctaaatccacaaattcctccagcccagccttacatttttttaaacaaatcccctagcttgtttgctattatttataaagagcattagaaaatgtatttatagacctggatgttatatgtttaatattaatttagcctttaataatgttataggtttgtaactattcttcagaaattataaagaactcagtgtagactgaattaatctatttagtatctgtaattttgcagacatattttcttacagtattttctatgtaaccacacatgtagaattataactaattagagcacaagaagtttcttcagcaatttagagctaccaattgtttcttgactatatagtcacatttgacaaatttaagaacccagtctttagtgatgcaataaacaaaatgaaccattaagaacaaggaattgcttaaatcccttagctggtgaggatatacatctaaataattcatctttctaactcaaggaatggtgctgattttttaaatgtttgacaccaggccttgtttttccagctgagcattctcattttgcttttctctaagactatcaaagacaaggtattaatagtaggattacttcctagatcagaatgtttcatacattcctaaaggtttatgtggaaattggcttaggaaaactttgagtagcagagtctgaggatgagtgctagagatgaaatcaggacagatttgttgcggttaattcttgccaagcaaattagtggtaaatgtcacgttgttatgtgaattgagcacacatttttaaagaaagtttacaaaaaatttttagaaccaactatgaggcaatactgtatcactgggggctgggagtgggggcttagaatcatactgaaattgtttaaaagcagcccaggtagtttctgtcctcaggtgaataacagactatataacttccccgaaaggtaaaacgatagccactgcagagacgaggtgtcttccttccaccaaatactttctgagatggtggtaggagtagtatttttaccgtggtttaaaaagtagtcagttacatagaaagtgtattggtatgtatttgaacctgctcttcattaaacaagcagattagatgtaccctcgactggcaataattgtatctattttcaagtacagctagctgtcaaagcatgaagctcttgtgtatacacactgacacttggttcacgcatgaagaacagtgcctatgcactttgtgtagctataatgtaggtatctaggtgtaatttcagtgaaatggtgtatagatgtattgtaatttaaatgtatatgttatttttggctattcatctaaatgcagtagacatgttgatcggtgttttgcaaacatttctttttccttcttagataactagtcgtgaatcatttctcctctttctcagtgtggcttgggaatatatatgagtgaagaatttatctgtgaatcctttgtactgatgattgtttgaaagtctgtgtgtgtccagcacctttgtaaatacgcaattcagagcagggatgggctgggtgtgtgtcctggttcttagtgaaaggtcatctcatgtctgtttaatacatggtgaatgcaactgtggaacttttgattacctagacttaggtaggtttagaatgagaacatccatctacagtcctcctttgcttggtggattgggctcagaggaacaaaaagttagtctgactctgtgcatattagcatcatgtctttagagaaaggtcagcctctctggttgccaaatacccatcatgatgctcatgacttaaaggttctgaggagccttgtctcccttggatttttgagtcagggtacaggaaaaaacattgccgactaactaactgcaaatgcatctgcaggtgaaaccctacgaaagcacagttctggctataaacttcagagttctctgtaaaaaacttagagcactagaagcacaggaatagtgagtgtacagcttatgcggttgtagaggggcaactgatgaacacaggtcccacatatatgagggagtatgacgttctctacctaatatgttctgtgtgcatgttttgaatgattgaagatgggattaactaatgcaagtttacagttgcctcctaaaacacacattctgtataattatcgctaatacaatgctgtgaggtctatagttcctgtaacccctttctcctccccaaggacagagaagaactagccatgtgctatagggaaccctgagtgccctactcttttcccaagaagggtaaagcctacaatatcatcagggggcatgaagcacattaatttgcagtggctgcttcatatgaggagatatggtggacaggctaatttttccttgaaaatgtggcttcttcaactcctttcaaatttaggatggaatacttcctgaaataaaactgggctttatgcaggattctctttgaaaattcttgtatgtccagaacaaaagataaaactaattgtattcctcacattcacaatccccattggtctgaagtcacgtagcacagagcatctatagcacatagtgtttaaagactaatgaatgcaaaaagataaaatcttcaactaatttttgaattgtttctcatatatgctactagaaaatgccttgttgatgaagcacattttgggtagttgaggtcttttgttttcgcctttagctttctaagctttcttacaatgtggactgattactgtaacatttcacgtgtaaaataactggatattctttatatactggaaataacctgtgaatccaatatttcactaagtgttttaacttttgtgtatatatctctcatcaataaatgtggatttcaattt

SEQ ID NO: 504 - DNA, 3983 bp, human
ggtagtaacttgcagtttcagagcacatgcacactgtcagggctagcctgcctgcttacgcgcgctgcggattgttgctccgttgtacctgctggggaattcacctcgttactgctcgatatcttccaccccttacaaaatcagaaaagttgtgttttctaataccaaagaggaggtttggctttctgtgggtgattcccagacactgaagtgcaaagaagagaccctcctagaaaagtaaaatatgactaaaagcaatggagaagagcccaagatggggggcaggatggagagattccagcagggagtcagtaaacgcacacttttggccaagaagaaagtgcagaacattacaaaggaggatgttaaaagttacctgtttcggaatgcttttgtgctgctcacagtcaccgctgtcattgtgggtacaatccttggatttaccctccgaccatacagaatgagctaccgggaagtcaagtacttctcctttcctggggaacttctgatgaggatgttacagatgctggtcttaccacttatcatctccagtcttgtcacaggaatggcggcgctagatagtaaggcatcagggaagatgggaatgcgagctgtagtctattatatgactaccaccatcattgctgtggtgattggcataatcattgtcatcatcatccatcctgggaagggcacaaaggaaaacatgcacagagaaggcaaaattgtacgagtgacagctgcagatgccttcctggacttgatcaggaacatgttccctccaaatctggtagaagcctgctttaaacagtttaaaaccaactatgagaagagaagctttaaagtgcccatccaggccaacgaaacgcttgtgggtgctgtgataaacaatgtgtctgaggccatggagactcttacccgaatcacagaggagctggtcccagttccaggatctgtgaatggagtcaatgccctgggtctagttgtcttctccatgtgcttcggttttgtgattggaaacatgaaggaacaggggcaggccctgagagagttctttgattctcttaacgaagccatcatgagactggtagcagtaataatgtggtatgcccccgtgggtattctcttcctgattgctgggaagattgtggagatggaagacatgggtgtgattggggggcagcttgccatgtacaccgtgactgtcattgttggcttactcattcacgcagtcatcgtcttgccactcctctacttcttggtaacacggaaaaacccttgggtttttattggagggttgctgcaagcactcatcaccgctctggggacctcttcaagttctgccaccctacccatcaccttcaagtgcctggaagagaacaatggcgtggacaagcgcgtcaccagattcgtgctccccgtaggagccaccattaacatggatgggactgccctctatgaggctttggctgccattttcattgctcaagttaacaactttgaactgaacttcggacaaattattacaatcagcatcacagccacagctgccagtattggggcagctggaattcctcaggcgggcctggtcactatggtcattgtgctgacatctgtcggcctgcccactgacgacatcacgctcatcatcgcggtggactggttcctggatcgcctccggaccaccacaaacgtactgggagactccctgggagctgggattgtggagcacttgtcacgacatgaactgaagaacagagatgttgaaatgggtaactcagtgattgaagagaatgaaatgaagaaaccatatcaactgattgcacaggacaatgaaactgagaaacccatcgacagtgaaaccaagatgtagactaacataaagaaacactttcttgagcaccaggtgttaaaaaccattataaaatctttccatctcattacagctcattcgctccagcaagcccgtcatcttccctttcctcccttctgataagactggaaaatagtcctccaaaacacaagggaggattttgggtggccaaagtgtacaattttcatcccacaattgaaatttttaaatcatttcatgttagtcttaccgaataaggtaccaagatcacaaatagtgttgatcagatcttacaagtttatgtggcacacaatcctataaatgtgatttttttatataagttaaagagacaaatagtaggctaaaaacattttaaaatcaacttttgaaatttaaaaatctttcagaatacaattcagttttagtttcaaaatgttaacaacttgaattacaaccggttatcagttggacagtaagattttatccctttctcttctgactggtatacctatttcattagtagctaggtgcacatatacatctagcacagctgtgaggacagacagaaggcaaagtttccatgtggccttgagcaagtcccatctcacctctaggcctcagtgtcctcatctataaaatgagggacttccctagaagtcttcatggtctcttccagcccagacatcctgtgatgtcatgaaagcacctgccctctgtttcccctcagaacaccctgtaccatccatggagcacgaggccttcagaaaagacacttcaatgggagtgaacatttctaactaaggacaggatggctgtgtgtggtggtcaccaggtcctgtgagcaaagtgcaggttatgcaagtcgccaggcaggaggccattccaggagtgggattattcatcaaactctttgcccagttcatcccaatgggggaagtattcccttctttcctactctgggaagaatgtctcctgccactcctcaactgatgatagacttcgaaaacagatgagaagactagcagctagcaagggtgcttgtagtcacactgtggaacactaaagagctaggaaagagttgagcacaggcaacattacaaacaaaggatttgaaaacaccaagagtacaggtcttctttaaggaagaataaaaaagaagaggttcatttttctggctttttttttcacctgaaacactttttctcgagtccaaaatcattccccccgtgaagtctgcttaccaaaacataagacgacttatatatttgaaagaagtcaaatgaatgagctctctaatagaagtccatgagttgagtgggtatttcttatttgaaagtgtttttctttaatcaaaagtccttagaatgagggaaacaaaatatttatttgttttggaatcccacttatcaaatcattcaaaactttcagctggagtggggtttgcttttgttttgtttgtgtccataagagaaatggtagaagatgaatcagtatgaagacactgtcaatgaggttatgagaaaaacagcaggggcattagtttcaggcaaggcagctcccaggtttagagattaatttttaccccctaaggaatatccagtcaaagacgctgagtgggagctgtcaggcagtagcagctgtgtttgagtttctggctgaaaatggtgaagaatggacttaatcatgctaacaaactgaaaaatctagacatagatcctctgatatacaattagagatatttttatatagaccccaagcattctgtgcataaaagttaacattaggctgtggtgcagtaaccatttaatgtcgaggctctatttcggaaatacactacaaatgttaaagtacgtggctgtcctcttaagacactagtagagcaaagacttaatcatatcaacttaattctgttacacaatatgtgtttttttaatatactaaccatttcttatggaaaggtcctgtggggagcccatcatctcgccaagccatcacaggctctgcatacacatgcactcagtgtggactgggaagcattactttgtagatgtattttcaataaagaaaaaaatagttttacattaaaaaaaaaaaaaaaaaaaaaaaaaaaaaaagaaaaaaaaaaaaaaaa

SEQ ID NO: 505 - DNA, 3915 bp, human
gtggggtggggtggggctgggggcttgtcgccctttcaggctccaccctttgcggagattataaatagtcatgatcccagcgagacccagagatgcctgtaatggtgagactttggatccttcctgaggacgtggagaaaactttctgctgagaaggacattttgaaggttttgttggctgaaaaagctgtttctggaatcacccctagatctttcttgaagacttgaattagattacagcgatggggacacagaaggtcaccccagctctgatatttgccatcacagttgctacaatcggctctttccaatttggctacaacactggggtcatcaatgctcctgagaagatcataaaggaatttatcaataaaactttgacggacaagggaaatgccccaccctctgaggtgctgctcacgtctctctggtccttgtctgtggccatattttccgtcgggggtatgatcggctccttttccgtcggactcttcgtcaaccgctttggcaggcgcaattcaatgctgattgtcaacctgttggctgtcactggtggctgctttatgggactgtgtaaagtagctaagtcggttgaaatgctgatcctgggtcgcttggttattggcctcttctgcggactctgcacaggttttgtgcccatgtacattggagagatctcgcctactgccctgcggggtgcctttggcactctcaaccagctgggcatcgttgttggaattctggtggcccagatctttggtctggaattcatccttgggtctgaagagctatggccgctgctactgggttttaccatccttcctgctatcctacaaagtgcagcccttccattttgccctgaaagtcccagatttttgctcattaacagaaaagaagaggagaatgctaagcagatcctccagcggttgtggggcacccaggatgtatcccaagacatccaggagatgaaagatgagagtgcaaggatgtcacaagaaaagcaagtcaccgtgctagagctctttagagtgtccagctaccgacagcccatcatcatttccattgtgctccagctctctcagcagctctctgggatcaatgctgtgttctattactcaacaggaatcttcaaggatgcaggtgttcaagagcccatctatgccaccatcggcgcgggtgtggttaatactatcttcactgtagtttctctatttctggtggaaagggcaggaagaaggactctgcatatgataggccttggagggatggctttttgttccacgctcatgactgtttctttgttattaaaggataactataatgggatgagctttgtctgtattggggctatcttggtctttgtagccttctttgaaattggaccaggccccattccctggtttattgtggccgaactcttcagccagggcccccgcccagctgcgatggcagtggccggctgctccaactggacctccaacttcctagtcggattgctcttcccctccgctgctcactatttaggagcctacgtttttattatcttcaccggcttcctcattaccttcttggcttttaccttcttcaaagtccctgagacccgtggcaggacttttgaggatatcacacgggcctttgaagggcaggcacacggtgcagatagatctggaaaggacggcgtcatggagatgaacagcatcgagcctgctaaggagaccaccaccaatgtctaagtcgtgcctccttccacctccctcccggcatgggaaagccacctctccctcaacaagggagagacctcatcaggatgaacccaggacgcttctgaatgctgctacttaattcctttctcatcccacgcactccatgagcaccccaaggctgcggtttgttggatcttcaatggctttttaaattttatttcctggacatcctcttctgcttaggagagaccgagtgaacctaccttcatttcaggagggattggccgcttggcacatgacaactttgccagcttttcctcccttgggttctgatattgccgcactaggggatataggagaggaaaagtaaggtgcagttcccccaacctcagacttaccaggaagcagatacatatgagtgtggaagccggagggtgtttatgtaagagcaccttcctcacttccatacagctctacgtggcaaattaacttgagttttatttattttatcctctggtttaattacataatttttttttttttactttaagtttcaggatacatgtgccgaatgtgcaggtttgttacataggtatatatatgccatgatggaaatatttatttttttaagcgtaattttgccaaataataaaaacagaaggaaattgagattagagggaggtgtttaaagagaggttatagagtagaagatttgatgctggagaggttaaggtgcaataagaatttagggagaaatgttgttcattattggagggtaaatgatgtggtgcctgaggtctgtacgttacctcttaacaatttctgtccttcagatggaaactctttaacttctcgtaaaagtcatatacctatataataaagctactgatttccttggagcttttttctttaagataatagtttacatgtagtagtacttgaaatctaggattattaactaatatgggcattgtagttaatgatggttgatgggttctaattttggatggagtccagggaagagaaagtgatttctagaaagcctgttcccctcactggatgaaataactccttcttgtagtagtctcattacttttgaagtaatcccgccacctatctcgtgggagagccatccaaataagaaacctaaaataattggttcttggtagagattcattatttttccactttgttctttaggagattttaggtgttgattttctgttgtattttaactcatacctttaaaggaattccccaaagaatgtttatagcaaacttggaatttgtaacctcagctctgggagaggatttttttctgagcgattattatctaaagtgtgttgttgctttaggctcacggcacgcttgcgtatgtctgttaccatgtcactgtggtcctatgccgaatgccctcaggggacttgaatctttccaataaaccaggtttagacagtatgagtcaatgtgcagtgtagcccacacttgagaggatgaatgtatgtgcactgtcactttgctctgggtggaagtacgttattgttgacttattttctctgtgtttgttcctacagcccctttttcatatgttgctcagtctccctttcccttcttggtgcttacacatctcagaccctttagccaaacccttgtcagtgacagtattttggttcttagttctcactgttccctctgctcctggagcctttgaataaaaatgcacgtagctgaggccggatgcggtggctcacgcctgtaatcccagcactttgggaggcctaggcgggcggtcaggggttcgagaccagtctggccaacatcgtgaaaccctgtctctactaaaaatgcaaaaattagccgggcgtggtggcgggcgcctgtaatcccagctacttgggaagctgaggcgggagaatcatgtgaacccgggacgcaggggttgcagtgagcggagatcgcatcattgcactctagcctgggccacagggcgagactccgtctcaaaaaaaaaaaaatgcacatagctatcgagtgtgctttagcttgaaaaggtgaccttgcaacttcatgtcaactttctggctcctcaaacagtaggttggcagtaaggcagggtcccatttctcactgagaagattgtgaatatttccatatggattttctattgttactctggttctttgttttaaaataaaaattctgaatgtacacg

SEQ ID NO: 506 - DNA, 2323 bp, human
gaccaagcattcagcaagccactcttccacctcccttactgcaggaaggcactccgaagacataagtcggtgagacatggctgaagataaaagcaagagagactccatcgagatgagtatgaagggatgccagacaaacaacgggtttgtccataatgaagacattctggagcagaccccggatccaggcagctcaacagacaacctgaagcacagcaccaggggcatccttggctcccaggagcccgacttcaagggcgtccagccctatgcggggatgcccaaggaggtgctgttccagttctctggccaggcccgctaccgcatacctcgggagatcctcttctggctcacagtggcttctgtgctggtgctcatcgcggccaccatagccatcattgccctctctccaaagtgcctagactggtggcaggaggggcccatgtaccagatctacccaaggtctttcaaggacagtaacaaggatgggaacggagatctgaaaggtattcaagataaactggactacatcacagctttaaatataaaaactgtttggattacttcattttataaatcgtcccttaaagatttcagatatggtgttgaagatttccgggaagttgatcccatttttggaacgatggaagattttgagaatctggttgcagccatacatgataaaggtttaaaattaatcatcgatttcataccaaaccacacgagtgataaacatatttggtttcaattgagtcggacacggacaggaaaatatactgattattatatctggcatgactgtacccatgaaaatggcaaaaccattccacccaacaactggttaagtgtgtatggaaactccagttggcactttgacgaagtgcgaaaccaatgttattttcatcagtttatgaaagagcaacctgatttaaatttccgcaatcctgatgttcaagaagaaataaaagaaattttacggttctggctcacaaagggtgttgatggttttagtttggatgctgttaaattcctcctagaagcaaagcacctgagagatgagatccaagtaaataagacccaaatcccggacacggtcacacaatactcggagctgtaccatgacttcaccaccacgcaggtgggaatgcacgacattgtccgcagcttccggcagaccatggaccaatacagcacggagcccggcagatacaggttcatggggactgaagcctatgcagagagtattgacaggaccgtgatgtactatggattgccatttatccaagaagctgattttcccttcaacaattacctcagcatgctagacactgtttctgggaacagcgtgtatgaggttatcacatcctggatggaaaacatgccagaaggaaaatggcctaactggatgattggtggaccagacagttcacggctgacttcgcgtttggggaatcagtatgtcaacgtgatgaacatgcttcttttcacactccctggaactcctataacttactatggagaagaaattggaatgggaaatattgtagccgcaaatctcaatgaaagctatgatattaatacccttcgctcaaagtcaccaatgcagtgggacaatagttcaaatgctggtttttctgaagctagtaacacctggttacctaccaattcagattaccacactgtgaatgttgatgtccaaaagactcagcccagatcggctttgaagttatatcaagatttaagtctacttcatgccaatgagctactcctcaacaggggctggttttgccatttgaggaatgacagccactatgttgtgtacacaagagagctggatggcatcgacagaatctttatcgtggttctgaattttggagaatcaacactgttaaatctacataatatgatttcgggccttcccgctaaaataagaataaggttaagtaccaattctgccgacaaaggcagtaaagttgatacaagtggcatttttctggacaagggagagggactcatctttgaacacaacacgaagaatctccttcatcgccaaacagctttcagagatagatgctttgtttccaatcgagcatgctattccagtgtactgaacatactgtatacctcgtgttaggcacctttatgaagagatgaagacactggcatttcagtgggattgtaagcatttgtaatagcttcatgtacagcatgctgcttggtgaacaatcattaattcttcgatatttctgtagcttgaatgtaaccgctttaagaaaggttctcaaatgttttgaaaaaaaaaaaaaaaaaaaaaaaaaaaaaa

SEQ ID NO: 507 - DNA, 4493 bp, human
agcgggaggggttgcgggtgagctgcgctgagcccaggagccgaggagtcgggagcgcagcgcagcccgagcccgagcccgagcggccccgcgtcccgagcgcatcggagcggccgagccgcccggcgcagcgcctggcccgggcagcgcagccccggccgcaggatctcaccaaaggtggcagaaggaggccttctggagctgacccacccccgacgaccatcagggtgaggcaactccaaggtcctactctctttctgtgcctgttacccaccccgtcctcctagggtgcccttgagccgcaaaactgctgtccacgtggaccgggggtgacatcgcacgtccatctgccaggacccctgcgtccaaattccgagacatggcgaccaacggcagcaaggtggccgacgggcagatctccaccgaggtcagcgaggcccctgtggccaatgacaagcccaaaaccttggtggtcaaggtgcagaagaaggcggcagacctccccgaccgggacacgtggaagggccgcttcgacttcctcatgtcctgtgtgggctatgccatcggcctgggcaacgtctggaggttcccctatctctgcgggaaaaatggtgggggagccttcctgatcccctatttcctgacactcatctttgcgggggtcccactcttcctgctggagtgctccctgggccagtacacctccatcggggggctaggggtatggaagctggctcctatgttcaagggcgtgggccttgcggctgctgtgctatcattctggctgaacatctactacatcgtcatcatctcctgggccatttactacctgtacaactccttcaccacgacactgccgtggaaacagtgcgacaacccctggaacacagaccgctgcttctccaactacagcatggtcaacactaccaacatgaccagcgctgtggtggagttctgggagcgcaacatgcatcagatgacggacgggctggataagccaggtcagatccgctggccactggccatcacgctggccatcgcctggatccttgtgtatttctgtatctggaagggtgttggctggactggaaaggtggtctacttttcagccacatacccctacatcatgctgatcatcctgttcttccgtggagtgacgctgcccggggccaaggagggcatcctcttctacatcacacccaacttccgcaagctgtctgactccgaggtgtggctggatgcggcaacccagatcttcttctcatacgggctgggcctggggtccctgatcgctctcgggagctacaactctttccacaacaatgtctacagggactccatcatcgtctgctgcatcaattcgtgcaccagcatgttcgcaggattcgtcatcttctccatcgtgggcttcatggcccatgtcacgaagaggtccattgctgatgtggcggcctcaggccccgggctggcgttcctggcatacccagaggcggtgacccagctgcctatctccccactctgggccatcctcttcttctccatgctgttgatgctgggcattgacagccagttctgcactgtggagggcttcatcacagccctggtggatgagtaccccaggctcctccgcaaccgcagagagctcttcattgctgctgtctgcatcatctcctacctgatcggtctctctaacatcactcaggggggtatttatgtcttcaaactctttgactactactctgccagtggcatgagcctgctgttcctcgtgttctttgaatgtgtctctatttcctggttttacggtgtcaaccgattctatgacaatatccaagagatggttggatccaggccctgcatctggtggaaactctgctggtctttcttcacaccaatcattgtggcgggcgtgttcattttcagtgctgtgcagatgacgcaactcaccatgggaaactatgttttccccaagtggggccagggtgtgggctggctgatggctctgtcttccatggtcctcatccccgggtacatggcctacatgttcctcaccttaaagggctccctgaagcagcgcatccaagtcatggtccagcccagcgaagacatcgttcgcccagagaatggtcctgagcagccccaggcgggcagctccaccagcaaggaggcctacatctagggtgggggccactcaccgacccgacactctcaccccccgacctggctgagtgcgaccaccacttgatgtctgaggataccttccatctcaacctacctcgagtggcgagtccagacaccatcaccacgcagagaggggaggtgggaggacagttagacccctgggtgggccctgccgtgggcaaggatacccggtggcttctggcacctggcgggctggtgacctttttaatccaggccccatcagcatcccacgatcggccttggtaaccgccgcggtagatcatttttatcccgccagggagtgtgatgcaggaagaccacatgcgctcctggcttttaaacctgttcctgactgttctcttactgccgaaacccttgactgttatctcggactttgcaggagttcctttccctccgaacgctgctccatgcacaggaaaagggcattttgtacaatggggacttcccgggaacgcttgctcttaagtaccagaagccggcggagctctggctttcgtgtttttggttttctccttcccaaggcagctggattgaaaaaacaaaacaaaacaaaaaaacccaggggcgtcagtcgatattcccagggccgcttctcctgcagtctgtggagcgtccttgtccccgccgccggaatgaatgagcattctgcagcccgatgtccctgtcccctcctcgccgggccattctgattggacctggcccagtgcaatctgtccagacaagccctgcttgctggaaaactgccacaagcacaattgatctctttttatcgccattccaggggcctcaggtcctactggggaaacttcctataccggagctccagtttctcttaagctgcccaatttcacagagtacaaaatagttgtaggggaaatcaaggtgaaggatctgtccgacagtcaagacggatccacagtaatctttcggtctccttaaactaccaccctcgctgccacccaccccaagctgctgccgcctcaccttccttgaaatttctcagcgggagtctcctcactgccactaaaacccacccagcccactaactgaggagctagtgttaatccagagaaccccccgcaatgtgcttccgagattcagactgcttcattgggaagtatgatttgttcctttctggaattgggctccgtggtggcggcggcacttcaagcaaagacagtttcttgcaagctccagtagctccgcgtgtctcatttgccaggaagatgggttcccacgtagcaaatcgtacattgtgccctgtagctccttagctagttagctcacaagccgtgttttatgactaatccttaataactatggtaaataactgtgactgtggggtttttaatctcttgtcattctcatccaaaagtgaccagcataccagttcttgcaataagatattaccctcagaatattaagcacattattgtagagaaaaaaaaatatgtgtacacatatgaacgcacaacatgcacattcatcatcacatgtggcacgtaaggtctcatttgatattgtgtaggaaatctgaagccttttcctgaggtcatctgtaaaatagtctcattgccaaggcatccccagtgccagctggtgaatccatgatcaaaatgcatacgtattgttaaatgataaggtttagaatgacaggaacccatcactgtgtctcatggtcccacttccccatctgtgtgtgaattcctttagactaagggcaggaagacttccagctttctctttgttcttcaatgtgaaactgagaccaagtctctctaagacaaatgcagtgtatttaatgtttgtaagcaattctaagtgagatgtttggcaagaaatcccctaactgatttccatccaaacctaccttatagagcacaatattaagtgttgtacaattactgtgagaactgtgaatatgtgtaacttttttttagtatttgcccggggggaaaaagatattgtattatcatatatgctttttttgcaataaggatttattctcagaacaccaagtaaatctatctctatataaaaaatatatgtaatatatacatattcaaagtatatacagagcctgttttaaaaaatacagtattatttagtaaaattatctgttctatggaccaaatgtaaaatatttataaatgaagatgcattttaaatgtctataaatggtgtcataactagagcacgggcgttatgtaagtttctaagaatttagaggataaataataaaggttctatgatatacaacaaaaaaaaaaaaaagaaaaaaaaaaaaaaaa

SEQ ID NO: 508 - DNA, 3362 bp, human
aaaaaatcaattttggaagatgtcactgaacaactcttccaatgtatttctggattcagtgcccagtaataccaatcgctttcaagttagtgtcataaatgagaaccatgagagcagtgcagctgcagatgacaatactgacccaccacattatgaagaaacctcttttggggatgaagctcagaaaagactcagaatcagctttaggcctgggaatcaggagtgctatgacaatttcctccacagtggagaaactgctaaaacagatgccagttttcacgcttatgattctcacacaaacacatactatctacaaacttttggccacaacaccatggatgccgttcccaagatagagtactatcgtaacaccggcagcatcagtgggcccaaggtcaaccgacccagcctgcttgagattcacgagcaactcgcaaagaatgtggcagtcaccccaagttcagctgacagagttgctaacggtgatgggatacctggagatgaacaagctgaaaataaggaagatgatcaagctggtgttgtgaagtttggatgggtgaaaggtgtgctggtaagatgcatgctgaacatctggggagtcatgctcttcattcgcctctcctggattgttggagaagctggaattggtcttggagttatcatcattggcctatccaccatagtaacgacaatcacaggtatgtccacgtctgctattgccacgaacggagttgttagaggaggtggggcctactatcttatttccagaagtttagggcccgagttcggtgggtcaataggcctgatctttgcttttgctaatgcagtggctgttgctatgtatgtggtgggattcgctgaaactgtagtagatctacttaaggagagtgattcgatgatggtggatccaaccaatgacatccggattataggctccatcacagtggtgattcttctaggaatttcagtagctggaatggaatgggaggcaaaggcccaagtcattcttctggtcattcttctaattgctattgcaaacttcttcattggaactgtcattccatccaacaatgagaaaaagtccagaggtttctttaattaccaagcatcaatatttgcagaaaactttgggccacgcttcacaaagggtgaaggcttcttctctgtctttgccatttttttcccagcagctactgggattcttgctggtgccaatatctcaggagatttggaggatccccaagatgccatccccagaggaaccatgctggccattttcatcaccactgttgcctacttaggggttgcaatttgtgtaggggcctgtgtggtccgagatgccaccgggaacatgaatgacaccatcatttctgggatgaactgcaatggttcagcagcatgtgggttgggctatgacttctcaagatgtcgacatgaaccatgtcagtacgggctgatgaacaatttccaggtcatgagcatggtatcagggttcggccccctcatcactgcgggaatcttttctgcaacactctcctccgccctggcctcccttgtcagcgcacccaaagtgttccaggctctgtgcaaggacaacatctacaaagccctgcagttttttgcaaagggatatgggaaaaacaatgaacccctgagaggatatattctcacttttcttatagccatggcatttattcttattgcggaactgaacaccattgctcccatcatctccaactttttcctggcctcatatgcacttattaatttctcctgcttccatgcctcttatgccaaatctccaggatggagacctgcgtatggaatttacaacatgtgggtatctctttttggagctgttttgtgctgtgcagtcatgtttgtcatcaactggtgggcagctgtcatcacctatgtcattgaattcttcctttacgtctatgtgacttgtaagaagccagatgtgaactggggctcctccacacaggctctttcctacgtgagtgctttagacaatgctctggaattaaccacagtggaagaccacgtaaaaaacttcaggccccagtgcattgtcttaacagggggacccatgacaagacctgctctcctggacataactcacgcctttaccaagaacagtggcctttgcatctgctgtgaagtctttgtgggaccgcgcaaactgtgtgttaaggagatgaacagtggcatggcgaaaaaacaggcctggcttataaagaacaaaatcaaggctttttatgctgcagtggcggcagactgtttcagggatggtgtccgaagtcttcttcaggcctcaggcttaggaagaatgaaaccaaacactctggtgattggatataagaaaaactggaggaaagctcccttgacagagattgagaactacgtgggaatcatacatgatgcatttgattttgagattggcgtggttatagtcagaatcagccaaggatttgacatctctcaggttcttcaggtgcaagaggaattagagagattagaacaggagagactagcattggaagcgactatcaaagataatgagtgtgaagaggaaagtggaggcatccgaggcttgtttaaaaaagctggcaagttgaacattactaagacaacgcctaaaaaagatggcagcattaacacaagccagtcgatgcatgtgggagagttcaaccagaaactggtggaagccagcactcaatttaaaaagaaacaagaaaaaggcacaattgatgtttggtggttgtttgatgatggagggttaacacttcttatcccctatatcttaactctcagaaaaaaatggaaagactgtaaattaagaatctatgtgggagggaagatcaaccgcattgaagaagaaaaaattgcaatggcttcccttctgagcaaatttaggataaaatttgcagacatccatatcatcggtgacatcaacattaggccaaacaaagagagctggaaagtctttgaagagatgattgaaccatatcgtctccatgaaagctgcaaagatttaacaactgctgagaaattaaaaagagaaactccgtggaaaattacagatgcagaactggaagcagtcaaggaaaagagttaccgccaagttcgactgaatgaactcttacaggagcactccagagctgctaatctcattgtcctgagccttcccgtggcaagaaagggatccatatcggatttgttgtatatggcttggttggaaatcctcacaaagaacctcccacctgtcttactagttagaggaaatcacaaaaatgtcttgacattttactcttaaaacatgaaagattggaatacattttaacttaatgtaatgcata

SEQ ID NO: 509 - DNA, 3131 bp, human
gcgacaatggcagaactgcccacaacagagacgcctggggacgccactttgtgcagcgggcgcttcaccatcagcacactgctgagcagtgatgagccctctccaccagctgcctatgacagcagccaccccagccacctgacccacagcagcaccttctgcatgcgcacctttggctacaacacgatcgatgtggtgcccacatatgagcactatgccaacagcacccagcctggtgagccccggaaggtccggcccacactggctgacctgcactccttcctcaagcaggaaggcagacacctgcatgccctggcctttgacagccggcccagccacgagatgactgatgggctggtggagggcgaggcaggcaccagcagcgagaagaaccccgaggagccagtgcgcttcggctgggtcaagggggtgatgattcgttgcatgctcaacatttggggcgtgatcctctacctgcggctgccctggattacggcccaggcaggcatcgtcctgacctggatcatcatcctgctgtcggtcacggtgacctccatcacaggcctctccatctcagccatctccaccaatggcaaggtcaagtcaggtggcacctacttcctcatctcccggagtctgggcccagagcttgggggctccatcggcctcattttcgctttcgccaatgccgtgggtgtggccatgcacacggtgggctttgcagagaccgtgcgggacctgctccaggagtatggggcacccatcgtggaccccattaacgacatccgcatcattggcgtggtctcggtcactgtgctgctggccatctccctggctggcatggagtgggagtccaaggcccaggtgctgttcttccttgtcatcatggtctcctttgccaactatttagtggggacgctgatccccccatctgaggacaaggcctccaagggcttcttcagctaccgggcggacatttttgtccagaacttggtgcctgactggcggggtccagatggcaccttcttcggaatgttctccatcttcttcccctcggccacaggcatcctggcaggggccaacatatctggtgacctcaaggaccctgctatagccatccccaaggggaccctcatggccattttctggacgaccatttcctacctggccatctcagccaccattggctcctgcgtggtgcgtgatgcctctggggtcctgaatgacacagtgacccctggctggggtgcctgcgaggggctggcctgcagctatggctggaacttcaccgagtgcacccagcagcacagctgccactacggcctcatcaactattaccagaccatgagcatggtgtcaggcttcgcgcccctgatcacggctggcatcttcggggccaccctctcctctgccctggcctgccttgtctctgctgccaaagtcttccagtgcctttgcgaggaccagctgtacccactgatcggcttcttcggcaaaggctatggcaagaacaaggagcccgtgcgtggctacctgctggcctacgccatcgctgtggccttcatcatcatcgctgagctcaacaccatagcccccatcatttccaacttcttcctctgctcctatgccctcatcaacttcagctgcttccacgcctccatcaccaactcgcctgggtggagaccttcattccaatactacaacaagtgggcggcgctgtttggggctatcatctccgtggtcatcatgttcctcctcacctggtgggcggccctcatcgccattggcgtggtgctcttcctcctgctctatgtcatctacaagaagccagaggtaaattggggctcctcggtacaggctggctcctacaacctggccctcagctactcggtgggcctcaatgaggtggaagaccacatcaagaactaccgcccccagtgcctggtgctcacggggccccccaacttccgcccggccctggtggactttgtgggcaccttcacccggaacctcagcctgatgatctgtggccacgtgctcatcggaccccacaagcagaggatgcctgagctccagctcatcgccaacgggcacaccaagtggctgaacaagaggaagatcaaggccttctactcggatgtcattgccgaggacctccgcagaggcgtccagatcctcatgcaggccgcaggtctcgggagaatgaagcccaacattctggtggttgggttcaagaagaactggcagtcggctcacccggccacagtggaagactacattggcatcctccatgatgcctttgagttcaactatggcgtgtgtgtcatgaggatgcgggagggactcaacgtgtccaagatgatgcaggcgcacattaaccccgtgtttgacccagcggaggacgggaaggaagccagcgccagaggtgccaggccatcagtctctggcgctttggaccccaaggccctggtgaaggaggagcaggccaccaccatcttccagtcggagcagggcaagaagaccatagacatctactggctctttgacgatggaggcctcaccctcctcattccctatctccttggccgcaagaggaggtggagcaaatgcaagatccgtgtgttcgtaggcggccagattaacaggatggaccaggagagaaaggcgatcatttctctgctgagcaagttccgactgggattccatgaagtccacatcctccctgacatcaaccagaaccctcgggctgagcacaccaagaggtttgaggacatgattgcacccttccgtctgaatgatggcttcaaggatgaggccactgtcaacgagatgcggcgggactgcccctggaagatctcagatgaggagattacgaagaacagagtcaagtcccttcggcaggtgaggctgaatgagattgtgctggattactcccgagacgctgctctcatcgtcatcactttgcccatagggaggaaggggaagtgccccagctcgctgtacatggcctggctggagaccctgtcccaggacctcagacctccagtcatcctgatccgaggaaaccaggaaaacgtgctcaccttttactgccagtaactccaggctttgacatccctgtccacagctct

SEQ ID NO: 510 - DNA, 1619 bp, human
tgggaccataaccggccgccgccgccaccgcggaccgagcgcggagttctggagtctcggacccgaagccgccacagggcgccccgcctcccgcccgccatgcccgcgccccgcgccccgcgcgctctggcggccgccgcgcccgcgtccgggaaggccaagctgacgcacccggggaaggcgatcctggcaggcggcctggcgggtggcatcgagatctgcatcaccttccccaccgagtacgtgaagacgcagctgcagctggacgagcgctcgcacccgccgcggtaccggggcatcggggactgcgtgcggcagacggttcgcagccatggcgtcctgggcctgtaccgcggccttagctccctgctctacggttccatccccaaggcggccgtcaggtttggaatgttcgagttcctcagcaaccacatgcgggatgcccagggacggctggacagcacgcgtgggctgctgtgcggcctgggcgctggcgtggccgaggccgtggtggtcgtgtgccccatggagaccatcaaggtgaagttcatccacgaccagacctccccaaaccccaagtacagaggattcttccacggggttagggagattgtgcgggaacaagggctgaaggggacgtaccagggcctcacagccactgtcctgaagcagggctcgaaccaggccatccgcttcttcgtcatgacctccctgcgcaactggtaccgaggggacaaccccaacaagcccatgaaccctctgatcactggggtcttcggagctattgcaggcgcagccagtgtctttggaaacactcctctggatgtgattaagacccggatgcagggcctggaggcgcacaaataccggaacacgtgggactgcggcttgcagatcctgaagaaggaggggctcaaggcattctacaaaggcactgtcccccgcctgggccgggtctgcctggatgtggccatagtgtttgtcatctatgatgaagtggtgaagctgctcaacaaagtgtggaagacggactaagcctagagaggccgcaaggggaccgccccaggcaccgccagagtgtcctgctacctttgtctcacatgattccagtgcagtagtgccaaaaggccccttcccacgtccctcgagctctgtagcctggtctgtgcattgtggctgtcaaatccatgtgtcccccctgtggtctgtgtgtgacaccaccactgtgtcccagtgtctggcccagccatggctggatgtgcatctggcctatgaccctgtgcccacttgtccatgtgcttactgtgaaccctgtgcctgtgtttcatgttctgtgtcacgtgaccctgtgccccgcctcccggggtgcccgtgtggcctgggtcctcggccctgtagccctggcccggtcccagtccggtgccttccaccctgccctggcctaccacagctgcctccgggcctcggcctggcttcaccgcattccaggggctgcagccccctgcttctcccgccattggccttaactggccctcgggccctctctccgccccggacagggtggcacccaccactctcaggaccaccctgccaaggcagaataaaccggatcctgttgc

SEQ ID NO: 511 - DNA, 2214 bp, human
cctgtttcccaggaacggtccccggcttcgcgccccaatttctaacagcctgcctgtcccccgggaacgttctaacatccttggggagcgccccagctacaagacactgtcctgagaacgctgtcatcacccgtagttgcaagtttcggagcggcagtgggaagcatgcgggactacgacgaggtgatcgccttcctgggcgagtgggggcccttccagcgcctcatcttcttcctgctcagcgccagcatcatccccaatggcttcaatggtatgtcagtcgtgttcctggcggggaccccggagcaccgctgtcgagtgccggacgccgcgaacctgagcagcgcctggcgcaacaacagtgtcccgctgcggctgcgggacggccgcgaggtgccccacagctgcagccgctaccggctcgccaccatcgccaacttctcggcgctcgggctggagccggggcgcgacgtggacctggggcagctggagcaggagagctgcctggatggctgggagttcagccaggacgtctacctgtccaccgtcgtgaccgagtggaatctggtgtgtgaggacaactggaaggtgcccctcaccacctccctgttcttcgtaggcgtgctcctcggctccttcgtgtccgggcagctgtcagacaggtttggcaggaagaacgttctcttcgcaaccatggctgtacagactggcttcagcttcctgcagattttctccatcagctgggagatgttcactgtgttatttgtcatcgtgggcatgggccagatctccaactatgtggtagccttcatactaggaacagaaattcttggcaagtcagttcgtattatattctctacattaggagtgtgcacattttttgcagttggctatatgctgctgccactgtttgcttacttcatcagagactggcggatgctgctgctggcgctgacggtgccgggagtgctgtgtgtcccgctgtggtggttcattcctgaatctccccgatggctgatatcccagagaagatttagagaggctgaagatatcatccaaaaagctgcaaaaatgaacaacatagctgtaccagcagtgatatttgattctgtggaggagctaaatcccctgaagcagcagaaagctttcattctggacctgttcaggactcggaatattgccataatgaccattatgtctttgctgctatggatgctgacctcagtgggttactttgctctgtctctggatgctcctaatttacatggagatgcctacctgaactgtttcctctctgccttgattgaaattccagcttacattacagcctggctgctattgcgaaccctgcccaggcgttatatcatagctgcagtactgttctggggaggaggtgtgcttctcttcattcaactggtacctgtggattattacttcttatccattggtctggtcatgctgggaaaatttgggatcacctctgctttctccatgctgtatgtcttcactgctgagctctacccaaccctggtcaggaacatggcggtgggggtcacatccacggcctccagagtgggcagcatcattgccccctactttgtttacctcggtgcttacaacagaatgctgccctacatcgtcatgggtagtctgactgtcctgattggaatcctcaccctttttttccctgaaagtttgggaatgactcttccagaaaccttagagcagatgcagaaagtgaaatggttcagatctgggaaaaaaacaagagactcaatggagacagaagaaaatcccaaggttctaataactgcattctgaaaaaatatctaccccatttggtgaagtgaaaaacagaaaaataagaccctgtggagaaattcgttgttcccactgaaatggactgactgtaacgattgacaccaaaatgaaccttgctatcaagaaatgctcgtcatacagtaaactctggatgattcttccagataatgtccttgctttacaaaccaaccatttctagagagtctccttactcattaattcaatgaaatggattggtaagatgtcttgaaaacatgttagtcaaggactggtaaaatacatataaagattaacactcatttccaatcatacaaatactatccaaataaaaataacatcattgtattaacgcaaatattaggtgacaacaaaaaaaaaaaaaaaaaaaaaaaa

SEQ ID NO: 512 - DNA, 3252 bp, human
gcggcccaggcccgcaaccttccctggtcgtgcgccctatgtaaggccagccgcggcaggaccaaggcggcggtgtcagctcgcgagcctaccctccgcggacggtcttgggtcgcctgctgcctggcttgcctggtcggcggcgggtgccccgcgcgcacgcgcaaagcccgccgcgttccccgaccccaggccgcgctctgtgggcctctgagggcggcatgcgggactacgacgaggtgaccgccttcctgggcgagtgggggcccttccagcgcctcatcttcttcctgctcagcgccagcatcatccccaatggcttcaccggcctgtcctccgtgttcctgatagcgaccccggagcaccgctgccgggtgccggacgccgcgaacctgagcagcgcctggcgcaaccacactgtcccactgcggctgcgggacggccgcgaggtgccccacagctgccgccgctaccggctcgccaccatcgccaacttctcggcgcttgggctggagccggggcgcgacgtggacctggggcagctggagcaggagagctgtctggatggctgggagttcagtcaggacgtctacctgtccaccattgtgaccgagtggaacctggtgtgtgaggacgactggaaggccccactcacaatctccttgttcttcgtgggtgtgctgttgggctccttcatttcagggcagctgtcagacaggtttggccggaagaatgtgctgttcgtgaccatgggcatgcagacaggcttcagcttcctgcagatcttctcgaagaattttgagatgtttgtcgtgctgtttgtccttgtaggcatgggccagatctccaactatgtggcagcatttgtcctggggacagaaattcttggcaagtcagttcgtataatattctctacgttaggagtgtgcatattttatgcatttggctacatggtgctgccactgtttgcttacttcatccgagactggcggatgctgctggtggcgctgacgatgccgggggtgctatgcgtggcactctggtggttcatccctgagtccccccgatggctcatctctcagggacgatttgaagaggcagaggtgatcatccgcaaggctgccaaagccaatgggattgttgtgccttccactatctttgacccgagtgagttacaagacctaagttccaagaagcagcagtcccacaacattctggatctgcttcgaacctggaatatccggatggtcaccatcatgtccataatgctgtggatgaccatatcagtgggctattttgggctttcgcttgatactcctaacttgcatggggacatctttgtgaactgcttcctttcagcgatggttgaagtcccagcatatgtgttggcctggctgctgctgcaatatttgccccggcgctattccatggccactgccctcttcctgggtggcagtgtccttctcttcatgcagctggtacccccagacttgtattatttggctacagtcctggtgatggtgggcaagtttggagtcacggctgccttttccatggtctacgtgtacacagccgagctgtatcccacagtggtgagaaacatgggtgtgggagtcagctccacagcatcccgcctgggcagcatcctgtctccctacttcgtttaccttggtgcctacgaccgcttcctgccctacattctcatgggaagtctgaccatcctgacagccatcctcaccttgtttctcccagagagcttcggtaccccactcccagacaccattgaccagatgctaagagtcaaaggaatgaaacacagaaaaactccaagtcacacaaggatgttaaaagatggtcaagaaaggcccacaatccttaaaagcacagccttctaacatcgcttccagtaagggagaaactgaagaggaaagactgtcttgccagaaatggccagcttgtgcagactccgagtccttcagtgacaaaggcctttgctgtttgtcctcttgacctgtgtctgacttgctcctggatgggcacccacactcagaggctacatatggccctagagcaccaccttcctctagggacactggggctacctacagacaacttcatctaagtcctaactattacaatgatggactcagcacctccaaagcagttaatttttcactagaaccagtgagatctggaggaatgtgagaagcatatgctaaatgtacattttaattttagactacttgaaaaggcccctaataaggctagaggtctaagtcccccacccctttccccactcccctctagtggtgaactttagaggaaaaggaagtaattgcacaaggagtttgattcttaccttttctcagttacagaggacattaactggatcattgcttccccagggcaggagagcgcagagctagggaaagtgaaaggtaatgaagatggagcagaatgagcagatgcagatcaccagcaaagtgcactgatgtgtgagctcttaagaccactcagcatgacgactgagtagacttgtttacatctgatcaaagcactgggcttgtccaggctcataataaatgctccattgaatctactattcttgttttccactgctgtggaaacctccttgctactatagcgtcttatgtatggtttaaaggaaatttatcaggtgagagagatgagcaacgttgtcttttctctcaaagctgtaatgtgggttttgttttattgtttatttgtttgttgttgtatccttttctccttgttatttgcccttcagaatgcacttgggaaaggctggttccttagcctcctggtttgtgtctttttttttttttttttaaacacagaatcactctggcaattgtctgcagctgccactggtgcaaggccttaccagccctagcctctagcacttctctaagtgccaaaaacagtgtcattgtgtgtgttcctttcttgatacttagtcatgggaggatattacaaaaaagaaatttaaattgtgttcatagtctttcagagtagctcactttagtcctgtaactttattgggtgatattttgtgttcagtgtaattgtcttctctttgctgattatgttaccatggtactcctaaagcatatgcctcacctggttaaaaaagaacaaacatgtttttgtgaaagctactgaagtgccttgggaaatgagaaagttttaataagtaaaatgattttttaaatatcaaaaaaaaaaaaaaaa

SEQ ID NO: 513 - DNA, 3208 bp, human
ctatcccatagtctcgctgccctgagcctcccgtgccggccggccggccgggggaacaggcgggcgctcggggggcgctcggggggcggggggagttccggttccggttctttgtgcggctgcatcggcggctccgggaagatggcggcccgggcgggtttccagtctgtggctccaagcggcggcgccggagcctcaggaggggcgggcgcggctgctgccttgggcccgggcggaactccggggcctcctgtgcgaatgggcccggctccgggtcaagggctgtaccgctccccgatgcccggagcggcctatccgagaccaggtatgttgccaggcagccgaatgacacctcagggaccttccatgggaccccctggctatggggggaacccttcagtccgacctggcctggcccagtcagggatggatcagtcccgcaagagacctgcccctcagcagatccagcaggtccagcagcaggcggtccaaaatcgaaaccacaatgcaaagaaaaagaagatggctgacaaaattctacctcaaaggattcgtgaactggtaccagaatcccaggcctatatggatctcttggcttttgaaaggaaactggaccagactatcatgaggaaacggctagatatccaagaggccttgaaacgtcccatcaagcaaaaacggaagctgcgaattttcatttctaacactttcaatccggctaagtcagatgccgaggatggggaagggacggtggcttcctgggagcttcgggtagaaggacggctcctggaggattcagccttgtccaaatatgatgccactaaacaaaagaggaagttctcttccttttttaagtccttggtgattgaactggacaaagacctgtatgggccagacaaccatctggtagaatggcacaggaccgccactacccaggagaccgatggctttcaggtgaagcggccgggagacgtgaatgtacggtgtactgtcctactgatgctggattaccagcctccccagtttaaattagacccccgcctagctcgactcctgggcatccatacccagactcgtccagtgatcatccaagcactgtggcaatatattaagacacataagctccaggaccctcacgagcgggagtttgtcatctgtgacaagtacctgcagcagatctttgagtctcaacgtatgaagttttcagagatccctcagcggctccatgccttgcttatgccaccagaacctatcatcattaatcatgtcatcagtgttgacccgaatgatcagaaaaagacagcttgttatgacattgatgttgaagtggatgacaccttgaagacccagatgaattcttttctgctgtccactgccagccaacaggagattgctactctagacaacaagacaatgactgatgtggtgggtaacccagaggaggagcgccgagctgagttctacttccagccctgggctcaggaggctgtgtgccgatacttctactccaaggtgcagcagagacgacaagaattagagcaagccctgggaatccggaatacatagggcctctcccacagccctgattcgactgcaccaattcttgatttgggccctgtgctgcctgcctcatagtatctgccttggtcttgcttggggcgttccaggggatgctgttggttcaaggacaacaccagaatgaagagggtctcacaagacacctgttatcctcttctttcaccctatctcttcccacccccagcttccctttgccccacaaagttcccatgtgcctgtaccctcccctggtctacataggacctctagatagtgttagagagagaacatgtagtggtaatgagtgcttggaatggattgggcctcaggccaggtggtcttcaaggggaccagctaactgatcctgcccttcagagacccaggagttgggagctttcgctccttctccaagactcaggcctgtgggcactctataagctagttgatcttggctctcctgataacagaatccaatttccttccttccctccacaggtttggaacaaactctcccttcacttgttgccctgtagcactacagaaaccctggttcttgggctccactgagccccaggtcagtccccagccctctgggttggcctgctgtcagtgcttctctcactccttagttggggtccacatcagtattggagttttgttctttattgctccctcccagacactccctgtggctgccctttgtgattccctcagatctgccctaatcccgggcatttgggtgggggaatcttgcctttccctttcagagccccagggatctcatctggggaactgtcattgccagcagaggctgttccttcctgctgtttggagatgtgactcattcattcactcactccaccctgcctctgcatcccttaatggagaaacgggcctaaaaccaaacgggtaaaaagccctgggccatccctgtcttcctgtcccttgtctgcccagttgacacctactggtgacttctagggcactgaggagtgaaagcgcctagggctggagaatagcgctgagttgggtttgtgactcttccctctccctgcctcacaggattgtgactccccagcccctgccctcaaagcttcagacccctcaggtagcagcaggaccttgtgatcttggccccttggatctgagatggtttttgcatctttccaggagagcctcacattcttcttccaggttgtatcacccccgagttagcatatcccaggctcgcagactcaacacagcaagggtgggagacagctgggcacaaagggggaattccgttcagcatgggctctaaacccacagaactgacaaagcccctgcttccccaccccctcctcaggctcctgcgagcacacccccacccccaaatccctccctgttctacactggggacagcagaattttctccccgtcttccccttcctgccattttccctcccttgaaaggttgacactggacaaccttggggcagctgagccctggccgcctcctggctggaaccatgagaaggaagctcagtacttcccacagtgtccctgttgataactgtttttattaactgaattgtttttttcatggaccaaacttttttttgtactgtccccttattgatgttacccagttttaataaaagaatcttctgaa

SEQ ID NO: 514 - DNA, 1662 bp, human
gcggccgcgaccgccggggacgagcttggaggaaaaggaaccgggagccgcccacccgggggcgctctccggacccccagggtcctagcgcgcggcccttaccgagcctgggcgcccggatttcggsagcggatcgcctttccgggttggcggcccgcctgattgggaacagccggccggttgccgggggaacgcgggagtcgggcccgacctgagccacgcgggcttggtgcccacctgtgcgcgccgcctgcgaagaaggaacggtctagggagaaggcgccgccggccgcccccgtccccaccgcggccgtcgctggagagttcgagccgcctagcgcccctggagctccccaaccatgaagctcaacttctccctgcgactgcggatcttcaacctcaactgctggggcattccgtacttgagcaagcaccgggccgaccgcatgaggcgcctgggagactttctgaaccaggagagcttcgacctggctttgctggaggaggtgtggagtgagcaggacttccagtacctgagacagaagctgtcacctacctacccagctgcacaccacttccggagcggaatcattggcagtggcctctgtgtcttctccaaacatccaatccaggagcttacccagcacatctacactctcaatggctacccctacatgatccatcatggtgactggttcagtgggaaggctgtggggctgctggtgctccatctaagtggcatggtgctcaacgcctatgtgacccatctccatgccgaatacaatcgacagaaggacatctacctagcacatcgtgtggcccaagcttgggaattggcccagttcatccaccacacatccaagaaggcagacgtggttctgttgtgtggagacctcaacatgcacccagaagacctgggctgctgcctgctgaaggagtggacagggcttcatgatgcctatcttgaaactcgggacttcaagggctctgaggaaggcaacacaatggtacccaagaactgctacgtcagccagcaggagctgaagccatttccctttggtgtccgcattgactacgtgctttacaaggcagtttctgggttttacatctcctgtaagagttttgaaaccactacaggctttgaccctcacagtggcacccccctctctgatcatgaagccctgatggctactctgtttgtgaggcacagccccccacagcagaaccccagctctacccacggaccagcagagaggtcgccgttgatgtgtgtgctaaaggaggcctggacggagctgggtctgggcatggctcaggctcgctggtgggccaccttcgctagctatgtgattggcctggggctgcttctcctggcactgctgtgtgtcctggcggctggaggaggggccggggaagctgccatactgctctggacccccagtgtagggctggtgctgtgggcaggtgcattctacctcttccacgtacaggaggtcaatggcttatatagggcccaggctgagctccagcatgtgctaggaagggcaagggaggcccaggatctgggcccagagcctcagccagccctactcctggggcagcaggagggggacagaactaaagaacaataaagcttggccctttaaaaaaaaaaaaaaaaaa

SEQ ID NO: 515 - DNA, 1717 bp, human
gggcgcagcacactcccagccggccgcagcctgacacgccgcgcggccccccagtctcccgcggctgctcccccaggcatggcacagggcctcgcctcactatggcagcagcacggcacagcacgctcgacttcatgctcggcgccaaagctgatggtgagaccattctaaaaggcctccagtccattttccaggagcaggggatggcggagtcggtgcacacctggcaggaccatggctatttagcaacctacacaaacaagaacggcagctttgccaatttgagaatttacccacatggattggtgttgctggaccttcagagttatgatggtgatgcgcaaggcaaagaagagatcgacagtattttgaacaaagtagaggaaagaatgaaagaattgagtcaggacagtactgggcgggtgaaacgattaccacccatagtgcgaggaggagccatcgacagatactggcccaccgccgacgggcgcctggttgaatatgacatagatgaagtggtatatgacgaagattcaccttatcaaaatataaaaattctacactcgaagcagtttggaaatattctcatccttagtggggatgttaatttggcagagagtgatttggcatatacccgggccatcatgggcagtggcaaagaagattacactggcaaagatgtactcattctgggaggtggagacggaggcatattgtgtgaaatagtcaaactaaaaccaaagatggtcactatggtagagattgaccaaatggtgattgatgggtgtaagaaatacatgcgaaaaacgtgtggcgatgtcttagacaatcttaaaggagactgctatcaggttctaatagaagactgtatcccggtactgaagaggtacgccaaagaagggagagaatttgattatgtgattaatgatttgacagctgttccaatctccacgtctccagaagaagattccacatgggagtttctcagactgattcttgacctctcaatgaaagtgttgaaacaggatgggaaatattttacacaggggaactgtgtcaatctgacagaagcactgtcgctctatgaagaacagctggggcgcctgtattgtcctgtggaattttcaaaggagatcgtctgtgtcccttcatacttggaattgtgggtattttacactgtttggaagaaagctaaaccctgaagatcagtagcccctaatcacatgtgctgcaaatagccttcctgacctccatatgctgtacatgacatcaaaatgagtcaggcaattgattgtgaattccttaaagttttcctttttttaataattatttttaatttaaaaaagcaaatggaaaatgtatattttgatgagcttagggtgttttttttttgaaagtcagctgaaggatggttagacagcacagcgaagactgctaaatgcactgaccccccccattagaatgtgatttttgttcctttttatttctctgtgggcttttgtttttgtttttgttttggtagatcttcaatttggatatttggaggagtgaacatcgttgttttgctggagggaagatcttgatggtgtttctttccccaaaaattgacttagatattaaaatttggtgcttataagagagagttaaaaaaaaataggattgcttcaattaaaattacaaaagagacaaaaaaaaaaaaaaaaaaaaaaaaaaaaaa

SEQ ID NO: 516 - DNA, 1153 bp, human
aactccagggctagtgagctggaccggaagtaggtttctacccgaccgcattttacgtggtgctgcatttccggtagcggcggcgggaaatcggctgtgggagagaggctaggcctctgaggaggcgaatccggcgggtatcagagccatcagaaccgccaccatgacggtgggcaagagcagcaagatgctgcagcatattgattacaggatgaggtgcatcctgcaggacggccggatcttcattggcaccttcaaggcttttgacaagcacatgaatttgatcctctgtgactgtgatgagttcagaaagatcaagccaaagaactccaaacaagcagaaagggaagagaagcgagtcctcggtctggtgctgctgcgaggggagaatctggtctcaatgacagtagagggacctcctcccaaagatactggtattgctcgagttccacttgctggagctgccgggggcccagggatcggcagggctgctggcagaggaatcccagctggggttcccatgccccaggctcctgcaggacttgctgggccagtccgtggggttggcgggccatcccaacaggtgatgaccccacaaggaagaggtactgttgcagccgctgcagctgctgccacagccagtattgccggggctccaacccagtacccacctggccgtgggggtcctcccccacctatgggccgaggagcaccccctccaggcatgatgggcccacctcctggtatgagacctcctatgggtcccccaatggggatcccccctggaagagggactccaatgggcatgccccctccgggaatgcggcctcctccccctgggatgcgaggccttctttgacccttggccacagagtatggaagtagctccgcagaggcgtgggctcgattcctcagggccacgttaccacagacctgtttgtttcttatgctgttgttcgtggagtctcatgggattgtctggtttcccttacagggccccctcccccgggaatgcgcccaccaaggccctagactcatcttggccctcctcagctccctgcctgtttcccgtaaggctgtacatagtccttttatctccttgtggcctatgaaactggtttataataaactcttaagagaacattataattgc

SEQ ID NO: 517 - DNA, 762 bp, human
taccattcttcaagaaacggtttgaatcagactgcctttccttttgtcttcattgtcataaacatctgcccccgtgtggttctgactggccgcgaacccctacccgaagcttttattccatcattgtgcaccgttggtggggaatgctgtggcaacaggccacgcctccacttactggttggctttgcgcaggcgccaacggaagtgggtcgcaggaagaggaagtcccgcctctctctcctcaggcagcagcaacgcggaggaaacgggagtgaacggagagcgtagtgaccatcatgagcctcctcaacaagcccaagagtgagatgaccccagaggagctgcagaagcgagaggaggaggaatttaacaccggtccactctctgtgctcacacagtcagtcaagaacaatacccaagtgctcatcaactgccgcaacaataagaaactcctgggccgcgtgaaggccttcgataggcactgcaacatggtgctggagaacgtgaaggagatgtggactgaggtacccaagagtggcaagggcaagaagaagtccaagccagtcaacaaagaccgctacatctccaagatgttcctgcgcggggactcagtcatcgtggtcctgcggaacccgctcatcgccggcaagtaggggccgcctgtctgttgacagaactcactcctctgtcctatgaagaccgctgccattggtgttgagaataataaagctctgtgtttttttctaaaaaaaaaaaaaaaaa

SEQ ID NO: 518 - DNA, 874 bp, human
ctgcagcgtctggggtttccgttgcagtcctcggaaccaggacctcggcgtggcctagcgagttatggcgacgaaggccgtgtgcgtgctgaagggcgacggcccagtgcagggcatcatcaatttcgagcagaaggaaagtaatggaccagtgaaggtgtggggaagcattaaaggactgactgaaggcctgcatggattccatgttcatgagtttggagataatacagcaggctgtaccagtgcaggtcctcactttaatcctctatccagaaaacacggtgggccaaaggatgaagagaggcatgttggagacttgggcaatgtgactgctgacaaagatggtgtggccgatgtgtctattgaagattctgtgatctcactctcaggagaccattgcatcattggccgcacactggtggtccatgaaaaagcagatgacttgggcaaaggtggaaatgaagaaagtacaaagacaggaaacgctggaagtcgtttggcttgtggtgtaattgggatcgcccaataaacattcccttggatgtagtctgaggccccttaactcatctgttatcctgctagctgtagaaatgtatcctgataaacattaaacactgtaatcttaaaagtgtaattgtgtgactttttcagagttgctttaaagtacctgtagtgagaaactgatttatgatcacttggaagatttgtatagttttataaaactcagttaaaatgtctgtttcaatgacctgtattttgccagacttaaatcacagatgggtattaaacttgtcagaatttctttgtcattcaagcctgtgaataaaaaccctgtatggcacttattatgaggctattaaaagaatccaaattc

SEQ ID NO: 519 - DNA, 1026 bp, human
cagcatgttgagccgggcagtgtgcggcaccagcaggcagctgcctccggttttggggtatctgggctccaggcagaagcacagcctccccgacctgccctacgactacggcgccctggaacctcacatcaacgcgcagatcatgcagctgcaccacagcaagcaccacgcggcctacgtgaacaacctgaacgtcaccgaggagaagtaccaggaggcgttggccaagggagatgttacagcccagatagctcttcagcctgcactgaagttcaatggtggtggtcatatcaatcatagcattttctggacaaacctcagccctaacggtggtggagaacccaaaggggagttgctggaagccatcaaactggactttggttcctttgacaagtttaaggagaagctgacggctgcatctgttggtgtccaaggctcaggttggggttggcttggtttcaataaggaacggggacacttacaaattgctgcttgtccaaatcaggatccactgcaaggaacaacaggccttattccactgctggggattgatgtgtgggagcacgcttactaccttcagtataaaaatgtcaggcctgattatctaaaagctatttggaatgtaatcaactgggagaatgtaactgaaagatacatggcttgcaaaaagtaaaccacgatcgttatgctgagtatgttaagctctttatgactgtttttgtagtggtatagagtactgcagaatacagtaagctgctctattgtagcatttcttgatgttgcttagtcacttatttcataaacaacttaatgttctgaataatttcttactaaacattttgttattgggcaagtgattgaaaatagtaaatgctttgtgtgattgaatctgattggacattttcttcagagagctaaattacaattgtcatttataaaaccatcaaaaatattccatccatatactttggggacttgtagggatgcctttctagtcctattctattgcagttatagaaaatctag

SEQ ID NO: 520 - DNA, 2628 bp, human
cccctgcgtgcggcgcttctcccaggccccaccttccatccagtgccctggaccctcggctgggtagcgccaccagagcgaccaaacgtcccgcgccttccaggccgcactccagagccaaaagagctccatggcggcggcggccaagcccaacaacctttccctggtggtgcacggaccgggggacttgcgcctggagaactatcctatccctgaaccaggcccaaatgaggtcttgctgaggatgcattctgttggaatctgtggctcagatgtccactactgggagtatggtcgaattgggaattttattgtgaaaaagcccatggtgctgggacatgaagcttcgggaacagtcgaaaaagtgggatcatcggtaaagcacctaaaaccaggtgatcgtgttgccatcgagcctggtgctccccgagaaaatgatgaattctgcaagatgggccgatacaatctgtcaccttccatcttcttctgtgccacgccccccgatgacgggaacctctgccggttctataagcacaatgcagccttttgttacaagcttcctgacaatgtcacctttgaggaaggcgccctgatcgagccactttctgtggggatccatgcctgcaggagaggcggagttaccctgggacacaaggtccttgtgtgtggagctgggccaatcgggatggtcactttgctcgtggccaaagcaatgggagcagctcaagtagtggtgactgatctgtctgctacccgattgtccaaagccaaggagattggggctgatttagtcctccagatctccaaggagagccctcaggaaatcgccaggaaagtagaaggtcagctggggtgcaagccggaagtcaccatcgagtgcacgggggcagaggcctccatccaggcgggcatctacgccactcgctctggtgggaccctcgtgcttgtggggctgggctctgagatgaccaccgtacccctactgcatgcagccatccgggaggtggatatcaagggcgtgtttcgatactgcaacacgtggccagtggcgatttcgatgcttgcgtccaagtctgtgaatgtaaaacccctcgtcacccataggtttcctctggagaaagctctggaggcctttgaaacatttaaaaagggattggggttgaaaatcatgctcaagtgtgaccccagtgaccagaatccctgatgttaatgggctctgccctcatccccacagtcttgggatctcagggcacaatggctggacatgggtgggctctgatgcagaactttctcttttgaatgttaagaataactaatacaattcattgtgaacagaagtccttaagcagaggaattggtgtgccttaaagatacaatctgggatagtttgggggaacttgtagccagaatgccctgttcatgctgagcaaagttcagcaagtagagcagagtttggcaggcaggtgccaggaactccccttcttcctggagtgccttcattgaggaaggaaatctggcccttgggtttcctggttccactgctactgacccagaggggaatgagggctgagttatgaaaagataacttcatgaagacttaactggcccagaagctgattttcatgaaaatctgccactcagggtctgggatgaaggcttgtcagcacttccagtttagaacgcaatgtttctagagacatattggctgtttgttttgatgataaaaggagaataagaaaaggcatcactttcctggatccaggataatttttaaaccaatcaaatgaaaaaaacaaacaaacaaaaaaggaaatgtcatgtgaggttaaaccagtttgcattcccctaatgtggaaaaagtaagaggactactcagcactgtttgaagattgcctcttctacagcttctgagaattgtgttatttcacttgccaagtgaaggaccccctccccaacatgccccagcccacccctaagcatggtcccttgtcaccaggcaaccaggaaactgctacttgtggacctcaccagagaccaggagggtttggttagctcacaggacttcccccaccccagaagattagcatcccatactagactcatactcaactcaactaggctcatactcaattgatggttattagacaattccatttctttctggttattataaacagaaaatctttcctcttctcattaccagtaaaggctcttggtatctttctgttggaatgatttctatgaacttgtcttattttaatggtgggttttttttctggtaagatttagacctaaatcgcatcatgccaacttgtgactttgagactattcatcaagaatgaggatatagtagccatgacatagcttgagctatagcctttaattccttactttggctatgggtggagggtgagtttgaagaggttctgattttcttgtaacctgggaaagccatgaccttgtgcccgattctttcagattgctttgggtaataaatattggtggtggtatctgaaaaaaaaaaaaaaaaaaaaaaaaaaaaaaaaaaaaaaaaaaaaaaaaaaaaaaaaaaaaaaaaaaaaaaaaaaaaaaaaaaaaaaaaaaaaaaaaaaaaaaaaaaaaaaaaaa

SEQ ID NO: 521 - DNA, 5221 bp, human
ggcccgagccaccgactgcaggaggagaaggggttgtgctcctggccgaggaaggagaaaggggcggggccggcgggcagcgtgcggcagtgcggagctcctgagaccggcgggcacacgggggtctgtggcccccgccgtagcagtggctgccgccgtcgcttggttcccgtcggtctgcgggaggcgggttatggcggcggcggcagtgagagctgtgaatgaattctccgggtggacgagggaagaagaaaggctccggcggcgccagcaacccggtgcctcccaggcctccgcccccttgcctggcccccgcccctcccgccgccgggccggcccctccgcccgagtcgccgcataagcggaacctgtactatttctcctacccgctgtttgtaggcttcgcgctgctgcgtttggtcgccttccacctggggctcctcttcgtgtggctctgccagcgcttctcccgcgccctcatggcagccaagaggagctccggggccgcgccagcacctgcctcggcctcggccccggcgccggtgccgggcggcgaggccgagcgcgtccgagtcttccacaaacaggccttcgagtacatctccattgccctgcgcatcgatgaggatgagaaagcaggacagaaggagcaagctgtggaatggtataagaaaggtattgaagaactggaaaaaggaatagctgttatagttacaggacaaggtgaacagtgtgaaagagctagacgccttcaagctaaaatgatgactaatttggttatggccaaggaccgcttacaacttctagagaagatgcaaccagttttgccattttccaagtcacaaacggacgtctataatgacagtactaacttggcatgccgcaatggacatctccagtcagaaagtggagctgttccaaaaagaaaagaccccttaacacacactagtaattcactgcctcgttcaaaaacagttatgaaaactggatctgcaggcctttcaggccaccatagagcacctagttacagtggtttatccatggtttctggagtgaaacagggatctggtcctgctcctaccactcataagggtactccgaaaacaaataggacaaataaaccttctacccctacaactgctactcgtaagaaaaaagacttgaagaattttaggaatgtggacagcaaccttgctaaccttataatgaatgaaattgtggacaatggaacagctgttaaatttgatgatatagctggtcaagacttggcaaaacaagcattgcaagaaattgttattcttccttctctgaggcctgagttgttcacagggcttagagctcctgccagagggctgttactctttggtccacctgggaatgggaagacaatgctggctaaagcagtagctgcagaatcgaatgcaaccttctttaatataagtgctgcaagtttaacttcaaaatacgtgggagaaggagagaaattggtgagggctctttttgctgtggctcgagaacttcaaccttctataatttttatagatgaagttgatagccttttgtgtgaaagaagagaaggggagcacgatgctagtagacgcctaaaaactgaatttctaatagaatttgatggtgtacagtctgctggagatgacagagtacttgtaatgggtgcaactaataggccacaagagcttgatgaggctgttctcaggcgtttcatcaaacgggtatatgtgtctttaccaaatgaggagacaagactacttttgcttaaaaatctgttatgtaaacaaggaagtccattgacccaaaaagaactagcacaacttgctagaatgactgatggatactcaggaagtgacctaacagctttggcaaaagatgcagcactgggtcctatccgagaactaaaaccagaacaggtgaagaatatgtctgccagtgagatgagaaatattcgattatctgacttcactgaatccttgaaaaaaataaaacgcagcgtcagccctcaaactttagaagcgtacatacgttggaacaaggactttggagataccactgtttaaggaaatacctttgtaaacctgcagaacattttacttaaaagaggaaacacaagatcttcaatgaacgtcatcggctacagaaacagcctaagtttacaggactttttagagtcttacatatttgtgcaccaaacttgaagatgaaccagaaaacagacttaaacaaaatatacaatgcaaatgtaattttttgttgtttaaggccttgccttgatggtcacagttatcccaatggacactaagttagagcacaacaaaacctgattctggtcttctttaccaatataatcataatgtaaataataatttgtatattgtgttgcagatgaaagtattccaggaacagtgaatggtagaagacacaagaacatttgtttgtttgtcttctgatgttttttcttaaaatagtaatttctcctacttttcttttctactgttgtcttaactacaggtgattggaatgccaaacactcttaagtttattttcttttttcgttttataaattcagtgtgccaaatgaaacttttttcctaagtaactgtaataggaaaaagtttattttgagagtttcttcttcataaatctacagacattaaacaattgttgtgttctttttaccttttatttttctattaccttgctaccaaacagtttagatagcaatataatagcaaaaaagcaaatatggtaaaatagagaaggtttgaaggtttgagttactctgtcatataacatgtagatcagtcttcatgtgacctgcagtatttttttttctaatgtatttgtcagaaatctgttgtagactgttaacttcttcctgatggaatttattttctgcaagaattattctgatatttaagagagccaattttaactgctgtgaaaatgtttccagtgcaagagaagggaaatactaggaactaagacatttctaatttattgcttattactttcttaattttacaggataattataagcaagtggaactaccatcttttattcttaataattattaatcccttcaatgaaactttaaaaaaactgaatttttatacatggcatacatttttctagttccttctgcttgctttattaactcaaaagttctagttctagtctgttgatctgccttttgttctcccaaaatgtacagtaattccatttgtttgtataaatatgcctggattttcattataaaaatgtcattgtagggagtagagactcatatcatggccttttaaatattgtaataaaggcaaatagatatttgcccttagtttactggttaaaagtttgtttacagaacttttctctggtgcttaaatgatgctatgtaaaatgtcatgagtggaaagaatatttgtagtagtaacaagaatttttcatttaggaaagatttcttaggttttgaaagaatacattaaaataaaaaacttgcccctactaggtaagaactttataatgaagacatacattcttcttaattttactcttgctcttgttaaagatttgtttgaatatagaagatgcatgatttctgggtttttttttttttttgagacagagtttcgctcttgttgcccaggctggagtgcaatggcgcaatctcgactcaccacaacctccgcctcccaggttcaagcaattctcctgcctcagcctcccgagtagctgggattacaggcatgcgccactaccccagctaattttgtatttttagtagagatggggtttctccatgttggtcaggctggtcttgaactcctgacctcaggtgatccgcctgcctcggcctcccaaagtgctgggattacaggcataagccactgcgcccagccagaagatgcatgatttcttaggatcatatgctgtttgtagccataaggtaaatcatgtctcttccaatcatgactttggaactccctgaataataaaaatgagagttgagataaataggggaaaaaaaatttttttcaagccagagctatgcatatgttaggtgatgggtagtatccctttaaggtctcaaacattacaacatcaattatgaaatactgataacgaaaggtagtaatgaaatatatatgatgaaaagaattgagaagttctaaattaagacatttcagttaagctcataaaatttcattgttttcatttaaaagattaacgttattgatacttggataactggctaatcatattaaaggactatgtggttccagctcaacttttaatatattgtctcctttaaaactatcatggttataattctattgggaaagacttttagataacaaagatttcaaatgttaaaagagataaaagtcaggttaatactatcttaaacactgagtcagaaaatcattactgtatagaagttgctttcctgatcaagtctgaacttcagctagtgctagagaactattttctatgacttaactctaaccaagttttattttaagctgtttctttgatagaagggccatgaaaatagagtaatgatatagtaggagataagggattggtttggtctttttcaataaagatagaagttgctgaagttttctgaattaataatgacttagattgtgaccttttagattcggtgttgagctctgtgttgtattacttcctaaaagataatgcttaaacattaagcattagtgtgctcttcatgttaatatggcagagttttgtaaactaaattaaaacttactgatatattggactttgagccaagggaaagaatgagtactatctttccagatatcttaagggtaaaagcttattctaagacagtctgtccattgagaatattagatttctgacttgcaaatatgtttgtactccagaagaattagaggaaaagcagatactagaattctaatttaattacatatacagccgtctttgtttatagtgtagaattctttatattttgtacaaaaactaattcttttggtaaaatgaaccatttacagttcggttttggactctgagtcaaaggattttcctttaaatgcttgtctcaattttagtctggtcttttgtacttttcttcagaagaaatgaattaaagggtacagttgcataaagtgggtttttatcctaatgtattggaaataaatgataaactttaaaaaaaaa

SEQ ID NO: 522 - DNA, 1238 bp, human
cggcggagctggtcccgttgtgctgcggcgccgcgcggcctgcagtcccgggcccgcgccccgcgccgcccgcccgcccgccatggagcccggccccgacggccccgccgcctccggccccgccgccatccgcgagggctggttccgcgagacctgcagcctgtggcccggccaggccctgtcgctgcaggtggagcagctgctccaccaccggcgctcgcgctaccaggacatcctcgtcttccgcagtaagacctatggcaacgtgctggtgttggacggtgtcatccagtgcacggagagagacgagttctcctaccaggagatgatcgccaacctgcctctctgcagccaccccaacccgcgaaaggtgctgatcatcgggggcggagatggaggtgtcctgcgggaggtggtgaagcacccctccgtggagtccgtggtccagtgtgagatcgacgaggatgtcatccaagtctccaagaagttcctgccaggcatggccattggctactctagctcgaaggtgaccctacatgtgggtgacggttttgagttcatgaaacagaatcaggatgccttcgacgtgatcatcactgactcctcagaccccatgggccccgccgaaagtctcttcaaggagtcctattaccagctcatgaagacagccctcaaggaagatggtgtcctctgctgccagggcgagtgcgagtggctgcacctggacctcatcaaggagatgcggcagttctgccagtccctgttccccgtggtggcctatgcctactgcaccatccccacctaccccagcggccagatcggcttcatgctgtgcagcaagaacccgagcacgaacttccaggagccggtgcagccgctgacacagcagcaggtggcgcagatgcagctgaagtactacaactccgacgtgcaccgcgccgcctttgtgctgcccgagtttgcccgcaaggccctgaatgatgtgagctgagcccaggcgccaccactgatgccacccaggacctcggaccttggagcctgcggggtgcctcggcccctccagccccgggccggacctcctgctggctctcgcccaccaaccaagtgttacaagccccagaatgctgcccggcctgccctgctgggcggactgtctgtgtgtctgtctctctggcgttccacctccaagcctataccagctgtgtacagcgccatctctctgccttctgttgcccccg

SEQ ID NO: 523 - DNA, 800 bp, human
gccagcctaggccgaacttccggctctcactgctaggggcttaagcggagggagtcgagccagcgtcgccgcgatggtgttgttggagagcgagcagttcctgacggagctgaccagacttttccagaagtgccggacgtcgggcagcgtctatatcaccttgaagaagtatgacggtcgaaccaaacccattccaaagaaaggtactgtggagggctttgagcccgcagacaacaagtgtctgttacgagctaccgatgggaagaagaagatcagcactgtggtgagctccaaggaagtgaataagtttcagatggcttattcaaacctccttagagctaacatggatgggctgaagaagagagacaaaaagaacaaaactaagaagaccaaagcagcagcagcagcagcagcagcagcacctgccgcagcagcaacagcagcaacaacagcagcagcaacagcagcaacagcagcacagtaaagggcatacatttcctgctttcaccaattgaccactgaattgctattttttccttttggccagatagctaggtttctggttcccccacagtaggtgttttcacataagattagggtccttttggaaagaatagttgcagtgtttataggatagttgtggtaagaatctagtttattttgcatttggctaattggcctgtgctgcatggttatatactcctggattatagattaaaagtctctgtagacatctctgtgaagagcaagctatcattaaacatgtctgtttatcaaaaaaaaaaaaaaaaaaaaaaaaa

SEQ ID NO: 524 - DNA, 628 bp, human
cctgcgtggctgggctgctcgggttagatcgtcaggaaaagcctaaagattagactgtaagaaaagaaaatagaagccatgtttcgaagacctgtattacaggtacttcgtcagtttgtaagacatgagtccgaaacaactaccagtttggttcttgaaagatccctgaatcgtgtgcacttacttgggcgagtgggtcaggaccctgtcttgagacaggtggaaggaaaaaatccagtcacaatattttctctagcaactaatgagatgtggcgatcaggggatagtgaagtttaccaactgggtgatgtcagtcaaaagacaacatggcacagaatatcagtattccggccaggcctcagagacgtggcatatcaatatgtgaaaaaggggtctcgaatttatttggaagggaaaatagactatggtgaatacatggataaaaataatgtgaggcgacaagcaacaacaatcatagctgataatattatatttctgagtgaccagacgaaagagaaggagtagaaaggatgattcttctttggccatcatttggtacagtctcatttccaagtcatgtataatctttatggcttccaaggacaagaattaaaatactcttttacgt

SEQ ID NO: 525 - DNA, 3214 bp, human
gggtgggaggagccagcggccggggaggttctagtctgttctgtcttgcggcagccgcccccttctgcgcggtcacgccgagccagcgcctgggcctggaaccgggccgtagcccccccagtttcgcccaccacctccctaccatggacccccgcaaagtgaacgagcttcgggcctttgtgaaaatgtgtaagcaggatccgagcgttctgcacaccgaggaaatgcgcttcctgagggagtgggtggagagcatgggtggtaaagtaccacctgctactcagaaagctaaatcagaagaaaataccaaggaagaaaaacctgatagtaagaaggtggaggaagacttaaaggcagacgaaccatcaagtgaggaaagtgatctagaaattgataaagaaggtgtgattgaaccagacactgatgctcctcaagaaatgggagatgaaaatgcggagataacggaggagatgatggatcaggcaaatgataaaaaagtggctgctattgaagccctaaatgatggtgaactccagaaagccattgacttattcacagatgccatcaagctgaatcctcgcttggccattttgtatgccaagagggccagtgtcttcgtcaaattacagaagccaaatgctgccatccgagactgtgacagagccattgaaataaatcctgattcagctcagccttacaagtggcgggggaaagcacacagacttctaggccactgggaagaagcagcccatgatcttgcccttgcctgtaaattggattatgatgaagatgctagtgcaatgctgaaagaagttcaacctagggcacagaaaattgcagaacatcggagaaagtatgagcgaaaacgtgaagagcgagagatcaaagaaagaatagaacgagttaagaaggctcgagaagagcatgagagagcccagagggaggaagaagccagacgacagtcaggagctcagtatggctcttttccaggtggctttcctgggggaatgcctggtaattttcccggaggaatgcctggaatgggagggggcatgcctggaatggctggaatgcctggactcaatgaaattcttagtgatccagaggttcttgcagccatgcaggatccagaagttatggtggctttccaggatgtggctcagaacccagcaaatatgtcaaaataccagagcaacccaaaggttatgaatctcatcagtaaattgtcagccaaatttggaggtcaagcgtaatgtccttctgataaataaagcccttgctgaaggaaaagcaacctagatcaccttatggatgtcgcaataatacaaaccagtgtacctctgaccttctcatcaagagagctggggtgctttgaagataatccctacccctctcccccaaatgcagctgaagcattttacagtggtttgccattagggtattcattcagataatgttttcctactaggaattacaaactttaaacactttttaaatcttcaaaatatttaaaacaaatttaaagggcctgttaattcttatatttttctttactaatcattttggatttttttctttgaattattggcagggaatatacttatgtatggaagattactgctctgagtgaaataaaagttattagtgcgaggcaaacataactcatttgaggataaagtttgtgttggatatgtggttcctgatgcattttgacttgtctttttaaatgctttatctttttctttaaagatttatttcaataaaactaattgggaccacccgtatttcagtaggacctgggtagggattggaagtacttggcagggcagcagcaatcttgctgtgtttgatataacatgcatccttgggcaggttgcccttaaatcttacactgtggtgaagggatgttttttttgtaatgctgcagtagagttggagtacttagttctcttgttgtccagtatatctaataagtgtttttcatattatttccacgtaagggaaataaggtagtacttttctttttatatttctatgcttaaaattctctttcctagtcaaaaattgcccaaatctgtgtttgctttctgcttgctacatttgtctcccttacttttcttgagctaaagacaggctttttccaccggcatcatcactgctatcatcattaacagcgtaattatacaagcatatttaatgctgagtttaatttaatatgtaatacatatggtaattgtagggtaatacccacaacaactgtagtttcttacttggccaagagaatgcttatttaagtgttagacttccattctggcaaaatcttgccttatcagaagacattggaaagagggattccctttggtgtttggtcttctacttagaaaaacctattgcagttagtttatcttgtagtattcatctttgtattctgaagataaggtttgaattaaattgatacacacagaggggaaccgattttttttatccaatgtgaattataaatgagataatccacagttattcattgtggagttgttgagactatgaaagactcattgtctttgtattcagctcttaaatagtgtaactatatccccacctctgcttgctttctttccctcccctccaatgataaagaaaatgataaattttctgttgtgcattcaattcttattttaaataagactaagtataggcattgtacctgacattgctacgtttctaccagtgtttcaatttaaagtgctagtgtttaaaaacattttcaagggataaggccttctgtactttgcttatttgaagaatcagtggtaggagcagtgaagtaaattctatggagtacatttctaaaataccacatttctgaaatcataaataagtttattcaggttctaaccctttgctgtacacaagcagacagaaatgcatctgttacataaatgagaaaaagctattatgctgatggagcatgctttttaaatcctttaaaaacactcaccatataaacttgcatttgagcttgtgtgttcttttgttaatgtgtagagttctcctttctcgaaattgccagtgtgtacttggcttaactcaagaacagtttcttctggattccttatttgatttatttaacctaattatattctaatattgcaaatattaccataagtgggtaaaagtaaaattcctcttctgaaaaaaaaaaaaaaaaaaaaaa

SEQ ID NO: 526 - DNA, 3349 bp, human
acttcctgccgggctgcgggcgcctgagcgctcttcagcgtttgcgcggcggctgcgcgtctctctcggctcccgcttcctttgaccgcctcccccccccggcccggcggcgcccgcctcctccacggccactccgcctcttccctcccttcgtcccttcttcctctcccttttttccttcttccttcccctcctcgccgccaccgcccaggaccgccggccgggggacgagtccggagcagcagccagcagcagccaggtggagttttgctcttgtcgcccaggctggagtgcagtggcgtgatctcggctcactgcaacctccacctcccaggtcagcgattttcccacttcagcctcccgataagctgagattacaggagtttattaaccacttaacctctcagaactgaacaaagacaacattgttcctggaacgccctctttttaaaaaagaaagcataacccctactgtagaactaaatgcactgtgcatgaaacttggaaaaaaaccaatgtataagcctgttgacccttactctcggatgcagtccacctataactacaacatgagaggaggtgcttatcccccgaggtacttttacccatttccagttccacctttactttatcaagtggaactttctgtgggaggacagcaatttaatggcaaaggaaagacaagacaggctgcgaaacacgatgctgctgccaaagcgttgaggatcctgcagaatgagcccctgccagagaggctggaggtgaatggaagagaatccgaagaagaaaatctcaataaatctgaaataagtcaagtgtttgagattgcacttaaacggaacttgcctgtgaatttcgaggtggcccgggagagtggcccaccccacatgaagaactttgtgaccaaggtttcggttggggagtttgtgggggaaggtgaagggaaaagcaagaagatttcaaagaaaaatgccgccatagctgttcttgaggagctgaagaagttaccgcccctgcctgcagttgaacgagtaaagcctagaatcaaaaagaaaacaaaacccatagtcaagccacagacaagcccagaatatggccaggggatcaatccgattagccgactggcccagatccagcaggcaaaaaaggagaaggagccagagtacacgctcctcacagagcgaggcctcccgcgccgcagggagtttgtgatgcaggtgaaggttggaaaccacactgcagaaggaacgggcaccaacaagaaggtggccaagcgcaatgcagccgagaacatgctggagatccttggtttcaaagtcccgcagcggcagcccaccaaacccgcactcaagtcagaggagaagacacccataaagaaaccaggggatggaagaaaagtaaccttttttgaacctggctctggggatgaaaatgggactagtaataaagaggatgagttcaggatgccttatctaagtcatcagcagctgcctgctggaattcttcccatggtgcccgaggtcgcccaggctgtaggagttagtcaaggacatcacaccaaagattttaccagggcagctccgaatcctgccaaggccacggtaactgccatgatagcccgagagttgttgtatgggggcacctcgcccacagccgagaccattttaaagaataacatctcttcaggccacgtaccccatggacctctcacgagaccctctgagcaactggactatctttccagagtccagggattccaggttgaatacaaagacttccccaaaaacaacaagaacgaatttgtatctcttatcaattgctcctctcagccacctctgatcagccatggtatcggcaaggatgtggagtcctgccatgatatggctgcgctgaacatcttaaagttgctgtctgagttggaccaacaaagtacagagatgccaagaacaggaaacggaccaatgtctgtgtgtgggaggtgctgaaccttttctggccatgaaccattataaaatcccaacatatatactgaaaatactgaaactgctttgaaaatttggaatttctgatacctccagtgggccgagagacacggtgggtaaaggatgtgggcagcagcagggaagacaacagaaacacaaggaggcggctgtggccggctggactgtgctggggtttgttgtgatggccactcggtgacctggcggtccctacgcaatagcagctgcctgtggggaagaagggctgcccagccagctggttctcccgggacaccagcagatccacaccctgggcacctccgtgtttggtcttttttttcccctgtgtgaaagaagaaacggcacgaccccttctcaagctggctcactcagacacattgggacaaaccctggacagccatgccagagagaggcctttgaccggccccagagctaaaagcaccagagaaaatcaaatgcttcctactcagcgtgacccaacttttctagtgtgccacggccccaccacctcctgcagtacccacaccatcaccactgctttctcttccaacagtgatctgtattcttagtttcattattttcttttgattgatatgacactatataaaattttcatttgagaatttctcaattgtatctagttaaatagcacagtttggaaacttgtctgagactgactttatcaataatctaaccgacaaagatcatatccatgtgtatgtggttagacatttttatttcattgactaacccaggacagtttcagtgatgcaaattgtgtgccctctggttcagctgaaacagtcctggactttcaaaaaccttgaataagtctcccacagttgtataaattggacaatttaggaattttaaactttagatgatcatttggttccatttttatttcatttttatttttgttaatgcaaacaggacttaaatgaactttgatctctgttttaaagattattaaaaaacattgtgtatctatacatatggctcttgaggacttagctttcactacactacaggatatgatctccatgtagtccatataaacctgcagagtgattttccagagtgctcgatactgttaattacatctccattagggctgaaaagaatgacctacgtttctgtatacagctgtgttgcttttgatgttgtgttactgtacacagaagtgtgtgcactgaggctctgcgtgtggtccgtatggaaaacctggtagccctgcgagttaagtactgcttccattcattgtttacgctggaatttttctccccatggaatgtaagtaaaacttaagtgtttgtcatcaataaatggtaatactaaaaaaaaaaaaa

SEQ ID NO: 527 - DNA, 2088 bp, human
catgaaggaccgaacccaggagctccgcacggccaaggacagcgatgatgatgatgatgtcgctgtcaccgtggaccgagaccgcttcatggatgagttctttgagcaggtggaggagattcgaggcttcattgacaagatcgcagagaacgtggaggaggtgaagcggaagcacagtgccatcctggcatcccccaaccccgatgagaagacgaaggaggagctggaagaactcatgtccgacataaagaagacagcaaacaaagttcgttccaagttaaagagcatcgagcagtccatcgagcaagaggaaggcctgaaccgctcctccgctgacctgaggatccggaagacacagcactccacgctgtccagaaagtttgtggaggtcatgtcggagtacaacgccacgcagtccgactaccgcgagcgctgcaaaggccgcatccagaggcagctggagatcaccggcaggaccacgaccagtgaggagctggaggacatgctggagagtgggaaccccgccatctttgcctctgggatcatcatggactccagcatctcgaagcaggctctgagcgagattgagacgcggcacagtgagatcatcaagctggagaacagcatccgtgagctacacgacatgttcatggacatggccatgctcgtggagagccagggagagatgattgacaggatcgagtacaatgtggaacacgcggtagactatgtggagagggccgtgtctgacaccaagaaggccgtcaagtaccagagcaaggcgcgccggaagaaaatcatgatcatcatctgctgtgtgatcctgggcatcgtcatcgcctccactgttgggggcatcttcgcctagaagccacccaaactgccactccactccaggtgggccactccaaggaggccctggctgctgccacctggctgggctgccctcccaacccccgcctctggctcagagcaccctccctcccggcccccatgctcccttctctgccatgggccctccgtccccgccccgtgtcgtgtgcatgatctctgtgagtgtgcgtctgtacgggaagaggcagagggaggcagccagcggggcgtgatgcagtgtgcacagcgaggagcagacccaggcagggccgccagggtgacacaggccacgcttccttgccttcagtaactcggtgggcccaggttctgctcttccctggggaccctaacctcgcctccagctgacctgccctgtcctctccagctgtccccacaagcagagccctgaggggtggggaccagctggccacatggtgctgcttttcaggttaggggagaggtgaccctgagggacagcccagctctgagtctcagtcgctgatcactgccagggaggctcaggctgccatggctccaggctccctcccctgcctaggggcaaagtccatcgggtcctgggcctcagcttcccttcccacattcctccggccccaggagcaaccccttgggctaggtctgaccccaggtgtccctctggaaggggctggctggtgccctatttccagccaccccagcagctagggaggcaaagcaggctgcagtcagtccctcaagccagcgttgcatgtttgggatggtggctcctgttgtcttgcgctctgggaagtcagatgtcatttcaggcctgcagtctcatcctgcccttgccatcctcccatcgatgtgccacgtgggtgtcacgtgtcccagatgcagtattcggcagccagccggggagggctacctcctcctcctcaccaccttggggcttctcatgggaaatgtgcccccgccccaggaccctctcccttgtggacaggcagggagatgcatgcgagtgcatgcagcaggggatggggccgtgtccgtgtgccccaccctccctcggctttactcctgcccagtgactgtgaccactgtccgtgttgccttcttgaacagcgattccccccaaccccttcaccaaaggtcttggtacaaccagctgcccattttgtgaaatttttatgtagaataaacatttgtatctgtaaaaaaaaaaaaaaaaaagcgttc

SEQ ID NO: 528 - DNA, 4977 bp, human
cggggcccggggggcgggggcctgacggccgggccgggcggcggagctgcaagggacagaggcgcggcaggcgcgcggagccagcggagccagctgagcccgagcccagcccgcgcccgcgccgccatgcccctggccttctgcggcagcgagaaccactcggccgcctaccgggtggaccagggggtcctcaacaacggctgctttgtggacgcgctcaacgtggtgccgcacgtcttcctactcttcatcaccttccccatcctcttcattggatggggaagtcagagctccaaggtgcacatccaccacagcacatggcttcatttccccgggcacaacctgcggtggatcctgaccttcatgctgctcttcgtcctggtgtgtgagattgcagagggcatcctgtctgatggggtgaccgaatcccaccatctgcacctgtacatgccagccgggatggcgttcatggctgctgtcacctccgtggtctactatcacaacatcgagacttccaacttccccaagctgctaattgccctgctggtgtattggaccctggccttcatcaccaagaccatcaagtttgtcaagctcttggaccacgccatcggcttctcgcagctacgcttctgcctcacagggctgctggtgatcctctatgggatgctgctcctcgtggaggtcaatgtcatcagggtgaggagatacatcttcttcaagacaccgagggaggtgaagcctcccgaggacctgcaagacctgggggtacgcttcctgcagcccttcgtgaatctgccgtccaaaggcacctactggtggatgaacgccttcatcaagactgcccacaagaagcccatcgacttgcgagccatcgggaagctgcccatcgttatgagggccctcaccaactaccaacggctctgcgaggcctttgacgcccaggtgcggaaggacattcagggcactcaaggtgcccgggccatctggcaggcactcagccatgccttcgggaggcgcctggtcctcagcagcactttccgcatcttggccgacctgctgggcttcgccgggccactgtgcatctttgggatcgtggaccaccttgggaaggagaacgacgtcttccagcccaagacacaatttctcggggtttactttgtctcatcccaagagttccttgccaatgcctacgtcttagctgtgcttctgttccttgccctcctactgcaaaggacatttctgcaagcatcctactatgtggccattgaaactggaattaacttgagaggagcaatacagaccaagatttacaataaaattatgcacctgtccacctccaacctgtccatgggagaaatgactgctggacagatctgtaatctggttgccatcgacaccaatcagctcatgtggtttttcttcttgtgcccaaacctctgggctatgccagtacagatcattgtgggtgtgattctcctctactacatactcggagtcagtgccttaattggagcagctgtcatcattctactggctcctgtccagtacttcgtggccaccaagctgtctcaggcccagcggagcacactggagtattccaatgagcggctgaagcagaccaacgagatgctccgcggcatcaagctgctgaagctgtacgcctgggagaacatcttccgcacgcgggtggagacgacccgcaggaaggagatgaccagcctcagggcctttgccatctatacctccatctccattttcatgaacacggccatccccattgcagctgtcctcataactttcgtgggccatgtcagcttcttcaaagaggccgacttctcgccctccgtggcctttgcctccctctccctcttccatatcttggtcacaccgctgttcctgctgtccagtgtggtccgatctaccgtcaaagctctagtgagcgtgcaaaagctaagcgagttcctgtccagtgcagagatccgtgaggagcagtgtgccccccatgagcccacacctcagggcccagccagcaagtaccaggcggtgcccctcagggttgtgaaccgcaagcgtccagcccgggaggattgtcggggcctcaccggcccactgcagagcctggtccccagtgcagatggcgatgctgacaactgctgtgtccagatcatgggaggctacttcacgtggaccccagatggaatccccacactgtccaacatcaccattcgtatcccccgaggccagctgactatgatcgtggggcaggtgggctgcggcaagtcctcgctccttctagccgcactgggggagatgcagaaggtctcaggggctgtcttctggagcagccttcctgacagcgagataggagaggaccccagcccagagcgggagacagcgaccgacttggatatcaggaagagaggccccgtggcctatgcttcgcagaaaccatggctgctaaatgccactgtggaggagaacatcatctttgagagtcccttcaacaaacaacggtacaagatggtcattgaagcctgctctctgcagccagacatcgacatcctgccccatggagaccagacccagattggggaacggggcatcaacctgtctggtggtcaacgccagcgaatcagtgtggcccgagccctctaccagcacgccaacgttgtcttcttggatgaccccttctcagctctggatatccatctgagtgaccacttaatgcaggccggcatccttgagctgctccgggacgacaagaggacagtggtcttagtgacccacaagctacagtacctgccccatgcagactggatcattgccatgaaggatgggaccatccagagggagggtaccctcaaggacttccagaggtctgaatgccagctctttgagcactggaagaccctcatgaaccgacaggaccaagagctggagaaggagactgtcacagagagaaaagccacagagccaccccagggcctatctcgtgccatgtcctcgagggatggccttctgcaggatgaggaagaggaggaagaggaggcagctgagagcgaggaggatgacaacctgtcgtccatgctgcaccagcgtgctgagatcccatggcgagcctgcgccaagtacctgtcctccgccggcatcctgctcctgtcgttgctggtcttctcacagctgctcaagcacatggtcctggtggccatcgactactggctggccaagtggaccgacagcgccctgaccctgacccctgcagccaggaactgctccctcagccaggagtgcaccctcgaccagactgtctatgccatggtgttcacggtgctctgcagcctgggcattgtgctgtgcctcgtcacgtctgtcactgtggagtggacagggctgaaggtggccaagagactgcaccgcagcctgctaaaccggatcatcctagcccccatgaggttttttgagaccacgccccttgggagcatcctgaacagattttcatctgactgtaacaccatcgaccagcacatcccatccacgctggagtgcctgagccgctccaccctgctctgtgtctcagccctggccgtcatctcctatgtcacacctgtgttcctcgtggccctcttgcccctcgcagtcgtgtgctacttcatccagaagtacttccgggtggcgtccagggacctgcagcagctggatgacaccacccagcttccacttctctcacactttgccgaaaccgtagaaggactcaccaccatccgggccttcaggtatgaggcccggttccagcagaagcttctcgaatacacagactccaacaacattgcttccctcttcctcacagctgccaacagatggctggaagtccgaatggagtacatcggtgcatgtgtggtgctcatcgcagcggtgacctccatctccaactccctgcacagggagctctctgctggcctggtgggcctgggccttacctacgccctaatggtctccaactacctcaactggatggtgaggaacctggcagacatggagctccagctgggggctgtgaagcgcatccatgggctcctgaaaaccgaggcagagagctacgaggggctcctggcaccatcgctgatcccaaagaactggccagaccaagggaagatccagatccagaacctgagcgtgcgctacgacagctccctgaagccggtgctgaagcacgtcaatgccctcatctcccctggacagaagatcgggatctgcggccgcaccggcagtgggaagtcctccttctctcttgccttcttccgcatggtggacacgttcgaagggcacatcatcattgatggcattgacatccgcaaactgccgctgcacaccctgccgtcacgcctctccatcatcctgcaggaccccgtcctcttcagcggcaccatccgatttaacctggaccctgagaggaagtgctcagatagcacactgtgggaggccctggaaatcgcccagctgaagctggtggtgaaggcactgccaggaggcctcgatgccatcatcacagaaggcggggagaatttcagccagggacagaggcagctgttctgcctggcccgggccttcgtgaggaagaccagcatcttcatcatggacgaggccacggcttccattgacatggccacggaaaacatcctccaaaaggtggtgatgacagccttcgcagaccgcactgtggtcaccatcgcgcatcgagtgcacaccatcctgagtgcagacctggtgatcgtcctgaagcggggtgccatccttgagttcgataagccagagaagctgctcagccggaaggacagcgtcttcgcctccttcgtccgtgcagacaagtgacctgccagagcccaagtgccatcccacattcggaccctgcccatacccctgcctgggttttctaactgtaaatcacttgtaaataaatagatttgattatttcct

SEQ ID NO: 529 - DNA, 2140 bp, human
cagtctgcggtgggcagcggaggagtcgtgtcgtgcctgagagcgcagctgtgctcctgggcaccgcgcagtccgcccccgcggctcctggccagaccacccctaggaccccctgccccaagtcgcagccatgaactacctgcggcgccgcctgtcggacagcaactttatggccaatctgccaaatgggtacatgacagacctgcagcgtccgcagccgcccccaccgccgcccggtgcccacagccccggagccacgcccggtcccgggaccgccactgccgagaggtcctccggggtcgccccagcggcctctccggccgcccctagccccgggtcctcggggggcggtggcttcttctcgtcgctgtccaacgcggtcaagcagaccacggcggcggcagctgccaccttcagcgagcaggtgggcggcggctctgggggcgcaggccgcgggggagccgcctccagggtgctgctggtcatcgacgagccgcacaccgactgggcaaaatacttcaaagggaaaaagatccatggagaaattgacattaaagtagaacaggccgaattctctgatctcaaccttgtggcccatgccaatggtggattctctgtggatatggaagttcttcggaatggggtgaaggtcgtgcggtctctgaagccggattttgtgctgatccgccagcacgccttcagcatggcacgcaacggagactaccgcagtttggtcattgggctgcagtatgctggaatccccagtgttaactccttgcattctgtctacaacttctgtgacaagccctgggtgtttgcccagatggttcgactgcataagaaactggggacagaagaattccctctaattgatcagaccttctaccccaatcacaaagaaatgctcagcagtacaacgtaccccgtggttgtgaagatggggcacgcacactctgggatgggcaaggtcaaggttgacaaccagcatgacttccaggacatcgcaagtgtcgtggcactgaccaagacgtatgccactgccgagcccttcatcgatgccaaatatgacgtgcgtgtccagaagattgggcagaactacaaggcctacatgaggacgtcagtgtcagggaactggaagaccaatactggctctgcgatgctggagcaaattgccatgtctgacagatacaagctgtgggtggacacgtgctcagagatttttgggggactggacatctgcgcagtggaagcgctacatggcaaggacggaagggatcacatcattgaggtggtgggttcctccatgccgctcattggtgaccaccaggatgaagacaaacagctcatcgtagagctcgtggtcaacaagatggctcaggccctgccccggcagcgacagcgggatgcctcccctggcaggggctcccatggccagactccgtccccaggggccctgcccttgggccgccagacctcccagcagcccgcagggcccccggctcagcagcgacccccaccacagggcggccctccacagccgggtccaggcccccagcgccagggacccccattgcagcagcgcccgcccccgcagggccagcagcacctttcaggccttggacccccagctggcagccccctgccccagcgccttccaagtcccacctcagcgccccagcagcccgcgtcccaggccgcgccgccgacccagggtcaaggccgccaatcccggccagtggcgggaggccccggggcgcctccagcagcccgcccgcccgcctctccgtctccccagcgccaggcgggccccccacaggctacccgtcagacatccgtctctggcccggctccgccaaaggcctctggggccccaccgggcgggcagcagcgccagggcccgccccagaaacccccaggcccagccggccccacacgccaggccagccaggcgggtcccgtgccccgcactgggccacccaccacgcagcagcctcggcccagcggcccgggccccgctggacgtcccaaaccacagctggcccagaaacccagccaggacgtgccgccacccgccaccgccgctgcagggggacctccgcacccccagctcaaagccagccccgcccaggcccagccttag

SEQ ID NO: 530 - DNA, 2310 bp, human
acttccgtttttgctgggtaggcgacccggacggagggccggcgaggtgcggggtctggtgatgcgagctgcgcctctcggcaagatttcgcgctgcccatcccgggccctttcatcagtaatcggtagtggatcactctgccaagcggcaggaagaattaaggaaacgacaaggagacgctcggctctctcccgcttggctccttgcggcctcctcttcccttcgctccggcccggtgaaactgaacttataatcgtcactggattgtaagtacccgaggcgaagagagctcgctgagccctgattttttgagtgtctttgttccgggagagtttgtgagttgaaagtatctctgctgggctttctgggccgaaaaccgttccgggggagccgccatttgctttcctgttccctagctagctagctagctctctccgcgttgtccggcagcggcacctagaggttgggacttggcattgcatctgatttaatgaacttaagtctgtgaataagcctttgtgttaacgactggtattcggtcacagcatatttagagaaaagacttggagcttaaataaaaactaaggcaaaatagacgcttagctgctgatctacagagaacttcttgtaattaaaagatttcaattcatagcaaactggtgttttaaactattgcagtagctggaactttttagtgtaaccagcatttattggagaagtgaatcacaaggaaataaagatgagtaaaagcaaagatgatgctcctcacgaactggagagccagtttatcttacgtctgcctccagaatatgcctctactgtgagaagggcagtacagtctggtcatgtcaacctcaaggacagactgacaattgagttacatcctgatgggcgtcatggaatcgtcagagtggaccgtgttccattggcctcaaaattagtagacctgccctgtgttatggaaagcttgaaaaccattgataaaaaaactttttacaagacagctgatatctgtcagatgcttgtatccacagttgatggtgatctctatcctcctgtggaggagccagttgctagcactgatcctaaagcaagcaagaaaaaggataaggacaaagagaaaaagtttatctggaaccacggaattactctgcctctaaagaatgtcaggaagagaaggttccggaagacagcaaagaagaaatatattgaatctccagatgttgaaaaagaagtgaaacgattgctgagtacagatgctgaagctgttagtactcggtgggaaataattgccgaagatgaaacaaaggaggcagaaaatcaaggcctggatatctcttctccaggaatgtctggtcacaggcagggccatgactcattagaacatgatgagcttcgggagatattcaatgacctcagcagcagcagtgaggatgaagatgagacccagcatcaagatgaagaagatataaacatcattgacacggaggaagatctggagagacagctacaggacaagctaaatgaatcagatgaacagcaccaggaaaatgaaggaaccaatcagctggttatgggaattcagaagcagattgacaacatgaaaggcaagctccaagagacccaggacagggcaaaacgacaagaggatctcatcatgaaagtggaaaatctggctctcaagaacagatttcaggctgtactggatgagctcaaacaaaaggaagaccgagaaaaggagcaactcagctctttgcaagaggagctagaatcactcctagagaagtaaaaagaactgatatttaatttcagtcttcagactggtcagcattagaaaattcttggctttattgtactgggtattaagaccttgctcttcctagtccttttaatgctgtgtgttctgttaagttctttcatttgtttgtaattttgtttttcagcaaatttatattgttttgctaggtgttcatcctataagaagcaggattgtataggcagaaaaatgattgtaggaaagttgcaggattagcggaatgtatggttcaaccttaattatagcttcattgcaggactttactgtttctccattttctagaagctgctgttgctgctttgtgatgacgtgagatcaataagaagaacctagtctagagacaatgatgctagtttgcatatgttttcctatgcaataattgttttcccagttattcaaagcagctttctatatgtagagatgcaaattattaagttgtttccaatacaataaataaaagcatctgtttttcactttaaaaaaaaaaaaaaaa

SEQ ID NO: 531 - DNA, 5000 bp, human
gcccgggactatcccttcgcggtgtagcggcagccggagacctggctgaggaggcaaccgcgtagacacctccctgcttagaaaacaaacactgaaccagaccgatcccagttggagggttcgaaaatgttccagacagcctgtcgggaggggttgttgttgctgttggactaaatagctattcctgattggtcatgtatagggttttttaaggcgggtggggggaggagggggtagaggaaaggctccaaacacctgcaggttgggggcggaaagctgtttgcgattccctggactggttggtcggggacaggaggtaattcccagccattgacccccatttctctctctccctccctcttgccctgcctctttctctccacccctatctttcctggaaactcgctttgggcgcggcagatcgcccaggaccacaccgcagcgtaactgcaggcctctcagcgaaaaagggggaaagcaaagacccgggtgtgcatcctcttcctcggcttccgcccctttccggcggagtggagatcctattcagaggggccggtctctctaaatatgccccaggatgaccgagcggccgccgagcgaggcggctcgcagtgacccccagctagagggacgggacgcggccgaggccagcatggcccccccgcacctggtcctgctgaacggcgtcgccaaggagacgagccgcgcggccgcagcggagcccccagtcatcgaactgggcgcgcgcggaggcccggggggcggccctgccggtgggggcggcgccgcgagagacttaaagggccgcgacgcggcgacggccgaagcgcgccatcgggtgcccaccaccgagctgtgcagacctcccgggcccgccccggcccccgcgcccgcctcggttacagcggagctgcccggcgacggccgcatggtgcagctgagtcctcccgcgctggctgcccccgccgcccccggccgcgcgctgctctacagcctcagccagccgctggcctctctcggcagcgggttctttggggagccggatgccttccctatgttcaccaccaacaatcgagtgaagaggagaccttccccctatgagatggagattactgatggtccccacaccaaagttgtgcggcgtatcttcaccaacagccgggagcgatggcggcagcagaatgtgaacggggcctttgccgagctccgcaagctgatccccacacatcccccggacaagaagctcagcaagaatgagatcctccgcctggccatgaagtatatcaacttcttggccaagctgctcaatgaccaggaggaggagggcacccagcgggccaagactggcaaggaccctgtggtgggggctggtgggggtggaggtgggggagggggcggcgcgcccccagatgacctcctgcaagacgtgctttcccccaactccagctgcggcagctccctggatggggcagccagcccggacagctacacggaggagcccgcgcccaagcacacggcccgcagcctccatcctgccatgctgcctgccgccgatggagccggccctcggtgatgggtctgggccaccaggatcagccaggagggcgttcttaggctgctgggatggtgggcttcagggcaggtggggtgagaattgggcggctctgaagcaaggcggtggacttgaactttcctggatgtctgaactttgggaagcctttactgaccctggggctggcttttctgtttcctgtaccagtaggagatcagaaaaatggagcaaagtggtaggtactttttgtgaagacggcacggtcttccctcttccctcagtcccaaatccttcccaagtaagaggctggagttgtcactgcttttggcctggagtttgggatccctgtctttcctaagacctggggttgtcagctctcatctgaggcatccagcagtctctgccttgcctttagcccctcccaagctggctggggtggcctgtgtggccacttctgtccatatttataggtacccaatagctgcccatttcgtgagccccatcttcacccaggcctatgttgatccatccagcttgccagatgctgcagagtcacaagcctcgaggtgccttcttcagggcctggttgaagaagatgatcagtggacagtctgctctagatgagctgggccggagggtcaggaaacccagtcgcccttacttcttgccctggggatcaaagttctgctttctccccaatgagacttgccttcctaagcctgtggctgtggagaccatgtctgcagccctgagaaagccctgtcgggctttgtgtgaaggcagagaaagggacaatgatagtagagtgatatggagcaagagatattttgggcatgtgggcttcaactcctcgacatcactgttcatgctggcgagtgaatgccagtgtgctgatgggcgtacgctggtgctgagtagatgcgcagccccatctgtgcattctcctggatgcttagagggatttctttgctgtaagatgtctgtttgctgatggtctggtctatgttccgaattgagcacaaaacctgtcctatgaatgctttgcatttggaatttttgcttgacttcagttattggtggaatctttagcgctcaataggaccaggatccagcctcacttctagggtatgggaaatccaatcagagaccaggccctggctagacccaaacatatgcacattcacttagcagaaccttaaacacccctcagttgtgcagcttttggtcatcaagggtgcgtctgggaggttggtttaatgcaatagaagtgctcccctctgaaagttgtacatgaaatttttgtaaatcacatccttatccttcatcttttaaagaaataaccactgcaagtccttttgtaaagtgaagaatccttttgtagaatgaaccactgccccttcattgatttcctgtgtcaatccagatggtgggatgtggttttcttaaggtgaggcctgtctgtgacctgcatctaagcccatgggacaaattgcacagaagtcctgtatgtctgtcattgtacccttaagtcaccctagccctctccctctaggctctgccttcgaggtcagaggagagatagcctgtggccctgtcctgccatgcaagaactcatcactgtggctgtctggaaagcccccccttatagtttgggcttcagcctagtggcttgtcctcaccatgatggggccctaattcagccatgtacagacagagaatatgtctgctcctttccccttccttttaagtaaggtccaattctcgagcttggggcaacattgttcacctttgtagcactcaggctctccattcaatttcaggctccccagatcatgttttggtgaaaattagggttggttcctttccaacgtttggaagatcctgtgaggagccccatctgtctaaagatagagtcattgctgtaggatctaaggctgtttgcttcaccgtggattcgcttgagttaggaatgagaagtagccacagtatggatgggtggatgggttttatgagatggatcacatattttattaagaactcaaacttctggctccctcttctttcagacttgccatgtgactctggcttggcctatctcctagggctatggtgtggactgaatgggatcatgaaagtagacagttttgagaacgtaaagaactttttcttttccctcaatctcaatcctgcagtggggtttcgcagcctgagtccacgacctaggcagtaggccggtgtgcctgactgcccagcatttgggtaatttagattgtaaaccgctttggcctgagttattgagattgtcctcatttctccagattatctatttgtgtgtgtgtgtgtgtgtgtgtgagagacggtgtcttgttctgtcactcaggctggagtacagtggtgccatcattgctgtctgcagccttgaactctgggctcaagcaatcctctcacctcagcctcccgagtagggaggaccacaggtgtgagccaccacacctggctaatttttacttttttttttttttggtagagatggagtcttgctatattgcccaggctggtcttgaagtcctggcttcaggcaattctcctgcctttgcctccagaagcactgggatcacaggtgtcagccattgcacccagcccagattgtcttaatttctatcttgttccaaggccagggacagtaataagaatggaaaagagatatgggaacactggcagactgtgtaaaatgtaatgcaactacccaaaacaagcctggtaggaaagggcaagtctttaggtctttgtaagaactaaagaagatctgtaatttttattttcaccctctgtaccccatgaccttatccttcctctccttccttgttacccatgaaaaactggcaacattccaagaatagcatctgtacaaaggggaaagaacataaaggtaaaacaaaacaaaacaacattttgagaacaaagatgaccataaccactgaagggaatcacatcttttaagacaaattcatattcttttatttgttatggcagatgacaagatggtacaacctttattcttttccaaaataaaacaaagggcacagcatctgtagtcagccgacaactctttcggccttttgggggtgggtctggccgtacttgtgatttcgatggtacgtgaccctctgctgaagacttgccccctgcccgtgtacatagtgcattgtttctgtgggcgggcccagcactttccgtcaacgttgtactgtatgtgatgaattgcgttggtctctgcatttttctgcagaagaggagtaaccgctccaggtaccttgacctttgtacagcccagaggccaacactgtgggtgtgtgactctttagcaaaaaaaacccatgtggtgatgatgtgtctatatatgtgaggatgtatcgggaagatttctaaataaaagttttacaaaggg

SEQ ID NO: 532 - DNA, 1319 bp, human
cgcgcccgtcccgtcgccgccgccgccgccgcagacccctcggtcttgctatgtcgagctcacccgtgaagcgtcagaggatggagtccgcgctggaccagctcaagcagttcaccaccgtggtggccgacacgggcgacttccacgccatcgacgagtacaagccccaggatgctaccaccaacccgtccctgatcctggccgcagcacagatgcccgcttaccaggagctggtggaggaggcgattgcctatggccggaagctgggcgggtcacaagaggaccagattaaaaatgctattgataaactttttgtgttgtttggagcagaaatactaaagaagattccgggccgagtatccacagaagtagacgcaaggctctcctttgataaagatgcgatggtggccagagccaggcggctcatcgagctctacaaggaagctgggatcagcaaggaccgaattcttataaagctgtcatcaacctgggaaggaattcaggctggaaaggagctcgaggagcagcacggcatccactgcaacatgacgttactcttctccttcgcccaggctgtggcctgtgccgaggcgggtgtgaccctcatctccccatttgttgggcgcatccttgattggcatgtggcaaacaccgacaagaaatcctatgagcccctggaagaccctggggtaaagagtgtcactaaaatctacaactactacaagaagtttagctacaaaaccattgtcatgggcgcctccttccgcaacacgggcgagatcaaagcactggccggctgtgacttcctcaccatctcacccaagctcctgggagagctgctgcaggacaacgccaagctggtgcctgtgctctcagccaaggcggcccaagccagtgacctggaaaaaatccacctggatgagaagtctttccgttggttgcacaacgaggaccagatggctgtggagaagctctctgacgggatccgcaagtttgccgctgatgcagtgaagctggagcggatgctgacagaacgaatgttcaatgcagagaatggaaagtagcgcatccctgaggctggactccagatctgcaccgccggccagctgggatctgactgcacgtggcttctgatgaatcttgcgttttttacaaattggagcagggacagatcatagatttctgattttatgtaaaattttgcctaatacattaaagcagtcacttttcctgtgctgtttcaaaaaaaaaaaaaaaaaaaaaaaaaaaaaaaaaaaaaaaaaaaaaaaaaaaaaaaaaaaaaaaaaaaaaaaaaaaaa

SEQ ID NO: 533 - DNA, 2754 bp, human
attgcccctgtaacctgtcaaagaagagctaagggagctttcggggttggcttcttggaggctgctttctcctttacttggaaggcttcgctagtgatggacccatacatgattcagatgagcagcaaaggcaacctcccctcaattctggacgtgcatgtcaacgttggtgggagaagctctgtgccgggaaaaatgaaaggcagaaaggccaggtggtctgtgaggccctcagacatggccaagaaaactttcaaccccatccgagccattgtggacaacatgaaggtgaaaccaaatccaaacaaaaccatgatttccctgtccattggggaccctactgtgtttggaaacctgcctacagaccctgaagttacccaggcaatgaaagatgccctggactcgggcaaatataatggctatgccccatccatcggcttcctatccagtcgggaggagattgcttcttattaccactgtcctgaggcacccctagaagctaaggacgtcattctgacaagtggctgcagccaagctattgacctttgtttagctgtgttggccaacccagggcagaacatcctggttccaagacctggtttctctctctacaagactctggctgagtctatgggaattgaggtcaaactctacaatttgttgccagagaaatcttgggaaattgacctgaaacaactggaatatctaattgatgaaaagacagcttgtctcattgtcaataatccatcaaacccctgtgggtcagtgttcagcaaacgtcatcttcagaagattctggcagtggctgcacggcagtgtgtccccatcttagctgatgagatctatggagacatggtgttttcggattgcaaatatgaaccactggccaccctcagcaccgatgtccccatcctgtcctgtggagggctggccaagcgctggctggttcctggctggaggttgggctggatcctcattcatgaccgaagagacatttttggcaatgagatccgagatgggctggtgaagctgagtcagcgcattttgggaccctgtaccattgtccagggagctctgaaaagcatcctatgtcgcaccccgggagagttttaccacaacactctgagcttcctcaagtccaatgctgatctctgttatggggcgttggctgccatccctggactccggccagtccgcccttctggggctatgtacctcatggttggaattgagatggaacatttcccagaatttgagaacgatgtggagttcacggagcggttagttgctgagcagtctgtccactgcctcccagcaacgtgctttgagtacccgaatttcatccgagtggtcatcacagtccccgaggtgatgatgctggaggcgtgcagccggatccaggagttctgtgagcagcactaccattgtgctgaaggcagccaggaggagtgtgataaataggcctgcatccattctcctgaggatgtgtcccatctagggaaggctggactaggccttgcggctcctcagggactcaggtggccctactgggagaggggcctcaaatgcaccatgtcaagggttcaagattgttcctgcttttccccaagtacaaccacacccacactcagatcctcctcattcacatcgcagattactcccttgctctgcgctgctagagtgactcactaattcattaatctgcctccctctcgtaagatttccttcttttttttcttgaaagtaccaggtgaacaaagtttaccagaaagcagttgagacaagaaaataagagctcaggatgagggaaaagaaaaagattgagagaatttgtgcccccaaccatttcctcagactctaagaaagaacacgctctctccaggcaggtctgaagctcaactctcttattgcctcacttcaggtatacctcactttacacaatagaattataactggaaagaagttggggacacatgtatttggtgattacattttaaacacattaggaaaagttgctatttgaactttttattgatttttggggggagtaaagaattattttggatgcaaataaatatcctttaattgatcgacttgccaaatttagatttgtgtgcatcaggctttcttttttttctttttttagagaagttcaatataagcttttcttttctttgtttctttctttctttattttgagatggagtcttgctctgtcgcccatgctggagtgcagtggcgcgatctcggctcactgcaacctccacctcctgggttcaagcgattctcttgcctcaacctcccaagcagttgggactacaggcgtgagccaccatgcccggctaatttttgtatttttagtagagacagggtttcaccatgttagccaggctggtctcaaactcctgacctcaggcaatctgcccgcctgggtctcctaaagtactgggattacaggcgtgagccacctcgcccagcggcatcaggctttcttaaagtgagagcacgcctgtactagagcaagcaggaatcagagaccttccagaaatactactgtgtaagggccagaaatatcttcacttgtcattgttatataatcattattacttttgctgtaatgttaatattgatttattaatatatattatcttttcatacattttctaagaaacatttatattgataagatcttttattttgcaagggcataaattattgtttttctttttttttttttaataaatttcaccaagt

SEQ ID NO: 534 - DNA, 3952 bp, human
attttagacacaagcgagaggatcatggcggatggccccaggtgtaagcgcagaaagcaggcgaacccgcggcgcaataacgttacaaattataatactgtggtagaaacaaattcagattcagatgatgaagacaaactgcatattgtggaagaagaaagtgttacagatgcagctgactgtgaaggtgtaccagaggatgacctgccaacagaccagacagtgttaccagggaggagcagtgaaagagaagggaatgctaagaactgctgggaggatgacagaaaggaagggcaagaaatcctggggcctgaagctcaggcagatgaagcaggatgtacagtaaaagatgatgaatgcgagtcagatgcagaaaatgagcaaaaccatgatcctaatgttgaagagtttctacaacaacaagacactgctgtcatttttcctgaggcacctgaagaggaccagaggcagggcacaccagaagccagtggtcatgatgaaaatggaacaccagatgcattttcacaattactcacctgtccatattgtgatagaggctataaacgctttacctctctgaaagaacacattaaatatcgtcatgaaaagaatgaagataactttagttgctccctgtgcagttacacctttgcatacagaacccaacttgaacgtcacatgacatcacataaatcaggaagagatcaaagacatgtgacgcagtctgggtgtaatcgtaaattcaaatgcactgagtgtggaaaagctttcaaatacaaacatcacctaaaagagcacttaagaattcacagtggagagaagccatatgaatgcccaaactgcaagaaacgcttttcccattctggctcctatagctcacacataagcagtaagaaatgtatcagcttgatacctgtgaatgggcgaccaagaacaggactcaagacatctcagtgttcttcaccgtctctttcagcatcaccaggcagtcccacacgaccacagatacggcaaaagatagagaataaaccccttcaagaacaactttctgttaaccaaattaaaactgaacctgtggattatgaattcaaacccatagtggttgcttcaggaatcaactgttcaacccctttacaaaatggggttttcactggtggtggcccattacaggcaaccagttctcctcagggcatggtgcaagctgttgttctgccaacagttggtttggtgtctcccataagtatcaatttaagtgatattcagaatgtacttaaagtggcgatagatggtaatgtaataaggcaagtgttggagaataatcaagccaatcttgcatccaaagaacaagaaacaatcaatgcttcacccatacaacaaggtggccattctgttatttcagccatcagtcttcctttggttgatcaagatggaacaaccaaaattatcatcaactacagtcttgagcagcctagccaacttcaagttgttcctcaaaatttaaaaaaagaaaatccagtcgctacaaacagttgtaaaagtgaaaagttaccagaagatcttactgttaagtctgagaaggacaaaagctttgaagggggggtgaatgatagcacttgtcttctgtgtgatgattgtccaggagatattaatgcacttccagaattaaagcactatgacctaaagcagcctactcagcctcctccactccctgcagcagaagctgagaagcctgagtcctctgtttcatcagctactggagatggcaatttgtctcctagtcagccacctttaaagaacctcttgtctctcctaaaagcatattatgctttgaatgcacaaccaagtgcagaagagctctcaaaaattgctgattcagtaaacctaccactggatgtagtaaaaaagtggtttgaaaagatgcaagctggacagatttcagtgcagtcttctgaaccatcttctcctgaaccaggcaaagtaaatacccctgccaagaacaatgatcagcctcaatctgcaaatgcaaatgaaccccaggacagcacagtaaatctacaaagtcctttgaagatgactaactccccagttttaccagtgggatcaaccaccaatggttccagaagtagtacaccatccccatcacctctaaacctttcctcatccagaaatacacagggttacttgtacacagctgagggtgcacaagaagagccacaagtagaacctcttgatctttcactaccaaagcaacagggagaattattagaaaggtcaactatcactagtgtttaccagaacagtgtttattctgtccaggaagaacccttgaacttgtcttgcgcaaaaaaggagccacaaaaggacagttgtgttacagactcagaaccagttgtaaatgtaatcccaccaagtgccaaccccataaatatcgctatacctacagtcactgcccagttacccacaatcgtggccattgctgaccagaacagtgttccatgcttaagagcgctagctgccaataagcaaacgattctgattccccaggtggcatacacctactcaactacggtcagccctgcagtccaagaaccacccttgaaagtgatccagccaaatggaaatcaggatgaaagacaagatactagctcagaaggagtatcaaatgtagaggatcagaatgactctgattctacaccgcccaaaaagaaaatgcggaagacagaaaatggaatgtatgcttgtgatttgtgtgacaagatattccaaaagagtagttcattattgagacataaatatgaacacacaggtaaaagacctcatgagtgtggaatctgtaaaaaggcatttaaacacaaacatcatttgattgaacacatgcgattacattctggagaaaagccctatcaatgtgacaaatgtggaaagcgcttctcacactctgggtcttattctcaacacatgaatcatcgctactcctactgtaagagagaagcggaagaacgtgacagcacagagcaggaagaggcagggcctgaaatcctctcgaatgagcacgtgggtgccagggcgtctccctcacagggcgactcggacgagagagagagtttgacaagggaagaggatgaagacagtgaaaaagaggaagaggaggaggataaagagatggaagaattgcaggaagaaaaagaatgtgaaaaaccacaaggggatgaggaagaggaggaggaggaggaagaagtggaagaagaagaggtagaagaggcagagaatgagggagaagaagcaaaaactgaaggtctgatgaaggatgacagggctgaaagtcaagcaagcagcttaggacaaaaagtaggcgagagtagtgagcaagtgtctgaagaaaagacaaatgaagcctaatcgtttttctagaaggaaaataaattctaattgataatgaatttcgttcaatattatccttgcttttcatggaaacacagtaacctgtatgctgtgattcctgttcactactgtgtaaagtaaaaactaaaaaaatacaaaatacaaaacacacacacacacacacacacacacacacacacacacacacacaaaataaatccgggtgtgcctgaacctcagacctagtaatttttcatgcagttttcaaagttaggaacaagtttgtaacatgcagcagattagaaaaccttaatgactcagagagcaacaatacaagaggttaaaggaagctgattaattagatatgcatctggcattgttttatcttatcagtattatcactcttatgttggtttattcttaagctgtacaattgggagaaattttataattttttattggtaaacatatgctaaatccgcttcagtattttattatgttttttaaaatgtgagaacttctgcactacaaaattcccttcacagagaagtataatgtagttccggaattc

SEQ ID NO: 535 - DNA, 2019 bp, human
acgtgtatcgctgccgtcaagatggaggggcctttgtccgtgttcggtgaccgcagcactggggaaacgatccgctcccaaaacgttatggctgcagcttcgattgccaatattgtaaaaagttctcttggtccagttggcttggataaaatgttggtggatgatattggtgatgtaaccattactaacgatggtgcaaccatcctgaagttactggaggtagaacatcctgcagctaaagttctttgtgagctggctgatctgcaagacaaagaagttggagatggaactacttcagtggttattattgcagcagaactcctaaaaaatgcagatgaattagtcaaacagaaaattcatcccacatcagttattagtggctatcgacttgcttgcaaggaagcagtgcgttatatcaatgaaaacctaattgttaacacagatgaactgggaagagattgcctgattaatgctgctaagacatccatgtcttccaaaatcattgggataaatggtgatttctttgctaacatggtagtagatgctgtacttgctattaaatacacagacataagaggccagccacgctatccagtcaactctgttaatattttgaaagcccatgggagaagtcaaatggagagtatgctcatcagtggctatgcactcaactgtgtggtgggatcccagggcatgcccaagagaatcgtaaatgcaaaaattgcttgccttgacttcagcctgcaaaaaacaaaaatgaagcttggtgtacaggtggtcattacagaccctgaaaaactggaccaaattagacagagagaatcagatatcaccaaggagagaattcagaagatcctggcaactggtgccaatgttattctaaccactggtggaattgatgatatgtgtctgaagtattttgtggaggctggtgctatggcagttagaagagttttaaaaagggaccttaaacgcattgccaaagcttctggagcaactattctgtcaaccctggccaatttggaaggtgaagaaacttttgaagctgcaatgttgggacaggcagaagaagtggtacaggagagaatttgtgatgatgagctgatcttaatcaaaaatactaaggctcgtacgtctgcatcgattatcttacgtggggcaaatgatttcatgtgtgatgagatggagcgctctttacatgatgcactttgtgtagtgaagagagttttggagtcaaaatctgtggttcccggtgggggtgctgtagaagcagccctttccatataccttgaaaactatgcaaccagcatggggtctcgggaacagcttgcgattgcagagtttgcaagatcacttcttgttattcccaatacactagcagttaatgctgcccaggactccacagatctggttgcaaaattaagagcttttcataatgaggcccaggttaacccagaacgtaaaaatctaaaatggattggtcttgatttgagcaatggtaaacctcgagacaacaaacaagcaggggtgtttgaaccaaccatagttaaagttaagagtttgaaatttgcaacagaagctgcaatcaccattcttcgaattgatgatcttattaaattacatccagaaatccttcggattaaacatggaagttatgaagatgctgttcactctggagcccttaatgattgatctgatgttccttttatttataacaatgttaaatgcaatgtcttgtaccttgagttgagtattacacattaaagtaaagtacaagctgtaaacttgggtttttgtgatgtaggaaatggtttccatctgtactttggtcctctgatttcagatattgcaacctagtactttattagtttaaaaagaaattgaggttgttcaaagtttaagcaattcattctctctgaacacacattgctattcccatcccacccccaatgcacagggctgcaacaccacgacttctgcccattctctccagtgtgtgtaacagggtcacaagaattc

SEQ ID NO: 536 - DNA, 1039 bp, human
gctcgtccgctccctcccccgcgccgtgcacgtcttggttcgggccgggcataaaaggcttcgcggcccagggctcacttggcgctgagaacgcgggtccacgcgtgtgatcgtccgtgcgtctagcctttgcccacgcagctttcagtcatggcctccggtaacgcgcgcatcggaaagccagcccctgacttcaaggccacagcggtggttgatggcgccttcaaagaggtgaagctgtcggactacaaagggaagtacgtggtcctctttttctaccctctggacttcacttttgtgtgccccaccgagatcatcgcgttcagcaaccgtgcagaggacttccgcaagctgggctgtgaagtgctgggcgtctcggtggactctcagttcacccacctggcttggatcaacaccccccggaaagagggaggcttgggccccctgaacatccccctgcttgctgacgtgaccagacgcttgtctgaggattacggcgtgctgaaaacagatgagggcattgcctacaggggcctctttatcatcgatggcaagggtgtccttcgccagatcactgttaatgatttgcctgtgggacgctccgtggatgaggctctgcggctggtccaggccttccagtacacagacgagcatggggaagtttgtcccgctggctggaagcctggcagtgacacgattaagcccaacgtggatgacagcaaggaatatttctccaaacacaattaggctggctaacggatagtgagcttgtgcccctgcctaggtgcctgtgctgggtgtccacctgtgcccccacctgggtgccctatgctgacccaggaaaggccagacctgcccctccaaactccacagtatgggaccctggagggctaggccaaggccttctcatgcctccacctagaagctgaatagtgacgccctcccccaagcccacccagccgcacacaggcctagaggtaaccaataaagtattagggaaaggtgtgaaaaaaaaaaaaaaaaaaaaaaaaaaaaaaaa

SEQ ID NO: 537 - DNA, 2149 bp, human
gacctgcaaacacacacacacacacacacacacacacacacacacacacacatacacacgcaccagggcagccgagagacctccctcccgcccctcccatgcccgcctccctcccctcgccgccgccgccgccgccagcatctgggaccggccgattctgcacctccgtccggcgctgccctttgattcggatttccatcttgcattctccggctgatcgcgggacctggctcgtgcagaggaggggggccgatcgctatggagtatttcatggtgcccactcagaaggtgccctctttgcaacatttcaggaaaacagagaaagaagtgataggagggctctgtagccttgccaacattccactaacccccgagactcagcgggaccaggagcggcggattcggcgggagatcgccaacagcaacgagcggagacgcatgcagagcatcaacgcgggattccagtccctcaagaccctcatcccccacacagacggagagaagctcagcaaggcagccattctccagcagacagccgagtacatcttctccctggagcaggagaagaccaggctcttgcagcagaacacacagctcaagcgcttcatccaggagctgagcggctcgtcccccaagcgacggcgggcagaggacaaggacgaaggcataggctccccggacatctgggaggacgagaaggcggaggacctgcggcgggagatgattgagctgcggcagcagctggacaaggagcgctcggtgcgcatgatgctggaggagcaggtgcgctcgctggaggcccacatgtacccggaaaagctcaaggtgattgcgcagcaggtgcagctgcagcagcagcaggaacaggtgaggctgctgcaccaggagaagctggagcgggaacagcagcagctgcggacccagcttctgccccctccggcccccacccaccaccccacggtgatcgtgccagcaccgcctcctcctccctcccaccacatcaatgtcgtcaccatgggcccctcctcggtcatcaactctgtttccacatcccggcaaaatctggacaccatcgtgcaggcaatccagcacatcgagggcacccaggaaaagcaggagctggaggaggagcagcggcgagctgtcatcgtgaagcctgtccgcagctgcccggaggcccccacctctgacaccgcctccgactccgaggcctcagacagtgacgccatggaccagagccgggaggagccgtcgggggacggggagcttccctgactacccccccagccctcctctcccttctgggggctggagggagccggggcagccacagggagagacatgggcgaatgagtgagaaatttttacaaaattacgatgtcatttgggtctcttttatgacctctttttcaatactgtaaatcgacctttgaacgaagccactcaacccgaggtcccggggctggggtgtcgcagagctgtgggagcatcggcaccccagggcggggcctcggccccgggggctggaggaagctgacacggagatgcctggcctctctctgccaaaaagcattttttcctttaaatatgttttttaagaacagggaaaattaaacaaaaccccaggttatttcttccctgcccagagccagcctgggattgtcagccttcaatcccctttccttcctctttttgggttttcttctttctcctttaagcacttacatggttgggggtaagactaggctggggcattctgggggcccggaggtctccgttgcttcttggttggggtttgctgctgctgtgcccccctcccccttccccatctcggcactagaattcgccactctcccaccccccagcccccacctctgcctccaggtctcatcttccaccccaaaaatgtctgtctctctctttttgttttgtttgttgttggttttttatttctttttggtttgctttctgtttttgttttgtttttcttttttttctttcttttttttttttttacaattttgaggtcttcgtgttcaaggagaagctattatattttgttaagaaagtggggagaaaaaaaaccaagaggccaccgtgcctttgtaaagaaacaaaataaagtttgtactttgttttttaaaaaaaa

SEQ ID NO: 538 - DNA, 5487 bp, human
tctgtcgacttgccccagagctgatccttgtctttgtccacttctcagcgaggatggcacttcagggagcccttcccttactatcgcagagagagcaggccctccccagtcatgtccaacccagaactctgttttgttttcttcatagccctagcatcacagaaaatcaccctgtgcattcatggatgtccacgggggcaagggctttgtgttgcttaacccagcatcctgaaccgtgtttgttgaatgaatacagaaccccgtttgctctgggagagcacagaaaacagtcttctatcatatatcatagccagctgcaaacagcagatggcttcccatatcccagagagtaagaaccagagagagagagaaagagagagagtttgggtctttctcctctgtgcctgctctctccagagaaactggaggggtagcagttagcattcccccgctggttccaccaagcacagtcaaggtctctaggacatggccacccctcacctgtggaagcggtcctgctggggtgggtgggtgttagttggttctggtttgggtcagagacacccagtggcccaggtgggcgtggggccagggcgcagacgagaaggggcacgagggctccgctccgaggacccagcggcaagcaccggtcccgggcgcgccccagcccacccactcgcgtgcccacggcggcattattccctataaggatctgaacgatccgggggcggccccgccccgttaccccttgcccccggccccgccccctttttggagggccgatgaggtaatgcggctctgccattggtctgagggggcgggccccaacagcccgaggcggggtccccgggggcccagcgctatatcactcggccgcccaggcagcggcgcagagcgggcagcaggcaggcggcgggcgctcagacggcttctcctcctcctcttgctcctccagctcctgctccttcgccgggaggccgcccgccgagtcctgcgccagcgccgaggcagcctcgctgcgccccatcccgtcccgccgggcactcggagggcagcgcgccggaggccaaggttgccccgcacggcccggcgggcgagcgagctcgggctgcagcagccccgccggcggcgcgcacggcaactttggagaggcgagcagcagccccggcagcggcggcagcagcggcaatgaccccttggctcgggctcatcgtgctcctgggcagctggagcctgggggactggggcgccgaggcgtgcacatgctcgcccagccacccccaggacgccttctgcaactccgacatcgtgatccgggccaaggtggtggggaagaagctggtaaaggaggggcccttcggcacgctggtctacaccatcaagcagatgaagatgtaccgaggcttcaccaagatgccccatgtgcagtacatccacacggaagcttccgagagtctctgtggccttaagctggaggtcaacaagtaccagtacctgctgacaggtcgcgtctatgatggcaagatgtacacggggctgtgcaacttcgtggagaggtgggaccagctcaccctctcccagcgcaaggggctgaactatcggtatcacctgggttgtaactgcaagatcaagtcctgctactacctgccttgctttgtgacttccaagaacgagtgtctctggaccgacatgctctccaatttcggttaccctggctaccagtccaaacactacgcctgcatccggcagaagggcggctactgcagctggtaccgaggatgggcccccccggataaaagcatcatcaatgccacagacccctgagcgccagaccctgccccacctcacttccctcccttcccgctgagcttcccttggacactaactcttcccagatgatgacaatgaaattagtgcctgttttcttgcaaatttagcacttggaacatttaaagaaaggtctatgctgtcatatggggtttattgggaactatcctcctggccccaccctgccccttctttttggttttgacatcattcatttccacctgggaatttctggtgccatgccagaaagaatgaggaacctgtattcctcttcttcgtgataatataatctctatttttttaggaaaacaaaaatgaaaaactactccatttgaggattgtaattcccacccctcttgcttcttccccacctcaccatctcccagaccctcttccctttgcccttctcctccaatacataaaggacacagacaaggaacttgctgaaaggccaaccatttcaggatcagtcaaaggcagcaagcagatagactcaaggtgtgtgaaagatgttatacaccaggagctgccactgcatgtcccaaccagactgtgtctgtctgtgtctgcatgtaagagtgagggagggaaggaaggaactacaagagagtcggagatgatgcagcacacacacaattccccagcccagtgatgcttgtgttgaccagatgttcctgagtctggagcaagcacccaggccagaataacagagctttcttagttggtgaagacttaaacatctgcctgaggtcaggaggcaatttgcctgccttgtacaaaagctcaggtgaaagactgagatgaatgtctttcctctccctgcctcccaccagacttcctcctggaaaacgctttggtagatttggccaggagctttcttttatgtaaattggataaatacacacaccatacactatccacagatatagccaagtagatttgggtagaggatactatttccagaatagtgtttagctcacctagggggatatgtttgtatacacatttgcatatacccacatggggacataagctaatttttttacaggacacagaattctgttcaatgctgttaaatatgccaatagtttaatctcttctattttgttgtcgttgcttgtttgaagaaaatcatgacattccaagttgacatttttttttcattttaattaaaatttgaaattctgaacaccgtcagcaccctctcttccctatcatgggtcatctgacccctgtccgtctccttgtccctgcttcatgtttgggggcctttctttaactgccttcctggcttagctcagatggcagatgagagtgtagtcaagggcctgggcacaggagggagagctgcagagtgtcctgcctgccttggctggagggacacctctcctgggtgtggagacagcttggttccctttccctagctccctggtgggtgaatgccacctcctgagatcctcacctcttggaattaaaattgttggtcactggggaaagcctgagtttgcaaccagttgtagggtttctgttgtgtttttttttttttttttgaaataaaactataatataaattctcctattaaataaaattattttaagttttagtgtcaaaagtgagatgctgagagtaggtgataatgtatattttacagagtgggggttggcaggatggtgacattgaacatgattgctctctgtctcttttttcagcttatgggtatttatcttctattagtatttgtatcttcagttcattccactttaggaaacagagctgccaattgaaacagaagaagaaaaaaaaaaaaagcagcagacaacacactgtagagtcttgcacacacacaagtgcccaggcaaggtgcttggcagaaccgcagagtgggaagagagtaccggcatcgggtttccttgggatcaatttcattaccgtgtacctttcccattgtggtcatgccatttggcagggggagaatgggaggcttggccttctttgtgaggcagtgtgagcagaagctgatgccagcatgtcactggttttgaagggatgagcccagacttgatgttttgggattgtccttattttaacctcaaggtctcgcatggtggggcccctgaccaacctacacaagttccctcccacaagtggacatcagtgtcttctctgtgaggcatctggccattcgcactccctggtgtggtcagcctctctcacacaaggaggaacttgggtgaaggctgagtgtgaggcacctgaagtttccctgcggagtcgataaattagcagaaccacatccccatctgttaggccttggtgaggaggccctgggcaaagaagggtctttcgcaaagcgatgtcagagggcggttttgagctttctataagctatagctttgtttatttcacccgttcacttactgtataatttaaaatcatttatgtagctgagacacttctgtatttcaatcatatcatgaacattttattttgctaaatcttgtgtcatgtgtaggctgtaatatgtgtacattgtgtttaagagaaaaatgaaacccacatgccgccattttcctgaatcaaattctgcagtggaatggagaggaaaatacttctaggcaagcagctagactggtgaattgggggaaatagaaggaactagtaactgagactcctccagcctcctccctattggaatcccaatggctcctggagtaggaaaaaagtttaaactacattcatgttcttgttctgtgtcactcggccctgggtagtctaccatttacttcaccccaagtcctgctgcccatccagttgggaagccatgattttcctaagaatccagggccatgggagatacaattccaagttctcgcttcctcctttgggcatctcttctgcctcccaatcaaggaagctccatgctcaggctctcagctctcgggccagtgctctgctctgtccagggtaggtaatactgggagactcctgtcttttaccctcccctcgttccagacctgcctcatggtggcaacatggttcttgaacaattaaagaaacaaatgactttttggaatagccctgtctagggcaaactgtggcccccaggagacactacccttccatgccccagacctctgtcttgcatgtgacaattgacaatctggactaccccaagatggcacccaagtgtttggcttctggctacctaaggttaacatgtcactagagtatttttatgagagacaaacattataaaaatctgatggcaaaagcaaaacaaaatggaaagtaggggaggtggatgtgacaacaacttccaaattggctctttggaggcgagaggaaggggagaacttggagaatagtttttgctttgggggtagaggcttcttagattctcccagcatccgcctttccctttagccagtctgctgtcctgaaacccagaagtgatggagagaaaccaacaagagatctcgaaccctgtctagaaggaatgtatttgttgctaaatttcgtagcactgtttacagttttcctccatgttatttatgaattttatattccgtgaatgtatattgtcttgtaatgttgcataatgttcactttttatagtgtgtcctttattctaaacagtaaagtggttttatttctatcac

SEQ ID NO: 539 - DNA, 2038 bp, human
atggagagctaccacaagcctgaccagcagaagctgcaggccttgaaggacacggccaaccgcctacgtatcagctccatccaggccaccactgcggcgggctctggccaccccacgtcatgctgcagcgccgcagagatcatggctgtcctctttttccacaccatgcgctacaagtcccaggacccccggaatccgcacaatgaccgctttgtgctctccaagggccatgcagctcccatcctctacgcggtctgggctgaagctggtttcctggccgaggcggagctgctgaacctgaggaagatcagctccgacttggacgggcacccggtcccgaaacaagctttcaccgacgtggccactggctccctgggccagggcctcggggccgcttgtgggatggcctacaccggcaaatacttcgacaaggccagctaccgagtctattgcttgctgggagacggggagctgtcagagggctctgtatgggaggccatggccttcgccagcatctataagctggacaacctcgtggccattctagacatcaatcgcctgggccagagtgacccggcccctctgcagcaccagatggacatctaccagaagcggtgcgaggccttcggttggcatgccatcatcgtggatggacacagcgtggaggagctgtgcaaggcctttggccaggccaagcaccagccaacagccatcattgccaagaccttcaagggccgagggatcacgggggtagaagataaggagtcttggcatgggaagcccctccccaaaaacatggctgagcagatcatccaggagatctacagccagatccagagcaaaaagaagatcctggcaacccctccacaggaggacgcaccctcagtggacattgccaacatccgcatgcccagcctgcccagctacaaagttggggacaagatagccacccgcaaggcctacgggcaggcactggccaagctgggccatgccagtgaccgcatcatcgccctggatggggacaccaaaaattccaccttctcggagatcttcaaaaaggagcacccggaccgcttcatcgagtgctacattgctgagcagaacatggtgagcatcgcggtgggctgtgccacccgcaacaggacggtgcccttctgcagcacttttgcagccttcttcacgcgggcctttgaccagattcgcatggccgccatctccgagagcaacattaacctctgcggctcccactgcggcgtttccatcggggaagacgggccctcccagatggccctagaagatctggctatgtttcggtcagtccccacatcaactgtcttttacccaagtgatggcgttgctacagagaaggcagtggaactagccgccaatacaaagggtatctgcttcatccggaccagccgcccagaaaatgccatcatctataacaacaatgaggacttccaggtcggacaagccaaggtggtcctgaagagcaaggatgaccaggtgaccgttatcggggctggggtgaccctgcacgaggccttggccgctgccgaactgctgaagaaagaaaagatcaacatccgcgtgctggaccccttcaccatcaagcccctggacagaaaactcattctcgacagcgctcgtgccaccaagggcaggatcctcaccgtggaggaccattattatgaaggtggcattggtgaggctgtgtccagtgcagtagtgggcgagcctggcatcactgtcacccacctggcagttaaccgggtaccaagaagtgggaagccggctgagctgctgaagatgtttggtatcgacagggatgccattgcacaagctgtgaggggcctcatcaccaaggcctagggcgggtatgaagtgtggggcgggggtctatacattcctgagattctgggaaaggtgctcaaagatgtactgagaggaggggtaaatatatgttttgagaaaaatgaaaaaaaaaaaaaaaaaaaaaaaaaaaaaaaaaaaaaaaaaaaaaaaaaaaaaaaaaaaa

SEQ ID NO: 540 - DNA, 3283 bp, human
aggagaagagcaaagaaaagcagtccgtctggatttgtttgcccaggactggcgccgcgcacgcggatcgccgaggggagtgcggtcggagtcaccgcgcccccgcctccccgcccgggcagctgaggccgggggttggagcgctgcccccgcgcacagtccccgagcgcccgacgtctccgcgcaggttcttgaagcagctgggcctggggcgcccactaatgtggccctgagggccggagcccgcaccgacgggagcgggagccggagcagctgcgggcgccgagtggccggtgcgcccggcggagcgcgcgtgcgtggccagcgcgctccccgcttctgcttggctttccggcttaattttcctcggcgggattaaagttggaaattgaccggagaattgagttgccggggaacagagccccggccgccgccagagcgatgttcccgcagagccggcacccgacgccgcaccaggctgcaggccagcccttcaagttcactatcccggagtccctggaccggattaaagaggaattccagttcctgcaggcgcagtatcacagccttaaattggaatgtgagaaactggcaagtgaaaagacagaaatgcagaggcactatgtgatgtattatgaaatgtcatatggattaaacattgaaatgcacaaacagactgaaatcgccaagagattgaatacgatttgtgcacaagtcatcccatttctgtctcaggaacatcaacaacaggtggcccaggctgttgaacgtgccaaacaggtgaccatggcagagttgaatgccatcatcgggcagcagcagttgcaagctcagcatctttctcatggccacggacccccagttccccttacgcctcacccttcgggacttcagcctcctggaatcccgcccctcgggggcagtgccggccttcttgcgctgtctagtgctctgagtgggcagtctcacttggcaataaaagatgacaagaagcaccacgatgcagagcaccacagagacagagagccgggcacaagtaattccctcctggtcccagacagtctaagaggcacagataaacgcagaaatggacctgaattttccaatgacatcaagaaaaggaaggtggatgataaggactccagccactatgacagtgatggtgacaaaagcgatgacaacttagttgtggatgtgtctaatgaggacccttcttctccgcgagcaagccctgcccactcgccccgggaaaatggaatcgacaaaaatcgcctgctaaagaaggatgcttctagcagtccagcttccacggcctcctcggcaagttccacttctttgaaatccaaagaaatgagcttgcatgaaaaagccagcacgcctgttctgaaatccagcacaccaacgcctcggagcgacatgccaacgccgggcaccagcgccactccaggcctccgtccaggtctcggcaagcctccagccatagaccccctcgttaaccaagcggcagctggcttgaggacacccctggcagtgcccggcccatatcctgctccttttgggatggtcccccacgctggcatgaacggcgagctgaccagcccaggcgctgcctacgccagtttacacaacatgtcgccccagatgagcgccgcagccgccgcggccgccgtggtggcctacgggcgctcccccatggtggggtttgatcctccccctcacatgagagtacctaccattcctccaaacctggcaggaatccctggggggaaacctgcatactccttccacgttactgcagacggtcagatgcagcctgtcccttttccccccgacgccctcatcggacccggaatcccccggcatgctcgccagatcaacaccctcaaccacggggaggtggtgtgcgctgtgaccatcagcaaccccacgagacacgtgtacacaggcgggaagggctgcgtcaaggtctgggacatcagccaccctggcaataagagccctgtctcccagctcgactgtctgaacagagacaattatatccgttcctgtaaattgctacccgatggctgcactctcatagtgggaggggaagccagtactttgtccatttgggacctggcggctccaaccccgcgcatcaaggcggagctgacgtcctcggcccccgcctgctacgccctggccatcagccccgattccaaggtctgcttctcatgctgcagcgacggcaacatcgctgtgtgggatctgcacaaccagacactagtgaggcaattccagggccacacagacggagccagctgtattgacatttctaatgatggcaccaagctctggacgggtggtttggacaacacagtcaggtcctgggacctgcgcgaggggcggcagctgcagcagcacgacttcacctcccagatcttctccctggggtactgccccaccggggagtggctggcagtgggcatggagagcagcaatgtggaggtgctgcacgtgaacaagcctgacaagtaccagctgcacctgcatgagagctgcgtgctgtccctgaaatttgcttactgtggtaaatggtttgtgagtactggaaaagataacctcctcaatgcttggcggaccccctatggagccagcatattccagtccaaagagtcctcgtcagtgcttagctgtgacatctctgtggatgataagtacatagtcactggctcgggggacaagaaggctacagtctatgaagtcatctactgaaaacattatgtggtttaacgtttatagttgaattgggccaaaatgtttcgaatttatagaaatagaaaagttgtaactttaaaagagaaaaaaaattacaaacacctgtttccaaaccttgacagaaaactactttgagtctacaaagaggaggcgacaagtccatcagcagaaagtcacctgtctacatagaccaaatggagcaccaaggccaagcggacagaggggccatgggttgtaggattgaggaacggaatctgccgactcacatgacagcccattctttctttctgggtgatctggggatcacgccttgcccaagtgtgagattacctttctgttccttgcagttcacctcactttccgtcctttgtagagcagtggtgtctccaatgaacttgtttcctggttttgcatcttgtgaaatgtttttttgtatttttgttgaaggttaaacatttgtataaattgtaaatatatttggtttattacagtaaaggctttagtaccaataaaaaaaaaaaaaaaa

SEQ ID NO: 541 - DNA, 8187 bp, human
cccgagaagcggcggggcggcgggccggcgggcggggcgcagagccaggcagcgcaggtatagccaggctggagaaaagaagctgccaccatggttgcactttcactgaagatcagcattgggaatgtggtgaagacgatgcagtttgagccgtctaccatggtgtacgacgcctgccgcatcattcgtgagcggatcccagaggccccagctggtcctcccagcgactttgggctctttctgtcagatgatgaccccaaaaagggtatatggctggaggctgggaaagctttggactactacatgctccgaaatggggacactatggagtacaggaagaaacagagacccctgaagatccgtatgctggatggaactgtgaagacgatcatggtggatgactctaagactgtcactgacatgctcatgaccatctgtgcccgcattggcatcaccaatcatgatgaatattcattggttcgagagctgatggaagagaaaaaggaggaaataacagggaccttaagaaaggacaagacattgctgcgagatgaaaagaagatggagaaactaaagcagaaattgcacacagatgatgagttgaactggctggaccatggtcggacactgagggagcagggtgtagaggagcacgagacgctgctgctgcggaggaagttcttttactcagaccagaatgtggattcccgggaccctgtacagctgaacctcctgtatgtgcaggcacgagatgacatcctgaatggctcccaccctgtctcctttgacaaggcctgtgagtttgctggcttccaatgccagatccagtttgggccccacaatgagcagaagcacaaggctggcttccttgacctgaaggacttcctgcccaaggagtatgtgaagcagaagggagagcgtaagatcttccaggcacacaagaattgtgggcagatgagtgagattgaggccaaggtccgctacgtgaagctagcccgttctctcaagacttacggtgtctccttcttcctggtgaaggaaaaaatgaaagggaagaacaagctagtgcccaggcttctgggcatcaccaaggagtgtgtgatgcgagtggatgagaagaccaaggaagtgatccaggagtggaacctcaccaacatcaaacgctgggctgcgtctcccaaaagcttcaccctggattttggagattaccaagatggctattactcagtacagacaactgaaggggagcagattgcacagctcattgccggctacatcgatatcatcctgaagaagaaaaaaagcaaggatcactttgggctggaaggagatgaggagtctactatgctggaggactcagtgtcccccaaaaagtcaacagtcctgcagcagcaatacaaccgggtggggaaagtggagcatggctctgtggccctgcctgccatcatgcgctctggagcctctggtcctgagaatttccaggtgggcagcatgccccctgcccagcagcagattaccagcggccagatgcaccgaggacacatgcctcctctgacttcagcccagcaggcactcactggaaccattaactccagcatgcaggccgtgcaggctgcccaggccaccctggatgactttgacactctgccgcctcttggccaggatgctgcctctaaggcctggcgtaaaaacaagatggatgaatcaaagcatgagatccactctcaggtagatgccatcacagctggtactgcgtctgtggtgaacctgacagcaggggaccctgctgagacagactataccgcagtgggctgtgcagtcaccacaatctcctccaacctgacggagatgtcccgtggggtgaagctgctggctgccttgctggaggacgaaggcggcagtggtcggcccctgttgcaggcagcaaagggccttgcgggagcagtgtcagaactgctgcgcagtgcccaaccagccagtgctgagccccgtcagaacctgctgcaagcagctgggaacgtgggccaggccagtggggagctgttgcaacaaattggggaaagtgatactgacccccacttccaggatgcgctaatgcagctcgccaaagctgtggcaagtgctgcagctgccctggtcctcaaggccaagagtgtggcccagcggacagaggactcgggacttcagacccaagttattgctgcagcaacacagtgtgccctatccacttcccaactagtggcctgtactaaggtggtggcacctacaatcagctcacctgtctgccaagagcaactggtggaggctggacgactggtagccaaagccgtggagggctgtgtgtctgcctcccaggcagctacagaggatgggcaactgttgcgaggggtaggagcagcagccacagctgtcacccaggccctaaatgagctgctgcagcatgtgaaagcccatgccacaggggctgggcctgctggccgttatgaccaggctactgacaccatcctaaccgtcactgagaacatctttagctccatgggtgatgctggggagatggtgggacaggcccgcatcctggcccaagccacatctgacctggtcaatgccatcaaggctgatgctgagggggaaagtgatctggagaactcccgcaagctcttaagtgctgccaagatcctagctgatgccacagccaagatggtagaggctgccaagggagcagctgcccaccctgacagtgaggagcagcagcagcggctgcgggaggcagctgaggggctgcgcatggccaccaatgcagctgcgcagaatgccatcaagaaaaagctggtgcagcgcctggagcatgcagccaagcaggctgcagcctcagccacacagaccatcgctgcagctcagcacgcagcctctacccccaaagcctctgccggcccccagcccctgctggtgcagagctgcaaggcagtggcagagcagattccactgctggtgcagggcgtccgaggaagccaagcccagcctgacagccccagcgctcagcttgccctcattgctgccagccagagcttcctgcagccaggtgggaagatggtggcagctgcaaaggcctcagtgccaacgattcaggaccaggcttcagccatgcagctgagtcagtgtgccaagaacctgggcaccgcgctggctgaactccggacggctgcccagaaggctcaggaagcatgtggacctttggagatggattctgcactgagtgtggtacagaatctagagaaagatctacaggaagtgaaggcagcagctcgagatggcaagcttaaacccttacctggggagacaatggagaagtgtacccaggacctgggcaacagcaccaaagccgtgagctcagccatcgcccagctactgggagaggttgcccagggcaatgagaattatgcaggtattgcagctcgggatgtggcaggtgggctgcggtcactggcccaggccgctaggggagtcgctgcactgacgtcagatcctgcagtgcaggccattgtacttgatacggccagtgatgtgctggacaaggccagcagcctcattgaggaggcgaaaaaggcagctggccatccaggggaccctgagagccagcagcggcttgcccaggtggctaaagcagtgacccaggctctgaaccgctgtgtcagctgcctacctggccagcgcgatgtggataatgccctgagggcagttggagatgccagcaagcgactcctgagtgactcgcttcctcctagcactgggacatttcaagaagctcagagccggttgaatgaagctgctgctgggctgaatcaggcagccacagaactggtgcaggcctctcggggaacccctcaggacctggctcgagcctcaggccgatttggacaggacttcagcaccttcctggaagctggtgtggagatggcaggccaggctccgagccaggaggaccgagcccaagttgtgtccaacttgaagggcatctccatgtcttcaagcaaacttcttctggctgccaaggccctgtccacggaccctgctgcccctaacctcaagagtcagctggctgcagctgccagggcagtaactgacagcatcaatcagctcatcactatgtgcacccagcaggcacccggccagaaggagtgtgataacgccctgcgggaattggagacggtccgggaactcctggagaacccagtccagcccatcaatgacatgtcctactttggttgcctggacagtgtaatggagaactcaaaggtgctgggcgaggccatgactggcatctcccaaaatgccaagaacggaaacctgccagagtttggagatgccatttccacagcctcaaaggcactttgtggcttcaccgaggcagctgcacaggctgcatatctggttggtgtctctgaccccaatagccaagctggacagcaagggctagtggagcccacacagtttgcccgtgcaaaccaggcaattcagatggcctgccagagtttgggagagcctggctgtacccaggcccaggtgctctctgcagccaccattgtggctaaacacacctctgcactgtgtaacagctgtcgcctggcttctgcccgtaccaccaatcctactgccaagcgccagtttgtacagtcagccaaggaggtggccaacagcacagctaatcttgtcaagaccatcaaggcgctagatggggccttcacagaggagaaccgtgcccagtgccgagcagcaacagcccctctgctggaggctgtggacaatctgagtgcctttgcgtccaaccctgagttctccagcattcctgcccagatcagccctgagggtcgggctgccatggagcccattgtgatctctgccaagacaatgttagagagtgccgggggactcatccagacagcccgggccctcgcagtcaatccccgggaccccccgagctggtcggtgctggccggccactcccgtactgtctcagactccatcaagaagctaattacaagcatgagggacaaggctccagggcagctggagtgtgaaacggccattgcagctctgaacagttgtctacgggacctagaccaggcttccctcgctgcagtcagccagcagcttgctccccgtgagggaatctctcaagaggccttgcacactcagatgctcactgcagtccaagagatctcccatctcattgagccgctggccaatgctgcccgggctgaagcctcccagctgggacacaaggtgtcccagatggcgcagtactttgagccgctcaccctggctgcagtgggtgctgcctccaagaccctgagccacccgcagcagatggcactcctggaccagactaaaacattggcagagtctgccctgcagttgctatacactgccaaggaggctggtggtaacccaaagcaagcagctcacacccaggaagccctggaggaggctgtgcagatgatgaccgaggccgtagaggacctgacaacaaccctcaacgaggcagccagtgctgctggggtcgtgggtggcatggtggactccatcacccaggccatcaaccagctagatgaaggaccaatgggtgaaccagaaggttccttcgtggattaccaaacaactatggtgcggacagccaaggccattgcagtgaccgttcaggagatggttaccaagtcaaacaccagcccagaggagctgggccctcttgctaaccagctgaccagtgactatggccgtctggcctcggaggccaagcctgcagcggtggctgctgaaaatgaagagataggttcccatatcaaacaccgggtacaggagctgggccatggctgtgccgctctggtcaccaaggcaggcgccctgcagtgcagccccagtgatgcctacaccaagaaggagctcatagagtgtgcccggagagtctctgagaaggtctcccacgtcctggctgcgctccaggctgggaatcgtggcacccaggcctgcatcacagcagccagcgctgtgtctggtatcattgctgacctcgacaccaccatcatgttcgccactgctggcacgctcaatcgtgagggtactgaaactttcgctgaccaccgggagggcatcctgaagactgcgaaggtgctggtggaggacaccaaggtcctggtgcaaaacgcagctgggagccaggagaagttggcgcaggctgcccagtcctccgtggcgaccatcacccgcctcgctgatgtggtcaagctgggtgcagccagcctgggagctgaggaccctgagacccaggtggtactaatcaacgcagtgaaagatgtagccaaagccctgggagacctcatcagtgcaacgaaggctgcagctggcaaagttggagatgaccctgctgtgtggcagctaaagaactctgccaaggtgatggtgaccaatgtgacatcattgcttaagacagtaaaagccgtggaagatgaggccaccaaaggcactcgggccctggaggcaaccacagaacacatacggcaggagctggcggttttctgttccccagagccacctgccaagacctctaccccagaagacttcatccgaatgaccaagggtatcaccatggcaaccgccaaggccgttgctgctggcaattcctgtcgccaggaagatgtcattgccacagccaatctgagccgccgtgctattgcagatatgcttcgggcttgcaaggaagcagcttaccacccagaagtggcccctgatgtgcggcttcgagccctgcactatggccgggagtgtgccaatggctacctggaactgctggaccatgtactgctgaccctgcagaagccaagcccagaactgaagcagcagttgacaggacattcaaagcgtgtggctggttccgtcactgagctcatccaggctgctgaagccatgaagggaacagaatgggtagacccagaggaccccacagtcattgctgagaatgagctcctgggagctgcagccgccattgaggctgcagccaaaaagctagagcagctgaagccccgggccaaacccaaggaggcagatgagtccttgaactttgaggagcagatactagaagctgccaagtccattgcagcagccaccagtgcactggtaaaggctgcgtcggctgcccagagagaactagtggcccaagggaaggtgggtgccattccagccaatgcactggacgatgggcagtggtcccagggcctcatttctgctgcccggatggtggctgcggccaccaacaatctgtgtgaggcagccaatgcagctgtacaaggccatgccagccaggagaagctcatctcatcagccaagcaggtagctgcctccacagcccagctccttgtggcctgcaaggtcaaggctgaccaggactcggaggcaatgaaacgacttcaggctgctggcaacgcagtgaagcgagcctcagataatctggtgaaagcagcacagaaggctgcagcctttgaagagcaggagaatgagacagtggtggtgaaagagaagatggttggcggcattgcccagatcatcgcagcacaggaagaaatgcttcggaaggaacgagagctggaagaggcgcggaagaaactggcccagatccggcagcagcagtacaagtttctgccttcagagcttcgagatgagcactaaagaagcctcttctatttaatgcagacccggcccagagactgtgcgtgccactaccaaagccttctgggctgtcggggcccaacctgcccaaccccagcactccccaaagtgcctgccaaaccccagggcctggccccgcccagtcccgcagtacatcccctgtcccctccccaaccccaagtgccttcatgccctagggccccccaagtgcctgcccctccccagagtattaacgctccaagagtattattaacgctgctgtacctcgatctgaatctgccggggccccagcccactccaccctgccagcagcttccagccagtccccacagcctcatcagctctcttcaccgttttttgatactatcttcccccacccccagctacccataggggctgcagagttataagccccaaacaggtcatgctccaataaaaatgattctacctacaaaaaaaaaaaaaaaaaaa

SEQ ID NO: 542 - DNA, 2665 bp, human
agaaattcaggagacacagacaagttcttccacgatgtcgtacagacgagaactagagaaataccgtgacctggatgaagatgaaatccttggagccctaacagaggaagagctgaggaccctggaaaatgagctggatgagctggaccctgataatgcactgctgcctgcaggcctgaggcagaaggatcagaccaccaaggcgcccacgggcccctttaaaagagaggagctcttggatcacttggaaaagcaagcaaaggagtttaaggaccgagaagatctggtcccctacacaggggaaaaacgaggaaaggtctgggttcctaagcagaagccactggatcctgtgctggaaagtgtgacgctggaaccggagctggaggaagccttggcaaatgcttcagatgcagaactctgtgacattgcagcgatcctgggcatgcacacgctcatgagtaaccagcagtactaccaggccctgagcagcagctccatcatgaacaaggaggggctcaacagcgtgattaaacccacacaatacaagcctgtgcccgacgaagaaccaaattcaacagacgtagaggaaacgctggaacggataaagaacaacgacccaaaacttgaagaagttaacctcaataatatccggaatatccccatccccaccctcaaggcatatgcagaagccctgaaagaaaactcatatgtgaagaagttcagcatcgtggggacacggagtaatgaccccgtggcgtatgcccttgctgagatgctcaaggagaacaaggtgttgaagacactgaatgtggaatccaacttcatttctggagctgggattctgcgcctggtagaagccctcccatacaacacttctctggtggaaatgaaaattgacaaccagagccagcccctgggcaacaaagtggaaatggagattgtgagcatgttggaaaaaaacgcaacacttctcaaattcggctaccactttacccagcaaggaccccggcttcgggcatccaacgcaatgatgaacaacaatgaccttgtgaggaagaggaggcttgcggacctgactgggcccatcattcccaagtgccggagtggtgtctagtgtgtggcggtggagtccatgcctttgaactggatgtgttctattgatgacctgtgctctgcaggggaaaccagaaggcaaaatgctggcagcatgaaacccttttgtggttcagttctttatgcactaaggttttaggttgactagtggttgtagttgaaaattttataaaataccgttaatgtgaagtttttctttagtcacagaagttgaatctggttattatttaaaaactagaagcccccaaaccagcagatcttactgaagatgatgttccagcagcagcgacttagccccaggagcccagtttcaatggccttgctgtgtggtgtttcaagtgcatttaaaatgtgtgacacagaaacggcacactcttccacatgcttttgaagtattataaaacactttattacaaatttgtcttagctattagcaaataaaactgattatcattctttattaaccctccttggaattttgaaaacctcgattaaagttgccaaattgattactggatccagaacacaattttcccctcagaacagatagacagactgaagccactgaactctgccaggagtcaacatgagattccttttgctggatatgcagaaatgataggaaaaaaaccaatggtgaaatttcaagtttcaaaaaccaacctttcattaccaatcccaggcaacaaacatgtccctgagtgttctttaagaacatttgggatttatgtacaatttaatactggagttagaactttttccttattgaatgccaaccttatgatggatgtgaaaatctacggccaaatacttttgaaaacacctttctatattgcacagtgggcaaatggcttatgtgaggtaagacactagagggataaatttccagatcaacatggctatggtatttagtaatggcccagcttagagacttcagctactgatctcatcacttattagacaaattgctgctgaccttacgcctgtatattaagcctccgcaggatgccggacaatggtgaagaaactccagatatcaaggaattgggaaatcctggccaaaccaccccaagatgattacactgaaatgtagtattagtactgctgccagatctctttttaacatcatgtgcgtctcttgggatccagcaaaagtgttaagccacaatgcccttgtgccttttaatataccacagtgccagttaaactaatatttttgtttgttgcttttgggagttattttcattagtgatttcagcaaatctcatgataaaggacaaggtcaagaactccagagcactgagcagagaggctggtgatgaaaaggtgaaggcctgcgcactgaactgtaaggcagtgggcagtacagggtaactggaggcggggccagggcctcagcgctatggaagagtgtccactgaggctgcacatggcccaggagtggcaccatgttgcagggacaaccatccccatttggcttctccttaaaacacaattgcagctgcattctgcatcgctgaaaactgcaatataatattaaatctgttggtcg

SEQ ID NO: 543 - DNA, 3247 bp, human
gaggagctctgcgcggcgcggcgggcgatccgagccgggacgggctgcaggcgggggtgctgcagaggacacgaggcggcgggctggagacatggaccgcggcgagcaaggtctgctgagaacagacccagtccctgaggaaggagaagatgttgctgccacgatcagtgccacagagaccctctcggaagaggagcaggaagagctaagaagagaacttgcaaaggtagaagaagaaatccagactctgtctcaagtgttagcagcaaaagagaagcatctagcagagatcaagcggaaacttggaatcaattctctacaggaactaaaacagaacattgccaaagggtggcaagacgtgacagcaacatctgcttacaagaagacatctgaaaccttatcccaggctggacagaaggcctcagctgctttttcgtctgttggctcagtcatcaccaaaaagctggaagatgtaaaaaactccccaacttttaaatcatttgaagaaaaggtcgaaaacttaaagtctaaagtagggggaaccaagcctgctggtggtgattttggagaagtcttgaattcggctgcaaatgctagtgccaccaccacggagcctcttccagaaaagacacaggagagcctgtgagattcctacctttgttctgctacccactgccagatgctgcaagcgaggtccaagcacatcttgtcaacatgcattgccatgaatttctaccagatgtgcttttatttagctttacatattcctttgaccaaatagtttgtgggttaaacaaaatgaaaatatcttcacctctattcttgggaaacaccctttagtgtacatttatgttcctttatttaggaaacaccattataaaaacacttatagtaaatggggacattcactataatgatctaagaagctacagattgtcatagttgttttcctgctttacaaaattgctccagatctggaatgccagtttgacctttgtcttctataatatttcctttttttcccctctttgaatctctgtatatttgattcttaactaaaattgttctcttaaatattctgaatcctggtaattaaaagtttgggtgtattttctttacctccaaggaaagaactactagctacaaaaaatattttggaataagcattgttttggtataaggtacatattttggttgaagacaccagactgaagtaaacagctgtgcatccaatttattatagttttgtaagtaacaatatgtaatcaaacttctaggtgacttgagagtggaacctcctatatcattatttagcaccgtttgtgacagtaaccatttcagtgtattgtttattataccacttatatcaacttatttttcaccaggttaaaattttaatttctacaaaataacattctgaatcaagcacactgtatgttcagtaggttgaactatgaacactgtcatcaatgttcagttcaaaagcctgaaagtttagatctagaagctggtaaaaatgacaatatcaatcacattaggggaaccattgttgtcttcacttaatccatttagcactatttaaaataagcacaccaagttatatgactaatataacttgaaaattttttatactgaggggttggtgataactcttgaggatgtaatgcattaataaaaatcaactcatcattttctacttgttttcaatgtgttggaaactgtaaaatgatactgtagaacctgtctcctactttgaaaactgaatgtcagggctgagtgaatcaaagtgtctagacatatttgcatagaggccaaggtattctattctaataactgcttactcaacactaccaccttttccttatactgtatatgattatggcctacaatgttgtatttgttatttattaaattgtgattgttttattattgtttatgccaaatgttaactgccaagcttggagtgacctaaagcattttttaaaagcatggctagatttacttcagtataaattatcttatgaaaaccaaattttaaaagccacaggtgttgattgttataaaataacatgctgccattcttgattgctagagtttttgttagtactttggatgcaattaaaactatgtgctatcacatgtgaaaagcttaataaattccatctatcagtagtataggtctcaatatttattatgagaccagtggtctggaaacagcttgttgtaccgaatcaactggagtctatgcttaaaaaaaaaaatttttttttaaccatccttaaattattgcttaatggtatcatattaacatattctaaataagggctttaaggcacaggctgttgaagcattttctcagaggagtggatctgtagaagtctgtctttctatagaaatattgtgcttactcaagtgttaaattattttttctatgaactagtctacttcttaaaattcaaacatattcttttgatcacattgtttcttgagcatcctgccctgctactaacttttcaacaaggcaaaatggagtaaagtggcaatttctttagatgagtgaaataccctcaagtctcttttctgcccaaaaagggaaaagtgatagaaatgggggtggcaagtggggtgagtggatgaaggtgggtattgggggtggctgtgaaagaaaataatggagaatcacttttctagacatctacctatacttaatctaagaaacaaagtaatctactgtaaagtactctgccccttgaaagaagtattaaaaagagtgaggatggatttagaaaaaaacatgaatttagaaatattcaaaatggtttttgtggcagattcaatattatgaattcacagatatttaaagaatgagaaacatagtaattagtagaaatgccagaaacagttcctggttcctcttgtgtttgacactaagaaaatagcaagagtgtgaaatctcagatacttatgaaatctcacagatgtaaggactcaagtgtagaagaaaatatccccttcttacaaaaagaaatgtcaatttatggagtttgtgggaaatagggcaagaattcttatgcttatgagagccaagtagtcagtggaagagagtagagctcaaaactggattatcaccttagcaacttagaatagtttgaaatagaaaaaaagtatttaatttggatctggatctgttaagatatgcacagtctattttttgtatagtattggaaaataaaaatgctataatttg

SEQ ID NO: 544 - DNA, 1281 bp, human
cactcaggcagcagccccttctttcttgccccagtctccagttctccagtgttcacaggtgagcctaccaacagccactgctcatgatggaggccatcaagaaaaagatgcagatgctgaagttagacaaggagaatgctctggatcgggcagagcaagctgaagctgagcagaagcaggcagaagaaagaagtaaacagctggaggatgagctggcagccatgcagaagaagctgaaagggacagaggatgagctggaccgtgctcaggagcgcctggccactgccctgcaaaagctggaagaagctgaaaaagctgctgatgagagtgagagaggtatgaaggttattgaaaaccgggccttaaaagatgaagaaaagatggaactccaggaaatccaactcaaagaagctaagcacattgcagaagaggcagataggaagtatgaagaggtggctcgtaagttggtgatcattgaaggagacttggaacgcacagaggaacgagctgagctggcagagtctaagtgttctgagctggaggaggagctgaagaatgtcaccaacaacctcaagtctcttgaggctcaggcggagaagtactctcaaaaagaagataaatatgaggaagaaatcaagattcttactgataaactcaaggaggcagagacccgtgctgagtttgctgagagatcggtagccaagctagaaaagacaattgatgacctggaagatgagctctatgcccagaaactgaagtacaaggccattagcgaggagctggaccacgccctcaatgacatgacctctatataattatcaccgtttctgctctgttctggatctgccccctttactcctcggggaacccaaggccccactctcgctctggattccatttgggtcagcctggctggtccccaaggcattaggatgggggagcaaaaagcaacttatgtattttcttccacccccaccccaaattaaaatgttaagctgctggaagcctcatgccaccctgcatttgtgtcattgacaaagctgttgctgtccctaagaaggagccttgggggtgtgatgtggggaagagctattgtaggctccccctcctctgacttatgtaatcaaagccacttttgtgtgtgtctattttttcttgacatttaaactcagctgatctgattctaccagagtgatggatttagtacaggttactcaggatagtaattttagttatactcctcaagctgaacaagattaaattccttatttccaggttctt

SEQ ID NO: 545 - DNA, 2780 bp, human
gtgggcggaccgcgcggctggaggtgtgaggatccgaacccaggggtggggggtggaggcggctcctgcgatcgaaggggacttgagactcaccggccgcacgccatgagggccctgtgggtgctgggcctctgctgcgtcctgctgaccttcgggtcggtcagagctgacgatgaagttgatgtggatggtacagtagaagaggatctgggtaaaagtagagaaggatcaaggacggatgatgaagtagtacagagagaggaagaagctattcagttggatggattaaatgcatcacaaataagagaacttagagagaagtcggaaaagtttgccttccaagccgaagttaacagaatgatgaaacttatcatcaattcattgtataaaaataaagagattttcctgagagaactgatttcaaatgcttctgatgctttagataagataaggctaatatcactgactgatgaaaatgctctttctggaaatgaggaactaacagtcaaaattaagtgtgataaggagaagaacctgctgcatgtcacagacaccggtgtaggaatgaccagagaagagttggttaaaaaccttggtaccatagccaaatctgggacaagcgagtttttaaacaaaatgactgaagcacaggaagatggccagtcaacttctgaattgattggccagtttggtgtcggtttctattccgccttccttgtagcagataaggttattgtcacttcaaaacacaacaacgatacccagcacatctgggagtctgactccaatgaattttctgtaattgctgacccaagaggaaacactctaggacggggaacgacaattacccttgtcttaaaagaagaagcatctgattaccttgaattggatacaattaaaaatctcgtcaaaaaatattcacagttcataaactttcctatttatgtatggagcagcaagactgaaactgttgaggagcccatggaggaagaagaagcagccaaagaagagaaagaagaatctgatgatgaagctgcagtagaggaagaagaagaagaaaagaaaccaaagactaaaaaagttgaaaaaactgtctgggactgggaacttatgaatgatatcaaaccaatatggcagagaccatcaaaagaagtagaagaagatgaatacaaagctttctacaaatcattttcaaaggaaagtgatgaccccatggcttatattcactttactgctgaaggggaagttaccttcaaatcaattttatttgtacccacatctgctccacgtggtctgtttgacgaatatggatctaaaaagagcgattacattaagctctatgtgcgccgtgtattcatcacagacgacttccatgatatgatgcctaaatacctcaattttgtcaagggtgtggtggactcagatgatctccccttgaatgtttcccgcgagactcttcagcaacataaactgcttaaggtgattaggaagaagcttgttcgtaaaacgctggacatgatcaagaagattgctgatgataaatacaatgatactttttggaaagaatttggtaccaacatcaagcttggtgtgattgaagaccactcgaatcgaacacgtcttgctaaacttcttaggttccagtcttctcatcatccaactgacattactagcctagaccagtatgtggaaagaatgaaggaaaaacaagacaaaatctacttcatggctgggtccagcagaaaagaggctgaatcttctccatttgttgagcgacttctgaaaaagggctatgaagttatttacctcacagaacctgtggatgaatactgtattcaggcccttcccgaatttgatgggaagaggttccagaatgttgccaaggaaggagtgaagttcgatgaaagtgagaaaactaaggagagtcgtgaagcagttgagaaagaatttgagcctctgctgaattggatgaaagataaagcccttaaggacaagattgaaaaggctgtggtgtctcagcgcctgacagaatctccgtgtgctttggtggccagccagtacggatggtctggcaacatggagagaatcatgaaagcacaagcgtaccaaacgggcaaggacatctctacaaattactatgcgagtcagaagaaaacatttgaaattaatcccagacacccgctgatcagagacatgcttcgacgaattaaggaagatgaagatgataaaacagttttggatcttgctgtggttttgtttgaaacagcaacgcttcggtcagggtatcttttaccagacactaaagcatatggagatagaatagaaagaatgcttcgcctcagtttgaacattgaccctgatgcaaaggtggaagaagagcccgaagaagaacctgaagagacagcagaagacacaacagaagacacagagcaagacgaagatgaagaaatggatgtgggaacagatgaagaagaagaaacagcaaaggaatctacagctgaaaaagatgaattgtaaattatactctcaccatttggatcctgtgtggagagggaatgtgaaatttacatcatttctttttgggagagacttgttttggatgccccctaatccccttctcccctgcactgtaaaatgtgggattatgggtcacaggaaaaagtgggttttttagttgaattttttttaacattcctcatgaatgtaaatttgtactatttaactgactattcttgatgtaaaatcttgtcatgtgtataaaaataaaaaagatcccaaat

SEQ ID NO: 546 - DNA, 3408 bp, human
cctttggacgcgcgcctcggttccgaacgcagcggacggcgcctcaggcagcgcggcggacagcccgtcctccggcgcgccgcgagcctcggaggaccctagcgacggtcgtggcgtaagaccggggggacgcggcggtagcggcggccgttgcgattgattgcgctggttgcctgcggcgtccacttccttggccgcccttgctacactggctgattgttgtgcagccggcgccatgtctgtgagcgagatcttcgtggagctgcagggctttttggctgccgagcaggacatccgagaggaaatcagaaaagttgtacagagtttagaacaaacagctcgagagattttaactctactgcaaggggtccatcagggtgctgggtttcaggacattccaaagaggtgtttgaaagctcgagaacattttggtacagtaaaaacacatctaacatctttgaagaccaaatttcctgctgaacagtattacagatttcatgagcactggaggtttgtgttgcagcgcttggtcttcttggcagcatttgttgtgtatttggaaacagaaacactagtgactcgagaagcagttacagaaattcttggcattgagccagatcgggagaaaggatttcatctggatgtagaagattatctctcaggagttctaattcttgccagtgaactgtcgaggctgtctgtcaacagcgtgactgctggagactactcccgacccctccacatctccaccttcatcaatgagctggattccggttttcgccttctcaacctgaaaaatgactccctgaggaagcgctacgacggattgaaatatgacgtgaagaaagtagaggaagtggtctatgatctctccatccggggctttaataaggagacggcagcagcttgtgttgaaaaataggaggctctccttgctcctggccttgctgacctcagcggttgccaggaaggggtgagcacagagtgcctcttacggtagttaggatgctcagttgctaaacactgcgctttattttcttaaccagttgtggtgtgagtatcagaattgaaacacttttttgggggtaaaaaatatagcctttacatggacagaattttttttgttgtttcagtgaatatgcctgtaattcagtgtatttcagttccgtcagaaagtgtaaatgttagtttcttggtaaagtccttttcttgcttaccttgactgttgatgtactgattgagaagttcattgtctcgtttgtgattcttccagatgtgatgcttgatattttctatatgcgagttagccatccacacccaggcatagcctggatacagtataaaaatagataattaaaaagatggttgccaagcaaggaaaacttattttatattttcccttccttattttaagcattgtgagtaaatcagatgttgaattcttttgccaagggaattatagctgcaggttctctctcactgccatcaaactgtaaaagattaaactgcgaagtcaagctcaacagattattttggaaagtttttgtattaagggatttagtaacatcattttgttttccaccaggcagggagtagggcttagtgttttaaaacacctctgctttctgatgttgccttaatattctgctattgcagcaattaaaaattgtcttcatgtacatttggaactaacacgtgatgtgatatattcctaaactatgaaacctttttcctagtagtcagctagatcatttgttctgggagtataaagccacccacgtaagttaataagcaaaatcctgactattatgttgttagagaaaaatgctttgctttgtctggaagaaagataaaatagtgaattataaataagtcaggccgggcgtggtggctcacacctgtaatcccagcacactgggaggccgaggcagggggactgcttgagctcaggagttcgagaccagcctgggcaacaaagtgagactccatctctatataaaaacaaaaaccacgaaagcacacacaaaataaatcagtgggatttggtaatgtgttttagagtaagaaatttcaggttgttggtgactatcccaacagtcatgttttaaatgtacagtttggggcaagtcatgtaaatactgttggtggtcttccccacacgccccaattttcaggtagtactaagagtatgtgccaggaaactcttgctattgaattgagatgattaaaatggtgacttaatccgtagttattttgcacccactgaaaggaaagtgctttccagaataatatgaagtatctaaaagtgtcaccttttcttgcctgatcaacaatttgggcttcctgtttgtacaaggggccatttggcatacctttcacagcttttatcaggccaagttaaaggctgactacattttttcatcatgaggaaagcagttgaaatgaggcatgagttactgtgcattgggattttagaacaattttcttgtgacagctctttttgtgaagttaggttcttaaaagtgcccatgatggtcacttaaaatgtgcagtaatagcactgccaggatcaagcatgaaaggcttttaaattagatcatcccacagacaatacgtttgataatagttttttcttttaacctctttaagtattgattctgcttgagaatattgaagtacttgccagaagttgtggatttcagttttaacaaatgctattaaagtggagaagcacactctggtcttggaattccatttgaggatttagaagtgtcatgtttataactattcagttgtgtttgttgctggcttgttgtaaagcaataaaatttttttggtctttttgtaagtgagtgtgctgctgtaagaaatctcccatgtgcataacaaattctgaatattttttgaggctaaagaagaccggggtgacaagcagatactgctgtgtaatggttacactaaccaaaagacaccagccactcagagttctatactgtaaagcgcagataacatttgtgtgttataccttgattggggaattaaaagtcatttaactgaagatgttgagaaacctgggctctggttttagtataccggaattacttttttccaattttagaaaatcaagcaggttagagaaaatagagatgaattaggggacactgtcttatggattcatttataagaagagaaccagccatatacacttggggagatttgccacatcttaaacttgaataatagtatgagtaatgcttaagggagtttaatagagaaggaaagctttggcagtgttttgagaacttaagtggctaaagagatgagacaaacatgcaggtcgctactggcatagtttcataattgtgtactcggaaattaaagtttgcttgtttcttggtctggattaaa

SEQ ID NO: 547 - DNA, 1408 bp, human
ggttgaggtcaagtagtagcgttgggctgcggcagcggaggagctcaacatgcgtgagtgtatctctatccacgtggggcaggcaggagtccagatcggcaatgcctgctgggaactgtactgcctggaacatggaattcagcccgatggtcagatgccaagtgataaaaccattggtggtggggacgactccttcaacacgttcttcagtgagactggagctggcaagcacgtgcccagagcagtgtttgtggacctggagcccactgtggtcgatgaagtgcgcacaggaacctataggcagctcttccacccagagcagctgatcaccgggaaggaagatgcggccaataattacgccagaggccattacaccatcggcaaggagatcgtcgacctggtcctggaccggatccgcaaactggcggatctgtgcacgggactgcagggcttcctcatcttccacagttttgggggtggcactggctctgggttcgcatctctgctcatggagcggctctcagtggattacggcaagaagtccaagctagaatttgccatttacccagccccccaggtctccacggccgtggtggagccctacaactccatcctgaccacccacacgaccctggaacattctgactgtgccttcatggtcgacaatgaagccatctatgacatatgtcggcgcaacctggacatcgagcgtcccacgtacaccaacctcaatcgcctgattgggcagatcgtgtcctccatcacggcctccctgcgatttgacggggccctgaatgtggacttgacggaattccagaccaacctagtgccgtacccccgcatccacttccccctggccacctacgccccggtcatctcagccgagaaggcctaccacgagcagctgtccgtggctgagatcaccaatgcctgcttcgagccagccaatcagatggtcaagtgtgaccctcgccacggcaagtacatggcctgctgcatgttgtacaggggggatgtggtcccgaaagatgtcaacgcggccatcgccaccatcaagaccaagcgcaccatccagtttgtagattggtgcccaactggatttaaggtgggcattaactaccagccccccacggtggtccctgggggagacctggccaaggtgcagcgggctgtgtgcatgctgagcaacaccacggccatcgcggaggcctgggctcgcctggacctggcagctctggagaaggattatgaagaggtgggcgtggattccgtggaagccgaggctgaagaaggtgaagaatactgaggggagggtgtggtgggttctccactccactgccacccccagcgtggctgctttcaagttctttgcaattaaaggttctgtataaaaaaaaaaaaaaaaaaa

SEQ ID NO: 548 - DNA, 1594 bp, human
gcccgccggtccacgccgcgcaccgctccgagggccagcgccacccgctccgcagccggcaccatgcgcgagatcgtgcacatccaggcgggccagtgcggcaaccagatcggcgccaagttttgggaggtcatcagcgatgagcatgggatcgaccccacaggcagttaccatggagacagtgacttgcagctggagagaatcaacgtgtactacaatgaggctgctggtaacaaatatgtacctcgggccatcctggtggatctggagcctggcaccatggactctgtcaggtctggacccttcggccagatcttcagaccagacaacttcgtgttcggccagagtggagccgggaataactgggccaagggccactacacagagggagccgagctggtcgactcggtcctggatgtggtgaggaaggagtcagagagctgtgactgtctccagggcttccagctgacccactctctggggggcggcacggggtccgggatgggcaccctgctcatcagcaagatccgggaagagtacccagaccgcatcatgaacaccttcagcgtcatgccctcacccaaggtgtcagacacggtggtggagccctacaacgccaccctctcggtccaccagctggtggaaaacacagatgaaacctactccattgataacgaggccctgtatgacatctgcttccgcaccctgaagctgaccacccccacctacggggacctcaaccacctggtgtcggccaccatgagcggggtcaccacctgcctgcgcttcccgggccagctgaacgcagacctgcgcaagctggcggtgaacatggtgcccttccctcgcctgcacttcttcatgcccggcttcgcgcccctgaccagccggggcagccagcagtaccgggcgctcacggtgcccgagctcacccagcagatgttcgactccaagaacatgatggccgcctgcgacccgcgccacggccgctacctgacggtggctgccatcttccggggccgcatgtccatgaaggaggtggacgagcagatgctcaacgtgcagaacaagaacagcagctacttcgtggagtggatccccaacaacgtgaagacggccgtgtgcgacatcccgccccgcggcctgaagatgtcggccaccttcatcggcaacagcacggccatccaggagctgttcaagcgcatctccgagcagttcacggccatgttccggcgcaaggccttcctgcactggtacacgggcgagggcatggacgagatggagttcaccgaggccgagagcaacatgaacgacctggtgtccgagtaccagcagtaccaggacgccacggccgacgaacaaggggagttcgaggaggaggagggcgaggacgaggcttaaaaacttctcagatcaatcgtgcatccttagtgaacttctgttgtcctcaagcatggtctttctacttgtaaactatggtgctcagttttgcctctgttagaaattcacactgttgatgtaatgatgtggaactcctctaaaaattacagtattgtctgtgaaggtatctatactaataaaaaagcatgtgtag

SEQ ID NO: 549 - DNA, 1645 bp, human
gcgggctggcgtgcggcgccgttgcgggcgggagcggctgcaacgccggtgcctgaggagcgatgccgagggaaatcatcaccctacagttgggccagtgcggcaatcagattgggttcgagttctggaaacagctgtgcgccgagcatggtatcagccccgagggcatcgtggaggagttcgccaccgagggcactgaccgcaaggacgtctttttctaccaggcagacgatgagcactacatcccccgggccgtgctgctggacttggaaccccgggtgatccactccatcctcaactccccctatgccaagctctacaacccagagaacatctacctgtcggaacatggaggaggagctggcaacaactgggccagcggattctcccagggagaaaagatccatgaggacatttttgacatcatagaccgggaggcagatggtagtgacagtctagagggctttgtgctgtgtcactccattgctggggggacaggctctggactgggttcctacctcttagaacggctgaatgacaggtatcctaagaagctggtgcagacatactcagtgtttcccaaccaggacgagatgagcgatgtggtggtccagccttacaattcactcctcacactcaagaggctgacgcagaatgcagactgtgtggtggtgctggacaacacagccctgaaccggattgccacagaccgcctgcacatccagaacccatccttctcccagatcaaccagctggtgtctaccatcatgtcagccagcaccaccaccctgcgctaccctggctacatgaacaatgacctcatcggcctcatcgcctcgctcattcccaccccacggctccacttcctcatgaccggctacacccctctcactacggaccagtcagtggccagcgtgaggaagaccacggtcctggatgtcatgaggcggctgctgcagcccaagaacgtgatggtgtccacaggccgagaccgccagaccaaccactgctacatcgccatcctcaacatcatccagggagaggtggaccccacccaggtccacaagagcttgcagaggatccgggaacgcaagttggccaacttcatcccgtggggccccgccagcatccaggtggccctgtcgaggaagtctccctacctgccctcggcccaccgggtcagcgggctcatgatggccaaccacaccagcatctcctcgctcttcgagagaacctgtcgccagtatgacaagctgcgtaagcgggaggccttcctggagcagttccgcaaggaggacatgttcaaggacaactttgatgagatggacacatccagggagattgtgcagcagctcatcgatgagtaccatgcggccacacggccagactacatctcctggggcacccaggagcagtgagtcccccaggacagggaccctcatctgccttactggttggcccaagccctgcctgactgaccaccccctcagagcacagatcagggacctcacgcatctctttctcatatacatggactctctgttggcctgcaaacacatttacttctcctcttatgagactatttatctttaataaagcactggatataaaaaaaaaaaaaaaaaaaaaaaaaaaaaaaaaaaaa

SEQ ID NO: 550 - DNA, 3694 bp, human
ggcagttagcccgcccgctcggcgcagggcgtggcttctcgtagccattaggaaacagcaaccctttcacctcagttttcttcactccggcatttgcagcagagcgaaaggtggtcgagtcctgaaggagggcctgatgtcttcatcattctcaaattcttaggacggtcgggccctggaaggaacgctctcggaattggccgcggaaaccgatctgcccgttgtgtttgtgaaacagagaaagataggcggccatggtccaaccttgaaggcttatcaggagggcagacttcaaaagctactaaaaatgaacggccctgaagatcttcccaagtcctatgactatgaccttatcatcattggaggtggctcaggaggtctggcagctgctaaggaggcagcccaatatggcaagaaggtgatggtcctggactttgtcactcccacccctcttggaactagatggggtctcggaggaacatgtgtgaatgtgggttgcatacctaaaaaactgatgcatcaagcagctttgttaggacaagccctgcaagactctcgaaattatggatggaaagtcgaggagacagttaagcatgattgggacagaatgatagaagctgtacagaatcacattggctctttgaattggggctaccgagtagctctgcgggagaaaaaagtcgtctatgagaatgcttatgggcaatttattggtcctcacaggattaaggcaacaaataataaaggcaaagaaaaaatttattcagcagagagatttctcattgccactggtgaaagaccacgttacttgggcatccctggtgacaaagaatactgcatcagcagtgatgatcttttctccttgccttactgcccgggtaagaccctggttgttggagcatcctatgtcgctttggagtgcgctggatttcttgctggtattggtttagacgtcactgttatggttaggtccattcttcttagaggatttgaccaggacatggccaacaaaattggtgaacacatggaagaacatggcatcaagtttataagacagttcgtaccaattaaagttgaacaaattgaagcagggacaccaggccgactcagagtagtagctcagtccaccaatagtgaggaaatcattgaaggagaatataatacggtgatgctggcaataggaagagatgcttgcacaagaaaaattggcttagaaaccgtaggggtgaagataaatgaaaagactggaaaaatacctgtcacagatgaagaacagaccaatgtgccttacatctatgccattggcgatatattggaggataaggtggagctcaccccagttgcaatccaggcaggaagattgctggctcagaggctctatgcaggttccactgtcaagtgtgactatgaaaatgttccaaccactgtatttactcctttggaatatggtgcttgtggcctttctgaggagaaagctgtggagaagtttggggaagaaaatattgaggtttaccatagttacttttggccattggaatggacgattccgtcaagagataacaacaaatgttatgcaaaaataatctgtaatactaaagacaatgaacgtgttgtgggctttcacgtactgggtccaaatgctggagaagttacacaaggctttgcagctgcgctcaaatgtggactgaccaaaaagcagctggacagcacaattggaatccaccctgtctgtgcagaggtattcacaacattgtctgtgaccaagcgctctggggcaagcatcctccaggctggctgctgaggttaagccccagtgtggatgctgttgccaagactgcaaaccactggctcgtttccgtgcccaaatccaaggcgaagttttctagagggttcttgggctcttggcacctgcgtgtcctgtgcttaccaccgcccaaggcccccttggatctcttggataggagttggtgaatagaaggcaggcagcatcacactggggtcactgacagacttgaagctgacatttggcagggcatcgaagggatgcatccatgaagtcaccagtctcaagcccatgtggtaggcggtgatggaacaactgtcaaatcagttttagcatgacctttccttgtggattttcttattctcgttgtcaagttttctagggttgaatttttttcttttttctccatggtgttaatgatattagagatgaaaaacgttagcagttgatttttgtccaaaagcaagtcatggctagagtatccatgcaaggtgtcttgttgcatggaagggatagtttggctcccttggaggctatgtaggcttgtcccgggaaagagaactgtcctgcagctgaaatggactgttctttactgacctgctcagcagtttcttctctcatatattcccaaaacaagtacatctgcgatcaactctagccaaatttgcccctgtgtgctacatgatggatgattattattttaaggtctgtttaggaagggaaatggctacttggccagccattgcctggcatttggtagtatagtatgattctcaccattatttgtcatggaggcagacatacaccagaaatgggggagaaacagtacatatctttctgtctttagtttattgtgtgctggtctaagcaagctgagatcatttgcaatggaaaacacgtaacttgtttaaaagtttttctggtagctttagctttatgctaaaaaaaataatgacattgggtatctatttctttctaagactacattagtaggaaaataagtcttttcatgcttatgatttagctgttttgtggtaattgctttttaaaggaagttattaatatcataagttattattaatattttgaacacaggtggatgtgaaggattttcatttaaaaaccaagtggttttgactttttctgttgaatgaacaactgtgccttgtggaatttttgcagaagtgtttatgctttgttagcatttcaacttgcattattataaagaggtattaatgcctcagttatgtgtttgtcaatgtactggctgaggattctatctcagctgtcttttctaactgtgtaggttgagttttgaacacgtgcttgtggacatcaggcctcctgccagcagttcttgaagcttctttttcattcctgctactctacctgtatttctcagttgcagcactgagtggtcaaaatacatttctgggccacctcagggaacccatgcatctgcctggcatttaggcagcagagcccctgaccgtcccccacagggctctgcctcacgtcctcatctcatttggctgtgtaaagaaatgggaaaagggaaaaggagagagcaattgaggcagttgaccatattcagttttatttatttatttttaatttgtttttttctccaagtccaccagtctctgaaattagaacagtaggcggtatgagataatcaggcctaatcatgttgtgattctcttttcttagtggagtggaatgttctatccccacaagaaggattatatcttatagacttgtcttgttcagattctgtatttacccattttattgaaacatatactaagttccatgtatttttgttacaaatcttctgaaaaaaaacaaaacaatgtgaaacattaaaattaaaaggcattaataataaaaaaaaaaaaaaaaaaaaaaaaa

SEQ ID NO: 551 - DNA, 3504 bp, human
gagaaggcggcagcggcgattctaggcggcccaggcggcggggaggaggagaaggaggagggtggcggccgggcttggcttcggctccttgaggagttggcggcggcgcgacccggggaaccggcattgatgtccagctcgccgctgtccaagaaacgtcgcgtgtccgggcctgatccaaagccgggttctaactgctcccctgcccagtccgtgttgtccgaagtgccctcggtgccaaccaacggaatggccaagaacggcagtgaagcagacatagacgagggcctttactcccggcagctgtatgtgttgggccatgaggcaatgaagcggctccagacatccagtgtcctggtatcaggcctgcggggcctgggcgtggagatcgctaagaacatcatccttggtggggtcaaggctgttaccctacatgaccagggcactgcccagtgggctgatctttcctcccagttctacctgcgggaggaggacatcggtaaaaaccgggccgaggtatcacagccccgcctcgctgagctcaacagctatgtgcctgtcactgcctacactggacccctcgttgaggacttccttagtggtttccaggtggtggtgctcaccaacacccccctggaggaccagctgcgagtgggtgagttctgtcacaaccgtggcatcaagctggtggtggcagacacgcggggcctgtttgggcagctcttctgtgactttggagaggaaatgatcctcacagattccaatggggagcagccactcagtgctatggtttctatggttaccaaggacaaccccggtgtggttacctgcctggatgaggcccgacacgggtttgagagcggggactttgtctccttttcagaagtacagggcatggttgaactcaacggaaatcagcccatggagatcaaagtcctgggtccttatacctttagcatctgtgacacctccaacttctccgactacatccgtggaggcatcgtcagtcaggtcaaagtacctaagaagattagctttaaatccttggtggcctcactggcagaacctgactttgtggtgacggacttcgccaagttttctcgccctgcccagctgcacattggcttccaggccctgcaccagttctgtgctcagcatggccggccacctcggccccgcaatgaggaggatgcagcagaactggtagccttagcacaggctgtgaatgctcgagccctgccagcagtgcagcaaaataacctggacgaggacctcatccggaagctggcatatgtggctgctggggatctggcacccataaacgccttcattgggggcctggctgcccaggaagtcatgaaggcctgctccgggaagttcatgcccatcatgcagtggctatactttgatgcccttgagtgtctccctgaggacaaagaggtcctcacagaggacaagtgcctccagcgccagaaccgttatgacgggcaagtggctgtgtttggctcagacctgcaagagaagctgggcaagcagaagtatttcctggtgggtgcgggggccattggctgtgagctgctcaagaactttgccatgattgggctgggctgcggggagggtggagaaatcatcgttacagacatggacaccattgagaagtcaaatctgaatcgacagtttcttttccggccctgggatgtcacgaagttaaagtctgacacggctgctgcagctgtgcgccaaatgaatccacatatccgggtgacaagccaccagaaccgtgtgggtcctgacacggagcgcatctatgatgacgattttttccaaaacctagatggcgtggccaatgccctggacaacgtggatgcccgcatgtacatggaccgccgctgtgtctactaccggaagccactgctggagtcaggcacactgggcaccaaaggcaatgtgcaggtggtgatccccttcctgacagagtcgtacagttccagccaggacccacctgagaagtccatccccatctgtaccctgaagaacttccctaatgccatcgagcacaccctgcagtgggctcgggatgagtttgaaggcctcttcaagcagccagcagaaaatgtcaaccagtacctcacagaccccaagtttgtggagcgaacactgcggctggcaggcactcagcccttggaggtgctggaggctgtgcagcgcagcctggtgctgcagcgaccacagacctgggctgactgcgtgacctgggcctgccaccactggcacacccagtactcgaacaacatccggcagctgctgcacaacttccctcctgaccagctcacaagctcaggagcgccgttctggtctgggcccaaacgctgtccacacccgctcacctttgatgtcaacaatcccctgcatctggactatgtgatggctgctgccaacctgtttgcccagacctacgggctgacaggctctcaggaccgagctgctgtggccacattcctgcagtctgtgcaggtccccgaattcacccccaagtctggcgtcaagatccatgtttctgaccaggagctgcagagcgccaatgcctctgttgatgacagtcgtctagaggagctcaaagccactctgcccagcccagacaagctccctggattcaagatgtaccccattgactttgagaaggatgatgacagcaactttcatatggatttcatcgtggctgcatccaacctccgggcagaaaactatgacattccttctgcagaccggcacaagagcaagctgattgcagggaagatcatcccagccattgccacgaccacagcagccgtggttggccttgtgtgtctggagctgtacaaggttgtgcaggggcaccgacagcttgactcctacaagaatggtttcctcaacttggccctgcctttctttggtttctctgaaccccttgccgcaccacgtcaccagtactataaccaagagtggacattgtgggatcgctttgaggtacaagggctgcagcctaatggtgaggagatgaccctcaaacagttcctcgactattttaagacagagcacaaattagagatcaccatgctgtcccagggcgtgtccatgctctattccttcttcatgccagctgccaagctcaaggaacggttggatcagccgatgacagagattgtgagccgtgtgtcgaagcgaaagctgggccgccacgtgcgggcgctggtgcttgagctgtgctgtaacgacgagagcggcgaggatgtcgaggttccctatgtccgatacaccatccgctgaccccgtctgctcctctaggctggccccttgtccacccctctccacaccccttccagcccagggttcccatttggcttctggcagtggcccaactagccaagtctggtgttccctcatcatccccctacctgaacccctcttgccactgccttctaccttgtttgaaacctgaatcctaataaagaattaataactccc

SEQ ID NO: 552 - DNA, 2919 bp, human
agcagtccccggtgtcggggcaggaggcacgcgcgcggctgaggcgaggtcgctcggcgcagctgttgcggggccatggcggggaccgcgctcaagaggctgatggccgagtacaaacaattaacactgaatcctccggaaggaattgtagcaggccccatgaatgaagagaacttttttgaatgggaggcattgatcatgggcccagaagacacctgctttgagtttggtgtttttcctgccatcctgagtttcccacttgattacccgttaagtcccccaaagatgagatttacctgtgagatgtttcatcccaacatctaccctgatgggagagtctgcatttccatcctccacgcgccaggcgatgaccccatgggctacgagagcagcgcggagcggtggagtcctgtgcagagtgtggagaagatcctgctgtcggtggtgagcatgctggcagagcccaatgacgaaagtggagctaacgtggatgcgtccaaaatgtggcgcgatgaccgggagcagttctataagattgccaagcagatcgtccagaagtctctgggactgtgagacctggcctcgcacaggcgcgcacacaccgccaagcagctcagcattctcccccggcacacttagtgacagtgatgctctgtgctggtaccaaacaaggcagacttgcaagaaccatggcatcttttttttttttcaaacctttcctacttcaaacaggcttctcttctgaaatgatgacttaatgtcgaatattgacagcttactgcagttttacagtattcctcacaaagggcttcaggtagattatcagagctgtcagcactacctctccccgctgaaaccagcagttcatggcttcctgtggattccctccctccctggagtgttgagggggttgtacctgccagacttccaggggacgatggaatacccagaacgctccttctgaagaaatggggccctgtagctgcagcacaggggaagggcccggcaccctttctgggtccttcctggttccctgtgggccccatgaggagtccattacttcctttcttccttcatattttacaggcagatgcttttcttataatctaattacatcttttcatttgttatatattacaaaccatcacacttagaaatacttccaggaaatgcttttttgaagtgtgaattaataagaaatggggtaaatagaaaagaaatttattgctgattggccaggtgcggtggttcgtgcctgtaatcccagctctttgggaggccaaggcaggtagatcacaaggtcaggaaattgagaccatcctggctaatacagtgaaaccccatgtctgctaaaattacaaaaaattagctgggcgtggtggtgcacgcctgtagtctcagctactcaggaggctgaggcaggagaatcgcttgaacccgggaggcagaggtagcagtgagctgaagtcccgccactgcactccagcctgggcaacagagcgagactcagtctcaaaaagaaaaaagaaatttattgctgatcacaaggacagacagttttttcccgaccatactcatcaaagatttacgtttgtatattagtaactagtgcattactagagcaggtgcaggtgaggtctttaaagtttcaatgaaagtttcttctggatctacagaaaaaatttttttttttcaatctaaaaactggaaattctagggtttttgtacattttggatgcactgggaatttattagcacaaaatcattctttgcaactcaaaattcagaagggactctaccatatcttagctcagagcacagaggagtgccttatccccacacttgactgggctgtggaggtgggcatgtgggcccctgggcccaggctggggacagagcccttgttttgtgacttaggattttgatgtggttcccatgttctctaacagggccagctgagcagcacaggccaggaggccacagtgtaagcaataacagatctgccacatgcagaagcaaatatcaggcctgtcgcacacgggcggcatttaaataggaatttctatttttgaaataagggatggtctatgaggcatacagtagatttgatgtgatccttttctccctcccttccataatggatcgtggtctgtgtgactgaacccacacagagtgtcatgggtgacagtttctggttgaagtagctccacgcctggcttctgtggacagcagattcttttccttctcacaaggggctcatttaaaatttggaggctgggtgctgtggctcacgcctgcaatcccagcactttgggagactgaggcgggcggatcatgaggtcaggagatcgcgaccatcctggctaacagtgaaaccctgtctccactaaaaatacaaaaaattagccgggcgtggtggcgggcgcctgtagtcccagctactctgaagactgaggcaggagaatggcgtgaacccaggaggcggagcttgcagtgagctgagatcacgccactgcactccagcctgggcaacagagtgagactctgtctcaaaaaaaaaaaaaaaaaaaatggaacgcagggcaagaactcgtatttggaaggagatgggggaaaggagcggtattatacctatgttgtatttgcaggcaaatgagatggagccctctctgtaaagaagagtcatttgtgcaagtagacggggtctgtgggtgcaggccctggaggggcacacaattgcctggaggcttctgtgagatcgggagagggaggagaggcagtctcttgacaaaataaagtatttttattcatttgtatttattaaatgaaaaaacaatcccatggtgtccctgttgtgtggtggaacctaatgactgttgaaataaagttctgtgttttccctgccctgcaaaaaaaaaa

SEQ ID NO: 553 - DNA, 899 bp, human
gtcagagctggagggccgggcaccgcggccatggagggtcaacgctggctgccgctggaggccaatcccgaggtcaccaaccagtttcttaaacaattaggtctacatcctaactggcaattcgttgatgtatatggaatggatcctgaactccttagcatggtaccaagaccagtctgtgcagtcttacttctctttcctattacagaaaagtatgaagtattcagaacagaagaggaagaaaaaataaaatctcagggacaagatgttacatcatcagtatatttcatgaagcaaacaatcagcaatgcctgtggaacaattggactgattcatgctattgcaaacaataaagacaagatgcactttgaatctggatcaaccttgaaaaaattcctggaggaatctgtgtcaatgagccctgaagaacgagccagatacctggagaactatgatgccatccgagttactcatgagaccagtgcccatgaaggtcagactgaggcaccaagtatagatgagaaagtagatcttcattttattgcattagttcatgtagatgggcatctctatgaattagatgggcggaagccatttccaattaaccatggtgaaactagtgatgaaactttattagaggatgccatagaagtttgcaagaagtttatggagcgcgaccctgatgaactaagatttaatgcgattgctctttctgcagcatagcttgtcaataatggaaacaccaaaaactgtattatttgcaactaaattttctctgccatacactaactcaaaaattttgatattttcattaacttgatgattaaactttatgtgagttaaaaaaaaaaaaaaaaaaaaaaaaaaaaaaaaaaaaaaaaaaaaaaaaaaaaaaaaaa

SEQ ID NO: 554 - DNA, 1064 bp, human
gcggctgggagagcggtcggcggggtttcttcgttgcattgcctgagaggagcggagtctgccaggtggtgtccatcatgttctctttcaacatgttcgaccaccctattcccagggtcttccaaaaccgcttctccacacagtaccgctgcttctctgtgtccatgctagcagggcctaatgacaggtcagatgtggagaaaggagggaagataattatgccaccctcggccctggaccaactcagccgacttaacattacctatcccatgctgttcaaactgaccaataagaattcggaccgcatgacgcattgtggcgtgctggagtttgtggctgatgagggcatctgctacctcccacactggatgatgcagaacttactcttggaagaaggcggcctggtccaggtggagagcgtcaaccttcaagtggccacctactccaaattccaacctcagagccctgacttcctggacatcaccaaccccaaagccgtattagaaaacgcacttaggaactttgcctgtctgaccaccggggatgtgattgccatcaactataatgaaaagatctacgaactgcgtgtgatggagaccaaacccgacaaggcagtgtccatcattgagtgtgacatgaacgtggactttgatgctcccctgggctacaaagaacccgaaagacaagtccagcatgaggagtcgacagaaggtgaagccgaccacagtggctatgctggagagctgggcttccgcgctttctctggatctggcaatagactggatggaaagaagaaaggggtagagcccagcccctccccaatcaagcctggagatattaaaagaggaattcccaattatgaatttaaacttggtaagataactttcatcagaaattcacgtccccttgtcaaaaaggttgaagaggatgaagctggaggcagattcgtcgctttctctggagaaggacagtcattgcgtaaaaagggaagaaagccctaagtgaggactgttggctgattggaaaataataaaagaatcatttgcaaaaaaaaaaaaaaaaaa

SEQ ID NO: 555 - DNA, 1451 bp, human
caacatggcagcggttggggctggtggttccaccgcggcgcccgggccaggggcggtttccgcgggtgcattggagccggggaccgccagtgcggctcacaggcgcctgaagtacatatccctagctgtgctggtggtccagaatgcctccctcatcctcagcatccgctacgcccgcacgttgccaggggaccgcttctttgccaccactgctgtggtcatggcggaagtgctcaaaggtctcacctgcctgctgctgctcttcgcacagaagaggggtaacgtgaagcacctggttctcttcctccatgaggctgtcctggtgcagtatgtggacacgctcaagctcgcagtgccctctctcatctacaccttgcagaataacctccagtatgttgccatctctaacctaccagctgccactttccaggtgacataccagctgaagatcctgaccacagcgctgttctccgtgctcatgctgaatcgcagcctttcccggctgcagtgggcctccctgctgctcctcttcactggcgtcgccattgtccaggcacagcaagccggtgggggaggcccacggccactggatcagaaccctggggcaggcctggcagccgtcgtggcctcctgtctctcctccggcttcgcaggtgtctactttgagaagatcctcaaaggcagctcaggctccgtgtggctgcgcaacctgcaactgggcctcttcggcacagcactgggcctggtggggctctggtgggctgagggtaccgccgtggccacccgtggtttcttttttgggtacacacctgctgtctggggcgtggtgctcaaccaggccttcggcgggctactggtggctgtggttgtcaagtacgctgacaatatcctcaagggctttgccacctccctgtccattgtgctgtccactgttgcctccattcgcctctttggcttccacgtggacccattatttgcccttggcgctggactcgtcattggtgctgtctacctctacagccttccccgaggtgcagccaaagccatagcctctgcctctgcctccgcctccgggccctgcgttcaccagcagcctcccgggcagccaccaccaccgcagctgtcttcccaccgtggagacctcatcacggagccctttctgccaaagttgctcaccaaggtgaagggttcctagccgctgggattgaagacattggcctggcctcgttctctcttcttgcccttggcccagctgggaccaaactctgatcagtattaggggtagagtgaggtagacactggactccctgtccccaccacccctgccccacccagggccaacatgactaagctctctcatgacccacctcagctcagccccccagcccctgccagctccacactatctcttagctgagtttttgcaaataaaatgtgttgtgtatcttgcc

SEQ ID NO: 556 - DNA, 1832 bp, human
aggagaggaagagagacctgccctgtagcgtgactcctctagaaaaaaaaaaaaaaagccggagtattttactaagcccctaaaatgtcgagatttgtacaagatcttagcaaagcaatgtctcaagatggtgcttctcagttccaagaagtcattcggcaagagctagaattatctgtgaagaaggaactagaaaaaatactcaccacagcatcatcacatgaatttgagcacaccaaaaaagacctggatggatttcggaagctatttcatagatttttgcaagaaaaggggccttctgtggattggggaaaaatccagagaccccctgaagattcgattcaaccctatgaaaagataaaggccaggggcctgcctgataatatatcttccgtgttgaacaaactagtggtggtgaaactcaatggtggtttgggaaccagcatgggctgcaaaggccctaaaagtctgattggtgtgaggaatgagaatacctttctggatctgactgttcagcaaattgaacatttgaacaaaacctacaatacagatgtccctcttgttttaatgaactcttttaacacggatgaagataccaaaaaaatactacagaagtacaatcattgtcgtgtgaaaatctacactttcaatcaaagcaggtacccgaggattaataaagaatctttacggcctgtagcaaaggacgtgtcttactcaggggaaaatacagaagcttggtaccctccaggtcatggtgatatttacgccagtttctacaactctggattgcttgatacctttataggagaaggcaaagagtatatttttgtgtctaacatagataatctgggtgccacagtggatctgtatattcttaatcatctaatcaacccacccaatggaaaacgctgtgaatttgtcatggaagtcacaaataaaacacgtgcagatgtaaagggcgggacactcactcaatatgaaggcaaactgagactggtggaaattgctcaagtgccaaaagcacatgttgacgagttcaagtctgtatcaaagttcaaaatatttaatacaaacaacctatggatttctcttgcagcagttaaaagactgcaggagcaaaatgccattgacatggaaatcattgtgaatgcaaagactttggatggaggcctgaatgtcattcaattagaaactgcagtaggggctgccatcaaaagctttgagaattctctaggtattaatgtgccaaggagccgttttctgcctgtcaaaaccacatcagatctcttgctggtgatgtcaaacctctatagtcttaatgcaggatctctgacaatgagtgaaaagcgggaatttcctacagtgcccttggttaaattaggcagttcttttacgaaggttcaagattatctaagaagatttgaaagtataccagatatgcttgaattggatcacctcacagtttcaggagatgtgacatttggaaaaaatgtttcattaaagggaacggttatcatcattgcaaatcatggtgacagaattgatatcccacctggagcagtattagagaacaagatagtgtctggaaaccttcgcatcttggaccactgaaatgaaaaatactgtggacacttaaataatgggctagtttcttacaatgaaatgttctctaggatttaggcactaaaaggtactttactatgttactgtaccctgcagtgttgatttttaaaatagagttttctgcagtatgcttttagtctaagaaaagcacagatggtgcaatactttccttctttgaagagatcccaaagttagttactcttaagtgc

SEQ ID NO: 557 - DNA, 965 bp, human
cagcttgtcctctatgacttacccagaaggcaacgcttctctttctggtcaaaatggctggtaagcaggccgtttcagcatcaggcaagtggctggatggtattcgaaaatggtattacaatgctgcaggattcaataaactggggttaatgcgagatgatacaatatacgaggatgaagatgtaaaagaagccataagaagacttcctgagaacctttataatgacaggatgtttcgcattaagagggcactggacctgaacttgaagcatcagatcttgcctaaagagcagtggaccaaatatgaagaggaaaatttctaccttgaaccgtatctgaaagaggttattcgggaaagaaaagaaagagaagaatgggcaaagaagtaatcatgtagttgaagtctgtggatgcagctgttatgaagatggttaaacttgaaacaaacaattttaagaattatttggtctgaagatgttttactttaaataaatgtctattgtaatggctggagtttttgaattccaaaccttatactgaataactactgaatccctttactgttaaatttttttccaaactttcaagatatatttagttgtgtttaactgctacttggagctcagaagccactttatcagttttcctcactggttggatagcctatcagtttatggaaggatataacttccgtaagttacatccttatggaagctactgaataaaagaagggggtatgcaccccctagtttgccaagattgagaaatagcctcttcactggtatgcaaacagatttgattttgcatcctatcatttaaaaagaaattatgtctgcaccccaacataggcatacttaagtaatatacatactcctgtgctaacatgtatactagaaaacaaaaagatgttagaaaaataaaagtataaagacaaatcaaaaaaaaaaaaaaaaaaaaaaaaaaaa

SEQ ID NO: 558 - DNA, 1203 bp, human
gtcgtcacgcgtcccgcgcctcctcgcgcctgcaccgtggttggaaggtcgtcccctgtgaccggttgggcggttggagcggctgtcgccatgttgtcggtagcagcccgctcgggcccgttcgcgcccgtcctgtcggccacgtcccgcggggtggcgggcgcgctgcggcccttggtgcaggccacggtgcccgccaccccggagcagcctgtgttggacctgaagcggcccttcctcagccgggagtcgctgagcggccaggccgtgcgccggcctttggtcgcctccgtgggcctcaatgtccctgcttctgtttgttattcccacacagacatcaaggtgcctgacttctctgaataccgccgccttgaagttttagatagtacgaagtcttcaagagaaagcagcgaggctaggaaaggtttctcctatttggtaactggagtaactactgtgggtgtcgcatatgctgccaagaatgccgtcacccagttcgtttccagcatgagtgcttctgctgatgtgttggccctggcgaaaatcgaaatcaagttatccgatattccagaaggcaagaacatggctttcaaatggagaggcaaacccctgtttgtgcgtcatagaacccagaaggaaattgagcaggaagctgcagttgaattatcacagttgagggacccacagcatgatctagatcgagtaaagaaacctgaatgggttatcctgataggtgtttgcactcatcttggctgtgtacccattgcaaatgcaggagattttggtggttattactgcccttgccatgggtcacactatgatgcatctggcaggatcagattgggtcctgctcctctcaaccttgaagtccccacgtatgagttcaccagtgacgatatggtgattgttggttaagagacttggactcaagtcataggcttctttcagtctttatgtcacctcaggagacttatttgagaggaagccttctgtacttgaagttgatttgaaatatgtaagaattgatgatgtatttgcaaacattaatgtgaaataaattgaatttaatgttgaatactttcaggcattcacttaataaagacactgttaagcactgttatgctcagtcatacacgcgaaaggtacaatgtcttttagctaattctaattaaaaattacagactggtgtacaagatacttgtg

SEQ ID NO: 559 - DNA, 1522 bp, human
ggttgcggcgggcggaacggtgtctccttcacttcgccctccagctgctgcagctgcagcccgaccgcgagcgtgccaagcggcttcagcagctagcggagcggtggcggcggcccccctcaggacaccaccagattcccctcttcccgcggcctcgccatggcgacccacggacagacttgcgcgcgtccaatgtgtattcctccatcatatgctgaccttggcaaagctgccagagatattttcaacaaaggatttggttttgggttggtgaaactggatgtgaaaacaaagtcttgcagtggcgtggaattttcaacgtccggttcatctaatacagacactggtaaagttactgggaccttggagaccaaatacaagtggtgtgagtatggtctgactttcacagaaaagtggaacactgataacactctgggaacagaaatcgcaattgaagaccagatttgtcaaggtttgaaactgacatttgatactaccttctcaccaaacacaggaaagaaaagtggtaaaatcaagtcttcttacaagagggagtgtataaaccttggttgtgatgttgactttgattttgctggacctgcaatccatggttcagctgtctttggttatgagggctggcttgctggctaccagatgacctttgacagtgccaaatcaaagctgacaaggaataactttgcagtgggctacaggactggggacttccagctacacactaatgtcaacgatgggacagaatttggaggatcaatttatcagaaagtttgtgaagatcttgacacttcagtaaaccttgcttggacatcaggtaccaactgcactcgttttggcattgcagctaaatatcagttggatcccactgcttccatttctgcaaaagtcaacaactctagcttaattggagtaggctatactcagactctgaggcctggtgtgaagcttacactctctgctctggtagatgggaagagcattaatgctggaggccacaaggttgggctcgccctggagttggaggcttaatccagctgaaagaaacctttgggaatggatatcagaagatttggccttaatatatttccattgtgaccagcagcaggcttttttcccccaagaagatgatcaaaacaaaggatgatctcaacaagagctgtattttaagtatttagacagttctttgttagctggtttctagttggttatctagttaccaatgctgcagtcctgcagtcacctatacattatttaaatgtatttaactgttaaatgcgctacccaccaataatgaaatagacctttatgaaaactgtgcaattgtgtgcatgtttgtttttatgttcctttagaaaacattgactgttaccattgaatgagatggatcagtggatattaagatgaggttacaaattttgttaagttcagccattattacttttggtatcccagaacatgacaaattatgaataaaacaagtatacataaaaaaaaaaaaaaaaaaaaa

SEQ ID NO: 560 - DNA, 3656 bp, human
ctctgcgggccgcgggtgcgggtcgtcgctaccggctctctccgttctgtgctctcttctgctctcggctccccaccccctctcccttccctcctctccccttgcctcccctcctctgcagcgcctgcattattttctgcccgcagctcggcttgcactgctgctgcagcccggggaggtggctgggtgggtggggaggagactgtgcaagttgtaggggagggggtgccctcttcttccccgctcccttccccagccaagtggttcccctccttctccccctttcccctcccagcccccaccttcttcctctttcggaagggctggtaacttgtcgtgcggagcgaacggcggcggcggcggcggcggcggcaccatccaggcgggcaccatgggcacgtccgcgctctgggccgtctggctgctgctcgcgctgtgctgggcgccccgggagagcggcgccaccggaaccgggagaaaagccaaatgtgaaccctcccaattccagtgcacaaatggtcgctgtattacgctgttgtggaaatgtgatggggatgaagactgtgttgacggcagtgatgaaaagaactgtgtaaagaagacgtgtgctgaatctgacttcgtgtgcaacaatggccagtgtgttcccagccgatggaagtgtgatggagatcctgactgcgaagatggttcagatgaaagcccagaacagtgccatatgagaacatgccgcatacatgaaatcagctgtggcgcccattctactcagtgtatcccagtgtcctggagatgtgatggtgaaaatgattgtgacagtggagaagatgaagaaaactgtggcaatataacatgtagtcccgacgagttcacctgctccagtggccgctgcatctccaggaactttgtatgcaatggccaggatgactgcagcgatggcagtgatgagctggactgtgccccgccaacctgtggcgcccatgagttccagtgcagcacctcctcctgcatccccatcagctgggtatgcgacgatgatgcagactgctccgaccaatctgatgagtccctggagcagtgtggccgtcagccagtcatacacaccaagtgtccagccagcgaaatccagtgcggctctggcgagtgcatccataagaagtggcgatgtgatggggaccctgactgcaaggatggcagtgatgaggtcaactgtccctctcgaacttgccgacctgaccaatttgaatgtgaggatggcagctgcatccatggcagcaggcagtgtaatggtatccgagactgtgtcgatggttccgatgaagtcaactgcaaaaatgtcaatcagtgcttgggccctggaaaattcaagtgcagaagtggagaatgcatagatatcagcaaagtatgtaaccaggagcaggactgcagggactggagtgatgagcccctgaaagagtgtcatataaacgaatgcttggtaaataatggtggatgttctcatatctgcaaagacctagttataggctacgagtgtgactgtgcagctgggtttgaactgatagataggaaaacctgtggagatattgatgaatgccaaaatccaggaatctgcagtcaaatttgtatcaacttaaaaggcggttacaagtgtgaatgtagtcgtgcctatcaaatggatcttgctactggcgtgtgcaaggcagtaggcaaagagccaagtctgatcttcactaatcgaagagacatcaggaagattggcttagagaggaaagaatatatccaactagttgaacagctaagaaacactgtggctctcgatgctgacattgctgcccagaaactattctgggccgatctaagccaaaaggctatcttcagtgcctcaattgatgacaaggttggtagacatgttaaaatgatcgacaatgtctataatcctgcagccattgctgttgattgggtgtacaagaccatctactggactgatgcggcttctaagactatttcagtagctaccctagatggaaccaagaggaagttcctgtttaactctgacttgcgagagcctgcctccatagctgtggacccactgtctggctttgtttactggtcagactggggtgaaccagctaaaatagaaaaagcaggaatgaatggattcgatagacgtccactggtgacagcggatatccagtggcctaacggaattacacttgaccttataaaaagtcgcctctattggcttgattctaagttgcacatgttatccagcgtggacttgaatggccaagatcgtaggatagtactaaagtctctggagttcctagctcatcctcttgcactaacaatatttgaggatcgtgtctactggatagatggggaaaatgaagcagtctatggtgccaataaattcactggatcagagcatgccactctagtcaacaacctgaatgatgcccaagacatcattgtctatcatgaacttgtacagccatcaggtaaaaattggtgtgaagaagacatggagaatggaggatgtgaatacctatgcctgccagcaccacagattaatgatcactctccaaaatatacctgttcctgtcccagtgggtacaatgtagaggaaaatggccgagactgtcaaagtactgcaactactgtgacttacagtgagacaaaagatacgaacacaacagaaatttcagcaactagtggactagttcctggagggatcaatgtgaccacagcagtatcagaggtcagtgttcccccaaaagggacttctgccgcatgggccattcttcctctcttgctcttagtgatggcagcagtaggtggctacttgatgtggcggaattggcaacacaagaacatgaaaagcatgaactttgacaatcctgtgtacttgaaaaccactgaagaggacctctccatagacattggtagacacagtgcttctgttggacacacgtacccagcaatatcagttgtaagcacagatgatgatctagcttgacttctgtgacaaatgttgacctttgaggtctaaacaaataatacccccgtcggaatggtaaccgagccagcagctgaagtctctttttcttcctctcggctggaagaacatcaagatacctttgcgtggatcaagcttgctgtacttgaccgtttttatattacttttgtaaatattcttgtccacattctacttcagctttggatgtggttaccgagtatctgtaacccttgaatttctagacagtattgccacctctggccaaatatgcactttccctagaaagccatattccagcagtgaaacttgtgctatagtgtataccacctgtacatacattgtataggccatctgtaaatatcccagagaacaatcactattcttaagcactttgaaaatatttctatgtaaattattgtaaactttttcaatggttgggacaatggcaataggacaaaacgggttactaagatgaaattgccaaaaaaatttataaactaattttggtacgtatgaatgatatctttgacctcaatggaggtttgcaaagactgagtgttcaaactactgtacattttttttcaagtgctaaaaaattaaaccaagcagcttaaaaaaaaaaaaaaaaaaaaaaaaaaaaaaa

SEQ ID NO: 561 - DNA, 1662 bp, human
ccgagttacgagtcggcgaaagcggcgggaagttcgtactgggcagaacgcgacgggtctgcggcttaggtgaaaatgcctcgtgtaaaagcagctcaagctggaagacagagctctgcaaagagacatcttgcagaacaatttgcagttggagagataataactgacatggcaaaaaaggaatggaaagtaggattacccattggccaaggaggctttggctgtatatatcttgctgatatgaattcttcagagtcagttggcagtgatgcaccttgtgttgtaaaagtggaacccagtgacaatggacctctttttactgaattaaagttctaccaacgagctgcaaaaccagagcaaattcagaaatggattcgtacccgtaagctgaagtacctgggtgttcctaagtattgggggtctggtctacatgacaaaaatggaaaaagttacaggtttatgataatggatcgctttgggagtgaccttcagaaaatatatgaagcaaatgccaaaaggttttctcggaaaactgtcttgcagctaagcttaagaattctggatattctggaatatattcacgagcatgagtatgtgcatggagatatcaaggcctcaaatcttcttctgaactacaagaatcctgaccaggtgtacttggtagattatggccttgcttatcggtactgcccagaaggagttcataaagaatacaaagaagaccccaaaagatgtcacgatggcactattgaattcacgagcatcgatgcacacaatggtgtggccccatcaagacgtggtgatttggaaatacttggttattgcatgatccaatggcttactggccatcttccttgggaggataatttgaaagatcctaaatatgttagagattccaaaattagatacagagaaaatattgcaagtttgatggacaaatgttttcctgagaaaaacaaaccaggtgaaattgccaaatacatggaaacagtgaaattactagactacactgaaaaacctctttatgaaaatttacgtgacattcttttgcaaggactaaaagctataggaagtaaggatgatggcaaattggacctcagtgttgtggagaatggaggtttgaaagcaaaaacaataacaaagaagcgaaagaaagaaattgaagaaagcaaggaacctggtgttgaagatacggaatggtcaaacacacagacagaggaggccatacagacccgttcaagaaccagaaagagagtccagaagtaattcagatgctgtgaaccagatttccttttctttgttttcttttgacttttttctccttttctgttagaactgttttattttcctgtgagtcttgcgaggtggaattaatgattaaatactcatgtgttcagaaaacataaactttttttataaaaatattttgtacaattcattaaaggctaatttatgaaatttgaaaatcttcaggttatactccttaagttatcccaaagccgtgtgtttgtgatgttttggagtacatatatatgaaaattattatgacacgcacttttctaatcattgtacatttctcagagtggataaaaatgtttgacaaagtcctcacttttaaggaaatgcaaagcttaaaataaaactctcttttgtttgatgcag

SEQ ID NO: 562 - DNA, 8923 bp, human
agctcacagctattgtggtgggaaagggagggtggttggtggatgtcacagcttgggctttatctcccccagcagtggggactccacagcccctgggctacataacagcaagacagtccggagctgtagcagacctgattgagcctttgcagcagctgagagcatggcctagggtgggcggcaccattgtccagcagctgagtttcccagggaccttggagatagccgcagccctcatttgcaggggaaggcaccattgtccagcagctgagtttcccagggaccttggagatagccgcagccctcatttatgattcctgccagatttgccggggtgctgcttgctctggccctcattttgccagggaccctttgtgcagaaggaactcgcggcaggtcatccacggcccgatgcagccttttcggaagtgacttcgtcaacacctttgatgggagcatgtacagctttgcgggatactgcagttacctcctggcagggggctgccagaaacgctccttctcgattattggggacttccagaatggcaagagagtgagcctctccgtgtatcttggggaattttttgacatccatttgtttgtcaatggtaccgtgacacagggggaccaaagagtctccatgccctatgcctccaaagggctgtatctagaaactgaggctgggtactacaagctgtccggtgaggcctatggctttgtggccaggatcgatggcagcggcaactttcaagtcctgctgtcagacagatacttcaacaagacctgcgggctgtgtggcaactttaacatctttgctgaagatgactttatgacccaagaagggaccttgacctcggacccttatgactttgccaactcatgggctctgagcagtggagaacagtggtgtgaacgggcatctcctcccagcagctcatgcaacatctcctctggggaaatgcagaagggcctgtgggagcagtgccagcttctgaagagcacctcggtgtttgcccgctgccaccctctggtggaccccgagccttttgtggccctgtgtgagaagactttgtgtgagtgtgctggggggctggagtgcgcctgccctgccctcctggagtacgcccggacctgtgcccaggagggaatggtgctgtacggctggaccgaccacagcgcgtgcagcccagtgtgccctgctggtatggagtataggcagtgtgtgtccccttgcgccaggacctgccagagcctgcacatcaatgaaatgtgtcaggagcgatgcgtggatggctgcagctgccctgagggacagctcctggatgaaggcctctgcgtggagagcaccgagtgtccctgcgtgcattccggaaagcgctaccctcccggcacctccctctctcgagactgcaacacctgcatttgccgaaacagccagtggatctgcagcaatgaagaatgtccaggggagtgccttgtcactggtcaatcccacttcaagagctttgacaacagatacttcaccttcagtgggatctgccagtacctgctggcccgggattgccaggaccactccttctccattgtcattgagactgtccagtgtgctgatgaccgcgacgctgtgtgcacccgctccgtcaccgtccggctgcctggcctgcacaacagccttgtgaaactgaagcatggggcaggagttgccatggatggccaggacatccagctccccctcctgaaaggtgacctccgcatccagcatacagtgacggcctccgtgcgcctcagctacggggaggacctgcagatggactgggatggccgcgggaggctgctggtgaagctgtcccccgtctacgccgggaagacctgcggcctgtgtgggaattacaatggcaaccagggcgacgacttccttaccccctctgggctggcagagccccgggtggaggacttcgggaacgcctggaagctgcacggggactgccaggacctgcagaagcagcacagcgatccctgcgccctcaacccgcgcatgaccaggttctccgaggaggcgtgcgcggtcctgacgtcccccacattcgaggcctgccatcgtgccgtcagcccgctgccctacctgcggaactgccgctacgacgtgtgctcctgctcggacggccgcgagtgcctgtgcggcgccctggccagctatgccgcggcctgcgcggggagaggcgtgcgcgtcgcgtggcgcgagccaggccgctgtgagctgaactgcccgaaaggccaggtgtacctgcagtgcgggaccccctgcaacctgacctgccgctctctctcttacccggatgaggaatgcaatgaggcctgcctggagggctgcttctgccccccagggctctacatggatgagaggggggactgcgtgcccaaggcccagtgcccctgttactatgacggtgagatcttccagccagaagacatcttctcagaccatcacaccatgtgctactgtgaggatggcttcatgcactgtaccatgagtggagtccccggaagcttgctgcctgacgctgtcctcagcagtcccctgtctcatcgcagcaaaaggagcctatcctgtcggccccccatggtcaagctggtgtgtcccgctgacaacctgcgggctgaagggctcgagtgtaccaaaacgtgccagaactatgacctggagtgcatgagcatgggctgtgtctctggctgcctctgccccccgggcatggtccggcatgagaacagatgtgtggccctggaaaggtgtccctgcttccatcagggcaaggagtatgcccctggagaaacagtgaagattggctgcaacacttgtgtctgtcgggaccggaagtggaactgcacagaccatgtgtgtgatgccacgtgctccacgatcggcatggcccactacctcaccttcgacgggctcaaatacctgttccccggggagtgccagtacgttctggtgcaggattactgcggcagtaaccctgggacctttcggatcctagtggggaataagggatgcagccacccctcagtgaaatgcaagaaacgggtcaccatcctggtggagggaggagagattgagctgtttgacggggaggtgaatgtgaagaggcccatgaaggatgagactcactttgaggtggtggagtctggccggtacatcattctgctgctgggcaaagccctctccgtggtctgggaccgccacctgagcatctccgtggtcctgaagcagacataccaggagaaagtgtgtggcctgtgtgggaattttgatggcatccagaacaatgacctcaccagcagcaacctccaagtggaggaagaccctgtggactttgggaactcctggaaagtgagctcgcagtgtgctgacaccagaaaagtgcctctggactcatcccctgccacctgccataacaacatcatgaagcagacgatggtggattcctcctgtagaatccttaccagtgacgtcttccaggactgcaacaagctggtggaccccgagccatatctggatgtctgcatttacgacacctgctcctgtgagtccattggggactgcgcctgcttctgcgacaccattgctgcctatgcccacgtgtgtgcccagcatggcaaggtggtgacctggaggacggccacattgtgcccccagagctgcgaggagaggaatctccgggagaacgggtatgagtgtgagtggcgctataacagctgtgcacctgcctgtcaagtcacgtgtcagcaccctgagccactggcctgccctgtgcagtgtgtggagggctgccatgcccactgccctccagggaaaatcctggatgagcttttgcagacctgcgttgaccctgaagactgtccagtgtgtgaggtggctggccggcgttttgcctcaggaaagaaagtcaccttgaatcccagtgaccctgagcactgccagatttgccactgtgatgttgtcaacctcacctgtgaagcctgccaggagccgggaggcctggtggtgcctcccacagatgccccggtgagccccaccactctgtatgtggaggacatctcggaaccgccgttgcacgatttctactgcagcaggctactggacctggtcttcctgctggatggctcctccaggctgtccgaggctgagtttgaagtgctgaaggcctttgtggtggacatgatggagcggctgcgcatctcccagaagtgggtccgcgtggccgtggtggagtaccacgacggctcccacgcctacatcgggctcaaggaccggaagcgaccgtcagagctgcggcgcattgccagccaggtgaagtatgcgggcagccaggtggcctccaccagcgaggtcttgaaatacacactgttccaaatcttcagcaagatcgaccgccctgaagcctcccgcatcgccctgctcctgatggccagccaggagccccaacggatgtcccggaactttgtccgctacgtccagggcctgaagaagaagaaggtcattgtgatcccggtgggcattgggccccatgccaacctcaagcagatccgcctcatcgagaagcaggcccctgagaacaaggccttcgtgctgagcagtgtggatgagctggagcagcaaagggacgagatcgttagctacctctgtgaccttgcccctgaagcccctcctcctactctgcccccccacatggcacaagtcactgtgggcccggggctcttgggggtttcgaccctggggcccaagaggaactccatggttctggatgtggcgttcgtcctggaaggatcggacaaaattggtgaagccgacttcaacaggagcaaggagttcatggaggaggtgattcagcggatggatgtgggccaggacagcatccacgtcacggtgctgcagtactcctacatggtgaccgtggagtaccccttcagcgaggcacagtccaaaggggacatcctgcagcgggtgcgagagatccgctaccagggcggcaacaggaccaacactgggctggccctgcggtacctctctgaccacagcttcttggtcagccagggtgaccgggagcaggcgcccaacctggtctacatggtcaccggaaatcctgcctctgatgagatcaagaggctgcctggagacatccaggtggtgcccattggagtgggccctaatgccaacgtgcaggagctggagaggattggctggcccaatgcccctatcctcatccaggactttgagacgctcccccgagaggctcctgacctggtgctgcagaggtgctgctccggagaggggctgcagatccccaccctctcccctgcacctgactgcagccagcccctggacgtgatccttctcctggatggctcctccagtttcccagcttcttattttgatgaaatgaagagtttcgccaaggctttcatttcaaaagccaatatagggcctcgtctcactcaggtgtcagtgctgcagtatggaagcatcaccaccattgacgtgccatggaacgtggtcccggagaaagcccatttgctgagccttgtggacgtcatgcagcgggagggaggccccagccaaatcggggatgccttgggctttgctgtgcgatacttgacttcagaaatgcatggtgccaggccgggagcctcaaaggcggtggtcatcctggtcacggacgtctctgtggattcagtggatgcagcagctgatgccgccaggtccaacagagtgacagtgttccctattggaattggagatcgctacgatgcagcccagctacggatcttggcaggcccagcaggcgactccaacgtggtgaagctccagcgaatcgaagacctccctaccatggtcaccttgggcaattccttcctccacaaactgtgctctggatttgttaggatttgcatggatgaggatgggaatgagaagaggcccggggacgtctggaccttgccagaccagtgccacaccgtgacttgccagccagatggccagaccttgctgaagagtcatcgggtcaactgtgaccgggggctgaggccttcgtgccctaacagccagtcccctgttaaagtggaagagacctgtggctgccgctggacctgcccctgcgtgtgcacaggcagctccactcggcacatcgtgacctttgatgggcagaatttcaagctgactggcagctgttcttatgtcctatttcaaaacaaggagcaggacctggaggtgattctccataatggtgcctgcagccctggagcaaggcagggctgcatgaaatccatcgaggtgaagcacagtgccctctccgtcgagctgcacagtgacatggaggtgacggtgaatgggagactggtctctgttccttacgtgggtgggaacatggaagtcaacgtttatggtgccatcatgcatgaggtcagattcaatcaccttggtcacatcttcacattcactccacaaaacaatgagttccaactgcagctcagccccaagacttttgcttcaaagacgtatggtctgtgtgggatctgtgatgagaacggagccaatgacttcatgctgagggatggcacagtcaccacagactggaaaacacttgttcaggaatggactgtgcagcggccagggcagacgtgccagcccatcctggaggagcagtgtcttgtccccgacagctcccactgccaggtcctcctcttaccactgtttgctgaatgccacaaggtcctggctccagccacattctatgccatctgccagcaggacagttgccaccaggagcaagtgtgtgaggtgatcgcctcttatgcccacctctgtcggaccaacggggtctgcgttgactggaggacacctgatttctgtgctatgtcatgcccaccatctctggtctacaaccactgtgagcatggctgtccccggcactgtgatggcaacgtgagctcctgtggggaccatccctccgaaggctgtttctgccctccagataaagtcatgttggaaggcagctgtgtccctgaagaggcctgcactcagtgcattggtgaggatggagtccagcaccagttcctggaagcctgggtcccggaccaccagccctgtcagatctgcacatgcctcagcgggcggaaggtcaactgcacaacgcagccctgccccacggccaaagctcccacgtgtggcctgtgtgaagtagcccgcctccgccagaatgcagaccagtgctgccccgagtatgagtgtgtgtgtgacccagtgagctgtgacctgcccccagtgcctcactgtgaacgtggcctccagcccacactgaccaaccctggcgagtgcagacccaacttcacctgcgcctgcaggaaggaggagtgcaaaagagtgtccccaccctcctgccccccgcaccgtttgcccacccttcggaagacccagtgctgtgatgagtatgagtgtgcctgcaactgtgtcaactccacagtgagctgtccccttgggtacttggcctcaaccgccaccaatgactgtggctgtaccacaaccacctgccttcccgacaaggtgtgtgtccaccgaagcaccatctaccctgtgggccagttctgggaggagggctgcgatgtgtgcacctgcaccgacatggaggatgccgtgatgggcctccgcgtggcccagtgctcccagaagccctgtgaggacagctgtcggtcgggcttcacttacgttctgcatgaaggcgagtgctgtggaaggtgcctgccatctgcctgtgaggtggtgactggctcaccgcggggggactcccagtcttcctggaagagtgtcggctcccagtgggcctccccggagaacccctgcctcatcaatgagtgtgtccgagtgaaggaggaggtctttatacaacaaaggaacgtctcctgcccccagctggaggtccctgtctgcccctcgggctttcagctgagctgtaagacctcagcgtgctgcccaagctgtcgctgtgagcgcatggaggcctgcatgctcaatggcactgtcattgggcccgggaagactgtgatgatcgatgtgtgcacgacctgccgctgcatggtgcaggtgggggtcatctctggattcaagctggagtgcaggaagaccacctgcaacccctgccccctgggttacaaggaagaaaataacacaggtgaatgttgtgggagatgtttgcctacggcttgcaccattcagctaagaggaggacagatcatgacactgaagcgtgatgagacgctccaggatggctgtgatactcacttctgcaaggtcaatgagagaggagagtacttctgggagaagagggtcacaggctgcccaccctttgatgaacacaagtgtctggctgagggaggtaaaattatgaaaattccaggcacctgctgtgacacatgtgaggagcctgagtgcaacgacatcactgccaggctgcagtatgtcaaggtgggaagctgtaagtctgaagtagaggtggatatccactactgccagggcaaatgtgccagcaaagccatgtactccattgacatcaacgatgtgcaggaccagtgctcctgctgctctccgacacggacggagcccatgcaggtggccctgcactgcaccaatggctctgttgtgtaccatgaggttctcaatgccatggagtgcaaatgctcccccaggaagtgcagcaagtgaggctgctgcagctgcatgggtgcctgctgctgcctgccttggcctgatggccaggccagagtgctgccagtcctctgcatgttctgctcttgtgcccttctgagcccacaataaaggctgagctcttatcttgctgcatgttctgctcttgtgcccttctgagcccacaat

SEQ ID NO: 563 - DNA, 4232 bp, human
aaaattgcgtttgagtttgccgcgagccgggccaatcggttttgccaacgcatgcccacgtgctggcgaacaaatgtaaacacggagatcgtgtgccgggcacttggtttcgtggtgggcaactgtgctgctgtttcttttggccgcggacaaggtcggcagaggtggacccctgcttgggagagctcttctcgctgtgctgacacccgcccctaacagtcacccaccccggggaaataatggggctcggaggcctcctcccagccagtgtccagcctaagcacatcggctcccgcagttcagaaaggtcccgaggcccgagtcaccatttccggctcagacctcgacccggaacgtggctgcccactgccacgcccactacgccccagtggctcgccccaggggacgaggggcaagaagcggcctccgagggcagcggccgaaggccattcggtccctggctcttcccagctcgcagagacccggaagcgctgcccggccgcctgcccctcttcagatcccccagcaccggaggagcagcgagggggctgcgtccaggccggctttcgggtcggcttaggcgaatccagctctcttttgcccctcccagaaggcccagccccgtccgggcggtgttcgggcggcgccgggccgggccccccgccgccccaggctcgctcataggcccggaacaccacagcccgcccagacttggctggcgccgagccgggggtggagccagcgggttcccgccaaaatcgcgtagctggtccttcccccgcgggctacgtcgcgccctcctttttttttcaaacccggagctgcactgggattggtggactgggcactcacgtggttaacggtcgcgggaagccgcggagcccgaacctgagactggacctgaggagacctcagcctcggtgctcgggccgccccgcctctgccggaaagtccgcgccgccgctgccgccaccgtccgcagcccgagcgccccggagccgcaggccgccgccgcgcagagacgccgcggctgcgactaggcgcgcccagccgcacgtggcggacccgcccccaggcccgcagtgtcctggaccccgcaggcctccgctctcctgtcctcggccccgtccccagggccgcgatgagcttcctgagccgacagcagccgccgccaccccgccgcgccggggcggcctgcaccttgcggcagaagctgatcttctcgccctgcagcgactgtgaggaggaggaagaagaggaggaggaggagggcagcggccacagcaccggggaggactcggcctttcaagagcccgactcgccgctgccgcccgcgcggagccccacggagcccgggcccgagcgccgccgctcgcccgggccggcccccgggagccccggcgagctggaggaggacctgttgctgcccggcgcctgcccgggcgcggacgaggcgggcggtggggcggagggcgactcgtgggaggaggagggcttcggctcctcgtcgccggtcaagtcgccggcggccccctacttcctgggtagctctttctcgccggtgcgctgcggcggcccaggagatgcgtcgccgcggggttgcggggcgcgccgggcgggcgaaggccgccgctcgccgcggccggaccacccgggcaccccgccacacaagaccttccgcaagctgcgactcttcgacaccccgcacacgcccaagagtttgctctccaaagctcggggaattgattccagctctgttaaactccggggtagttctctcttcatggatacagaaaaatcaggaaaaagggaatttgatgtgcgacagactcctcaagtgaatattaatccttttactccggattctttgttgcttcattcctcaggacagtgtcgtcgtagaaagagaacgtattggaatgattcctgtggtgaagacatggaagccagtgattatgagcttgaagatgaaacaagacctgctaagagaattacaattactgaaagcaatatgaagtcccggtatacaacagaatttcatgagctagagaaaatcggctctggagaatttggttctgtatttaagtgtgtgaagaggctggatggatgcatttatgccattaagcgatcaaaaaagccattggcgggctctgttgatgagcagaacgctttgagagaagtatatgctcatgcagtgcttggacagcattctcatgtagttcgatatttctctgcgtgggcagaagatgatcatatgcttatacagaatgaatattgtaatggtggaagtttagctgatgctataagtgaaaactacagaatcatgagttactttaaagaagcagagttgaaggatctccttttgcaagttggccgaggcttgaggtatattcattcaatgtctttggttcacatggatataaaacctagtaatattttcatatctcgaacctcaatcccaaatgctgcctctgaagaaggagacgaagatgattgggcatccaacaaagttatgtttaaaataggtgatcttgggcatgtaacaaggatctccagtccacaagttgaagagggcgatagtcgttttcttgcaaatgaagttttacaggagaattatacccatctaccaaaagcagatatttttgcgcttgccctcacagtggtatgtgctgctggtgctgaacctcttccgagaaatggagatcaatggcatgaaatcagacagggtagattacctcggataccacaagtgctttcccaagaatttacagagttgctaaaagttatgattcatccagatccagagagaagaccttcagcaatggcactggtaaagcattcagtattgctgtccgcttctagaaagagtgcagaacaattacgaatagaattgaatgccgaaaagttcaaaaattcacttttacaaaaagaactcaagaaagcacagatggcaaaagctgcagctgaggaaagagcactcttcactgaccggatggccactaggtccaccacccagagtaatagaacatctcgacttattggaaagaaaatgaaccgctctgtcagccttactatatactgagctactcctttcccacctccccctgaacactgtgacaagaggaagctaggttgaaatcactgatagaatccagtttgcaattactttctcgattggtgtcagtagttttactgattaggacttttattgtgaattacagttgaaagctgtattttgatgattgctatgtcaggctttcatctaatcttaccagtctgtcttctgtaggatgtgtcactgttggatgttacaccagcctttccagggttaaccactgtggtggtgtgctgcttatagtttgctgttgcattgtaataaaaggtgtctttccctgtagtgacctgtaaaaagtactcaagggctttattacagacataccctccctttgaaaagggacatgctaaaagactcattactactcagccttcaatgtacctgtgtgtccatcttatatttcttttttttttttaattgtgaattagacttgtatatcccactgggagcactttgtaggcattgcatgaaccatgggatgatgattctgtggaggtattgccttgtgaatttgctgctattttagttttgtctttgctgtaaacttgtagcattaaacaatcattgttgttaataggtcttctttttgaaacaattatgtgaaatgtatagctgcttttgatgaaaagcagctatttgccttttttttttttcctttgaactttgaagctagtgcattggaaaaatgcaccctttccctcctttggaatgctgtattaatgtagtataataattactggttttgtaacttgttctggtaatgtccttcccggactctttttaaatgtctccccctaagttttatacttgattgtattattagtctgtttttaaatgttttgcccggtttttctcttcaatatttgtgtatataaaccgatcttcgtgatactgtacatagctgtttgaaatgccagaatgacttctgacattccaagtttttcacaaaatatattttatctgtgattagccatttgactaataatactggctaacagatgttgaaaaaaattgtctgtttgttttctcattaattttggtctaaaacatgtttgcacttgtctttgacttgtgttttattaacattgattggcatattaaaagtcactctgagctt

SEQ ID NO: 564 - DNA, 8458 bp, human
tggtcttgaactcctgaccttgtgatccgctcgcctcagcctcccaaagtgctgggattacaggcatgagccaccgtgcctgtcctagaaccactggtaactcttaactgagacaagatttcgccatgttgcccaggctggtctcgaacttctgagctcaagcgatctacctgcctcgtcctcccaaagtgttggaattgcaggtgtgagccactgcacccggcccttgcctcatgtttgaatgataatttacctgggcataaaattctggacacttgtggtggcacgagctgtctgcttttctgtggagactgcgggttgcagacaccagcagccccctattgctgcacgtcaggtgtcctccacctcagtactgtggacatctcgggccgcatagccctgttgcgcgggcatcctgtgcgttgcaggagatgcagcagcatccatgaccgcaacccatcagagtgttctaagaacggaagcatctgggctggatggaatttagcatcaagcagagtcccctttctgttcagagtgttgtaaagtgcataaagatgaagcaggcaccagaaatcctcggcagtgccaacgggaagactccgagctgcgaggtgaaccgcgagtgttctgtgttcctcagcaaagcccagctctccagtagcctgcaggagggggtcatgcagaagtttaacggccacgacgccctgccctttattccagccgacaagctgaaagatcttacttcccgggtgtttaatggagaacccggcgcacacgatgccaaactgcgttttgagtcccaggaaatgaaagggattgggacaccccctaacactacccctatcaaaaatggctctccagaaattaagctgaaaatcaccaaaacatacatgaatgggaagcctctctttgaatcttccatttgtggtgacagtgctgctgatgtgtctcagtcagaagaaaatggacaaaaaccagaaaacaaggcgagaaggaacaggaagaggagcataaaatatgactccttgctggagcagggccttgtcgaagcagctcttgtgtctaagatctcaagtccttcagataaaaagattccagctaagaaagagtcttgtccaaacactggaagagacaaagaccacctgttgaaatacaacgttggtgatttggtgtggtccaaagtgtcgggttacccttggtggccttgcatggtttctgcagatccactccttcacagctataccaaacttaaaggtcagaaaaagagtgcacgccagtatcacgtacagttctttggtgacgccccagaaagagcttggatatttgagaagagcctcgtagcttttgaaggagaaggacagtttgaaaaattatgccaggaaagtgccaagcaggcacccacgaaagctgagaaaattaagctattgaaaccaatttcagggaaattgagggcccagtgggaaatgggcattgttcaagcagaagaagctgcaagcatgtcagtggaggagcggaaagccaagttcacctttctctatgtgggggaccagcttcatctcaaccctcaagtagccaaggaggctggcattgctgcagagtctttgggagaaatggcagaatcctcaggagtcagtgaagaagctgctgaaaaccccaagtctgtgagagaagagtgcattcccatgaagagaaggcggagggccaaactgtgtagctctgcagagaccctggagagtcaccccgacatagggaagagtactcctcaaaagacggcagaggctgaccccagaagaggagtagggtctcctcctgggaggaagaagaccacagtctccatgccacgaagcaggaagggagatgcagcatcccagtttttggtcttctgtcaaaaacacagggatgaggtggtagctgagcacccagatgcttcaggtgaggagattgaagagctgctcaggtcacagtggagtctgctgagtgagaagcagagagcacgctacaacaccaagtttgccctggtggcccctgtccaggctgaagaagactctggtaatgtaaatgggaaaaaaagaaaccacacaaagaggatacaggaccctacagaagatgctgaagctgaggacacacccaggaaaagactcaggacggacaagcacagtcttcggaagagagacacaatcactgacaaaacggccagaacaagctcttacaaggccatggaggcagcctcctcgctcaagagccaggcagcaacgaaaaatctgtctgatgcatgtaaaccactgaagaagcgaaatcgggcttccacggcagcatcttcagctcttgggtttagcaaaagttcatctccttctgcatccttaactgagaatgaggtctcggacagcccgggagacgagccctcggagtccccatacgaaagtgcagacgaaacacaaactgaagtatctgtctcatccaaaaagtctgagcgaggagtgactgccaaaaaggagtatgtgtgccagctgtgtgagaagccgggcagcctcctgctctgtgaaggaccctgctgcggagctttccacctcgcctgccttgggctttcccggaggccagaagggaggttcacctgcagcgagtgtgcctcaggtgtcgcccggcacagtctggggtctgtgaggatgatgagaggacacctgcacagccgtggcccttcctgcctactcaccgggcccaaggagtctcctatctcacgtcagaacacttcctgggtcaggaagacacctggagagtctcccaggccatggcagccccacagcagcacctcacttatgggagtgtctgtctgcctgcccagaatgataagtgactgctccaccactggccagctgctctcaaggaggaaaggcctcttttcataggagccccttctttcaagcttcttgccagttagactgggcctccccagccaggctgcctagtaagattctcctgtatttcaggtgaagctggagctcagatcgcagcaaggtaatccttgatggctggatctttttgctggagaatgcttggactagtgagcaaggttggaaacagggccaggtgctttagcagcgtggctgcctctgaagaggagttgcttgattttagtggctcagaactgcaatttaattcttgttctttgcacctctctctccaccccttctttaactttttgttagggattcactcatgtttcgtgtgtaaagagagcaagacagatgttaagcgctgtgtggtaactcagtgtggaaaattttaccatgaggcttgtgtgaaaaaataccctctgactgtatttgagagccgaggtttccgctgccccctccacagctgtgtgagctgccatgcttccaacccttcaaacccaaggccgtcaaaaggtaaaatgatgcggtgtgtccgctgccccgttgcctatcacagcggggatgcttgtctggcagcaggatgctcagtgatcgcctccaacagcatcatctgcactgcccacttcactgctcggaaggggaagcgacaccacgcccacgtcaacgtgagctggtgcttcgtgtgctccaaaggggggagccttctgtgctgtgagtcctgcccagcggccttccaccctgactgcctgaacatcgagatgcctgacggcagctggttctgcaatgactgcagggctgggaagaagctgcacttccaggatatcatttgggtgaaacttgggaactacagatggtggccggcagaagtttgccatcccaaaaatgttcccccaaatattcagaaaatgaagcacgagattggagaattccctgtgtttttctttgggtctaaagattattactggacgcatcaggcgcgagtgttcccgtacatggagggggaccggggcagccgctaccagggggtcagagggatcggaagagtcttcaaaaacgcactgcaagaagctgaagctcgttttcgtgaaattaagcttcagagggaagcccgagaaacacaggagagcgagcgcaagcccccaccatacaagcacatcaaggtgaataagccttacgggaaagtccagatctacacagcggatatttcagaaatccctaagtgcaactgcaagcccacagatgagaatccttgtggctttgattcggagtgtctgaacaggatgctgatgtttgagtgccacccgcaggtgtgtcccgcgggcgagttctgccagaaccagtgcttcaccaagcgccagtacccagagaccaagatcatcaagacagatggcaaagggtggggcctggtcgccaagagggacatcagaaagggagaatttgttaacgagtacgttggggagctgatcgacgaggaggagtgcatggcgagaatcaagcacgcacacgagaacgacatcacccacttctacatgctcactatagacaaggaccgtataatagacgctggccccaaaggaaactactctcgatttatgaatcacagctgccagcccaactgtgagaccctcaagtggacagtgaatggggacactcgtgtgggcctgtttgccgtctgtgacattcctgcagggacggagctgacttttaactacaacctcgattgtctgggcaatgaaaaaacggtctgccggtgtggagcctccaattgcagtggattcctcggggatagaccaaagacctcgacgaccctttcatcagaggaaaagggcaaaaagaccaagaagaaaacgaggcggcgcagagcaaaaggggaagggaagaggcagtcagaggacgagtgcttccgctgcggtgatggcgggcagctggtgctgtgtgaccgcaagttctgcaccaaggcctaccacctgtcctgcctgggccttggcaagcggcccttcgggaagtgggaatgtccttggcatcattgtgacgtgtgtggcaaaccttcgacttcattttgccacctctgccccaattcgttctgtaaggagcaccaggacgggacagccttcagctgcaccccggacgggcggtcctactgctgtgagcatgacttaggggcggcatcggtcagaagcaccaagactgagaagccccccccagagccagggaagccgaaggggaagaggcggcggcggaggggctggcggagagtcacagagggcaaatagcgccaggcggccgcttggccggatccaggggcggtgcagggcggccggccctgcctgcgggagagggcgagcatgaactggcccggaggacccagctcgagccgccaggacacagacgtacaggcctcctcgggagggagcgcctccccaccactgagccatcctcagcagcgtccgctgcgtctgcactgatgaccgtctgagcccagctcagcgttcctggacaaacagcctcactcctcagcgttaccgccacacttgaatttctccgaatgtcaaggttccctcccactctatttttttaggttaaagttaattggcatatggaatgttttaatctcctctgaaatgtgtagcgtaggcttttcccaagggtcgctagaaactcgtcttcgcgttgccccctttctggctctcagcgccgtcgccactcgggagaggctgggtgaggcccgtgtgaggactgaccctggattcctcgaaactgccattgtgatcattactctgctctttggaaatggctgtatcatttttttgtactaatgtgaattgttcctcagaaacgcttcttttccatcctagtgagaagctggccctgcaggtggtggcagcaatggtgttgtaagatttcctcccgtagttttttctcctcatggatttgaatgaaatgccaataacacgtccactttcaacgtgtagtttacgcggagcactttcgaggcctggccgggttgggcctacttctcacctgggcctatcttctgaactcgctaggttcttatcaacatttgggggataactttgtatatttttttcatttggcttttctttaccagtttctgatttttattctcaatatatttttgctaaacctatttcacaaatcaccaccgactgaagtgtgtgtttactgatgcggccctgagctccatggcgaaaggagtgactttgcagggcgtgagaccgcagtctgcttagagcacaggaagtgacaacttagggagccccgtagggcgctgcaggccccggggaccccagcacgtgggtctaaagagagacggagtctagctctcctgccacccagagtggcttccatctcagcactctgtgggtctggtgatggaagatgcagtctctgctgatcacatgtgccctctgccagggcacctactgagaggtgcggtcctgggggtggaggcctgcctggcaggtgtgcgtgcctcgtacgtgtgttatgggcactggtctaggccaggtatgacacccactctcctgtgagatttcactttagtttttaaaaggtccagttctacagagtgagacctatctatctgagtactacatatgttttaagacttggttctttttttgagggatccttgaccctgggaagtctggagcaccctgagaagggggcaccatgtgtgcctttgcccacgtgtcctgaggggctgcttgtctgggagggagggagagaacattcagcagcaggtgcttttttatggccttttcttaaaataacctaagggggacacatccatcttgcagagaagtttacagaactccccttgaaaactgctgctgaggctcctgttaaattttctgtggcatcttttatgccttggtaaaaactgcagtgtctttggacctgagagtggctactccgtggttttgtgacctgtaagcgtggggttcaggggtgtgtggccctgcagggtcccacgcctccctgagcactgactggaagtttcactggctggtggctgtcccttctcccatcagggtccccagcaaagttaactacacagaggacccaggggaaacgagctgtgtagccactgacttgctcgcgcggccgtggcctctgaggggcactcgccggttaagacagggtgggagtagtgctttccagttcagactctaacttctcccaaagtgtcctaagaaaatactggatcggctcatagatttatgctccttatgatgccctaacttggaaggttgttctagggacaggccgggcagtgtccccacacacaccttagagtcgaaggccccagggccccgctgtcacttgcccaaaagatcccttccggcaggtaagggactaccaatgcttacgtcaaaacagcagaatcggctttgcagtgcactttggggagcagatattaacttatttttgtgttggacagtagtgaaatcttgtgatttttaatcgctttgataatacttccaaattttatgatttttctgaaggaaataatgcaaacattttaaatatgtttctccccctttccaaaaactgttaaactaatgagcaagtaacactaactttgaatgtctctacaatacccgttgataactcagtggagccaggctttggggtagcggccctgagcttgcagggtttctcgccactggggctgaccacgcccccagctgtgaccgtgggtgtggctggctctcggccctgcccagctttgttctgaggacgtggtgacttcctgaacatcagcttcaatcctccatcattaatgtgaagcaaaacacaaaaaccgccccaatccctcaggattccttggcatccgaaaccagcatctgcacctaaacccatacccacccgtgtgcgcccacagggggatgtgtccgaatgggcagcttaaaatgtggtcacctgtgggggaaactcttcaggcacctgaagtgagaacccagctgtccgtcctcaggccggcctttcttccggcgacacccgtccatggctggctgggtccccttcgcagtgtttgtctgtcttgacatctaaaccccggcgtgtgcagtgcccatcttccaggactaccttattttccagaattaaacctgttttataattcaagttaatgcaaatgactgtcagttgccaaatatcttgatcctgtgagtgtagttgatgactgtttgttagtcagtagagtaaaatgctgtgtccacggggtgtcacagcctcaccataccctgttgaggtgtgaaatgccccgtcagaaattaaatacaaacttaaatgtgcctattggtgtctaaacttcatacaatgtaaggtcagattccttttaggaatactgggtgctgtcaccaggtttgatagttagacttaaaaacttgaaattcactttttggggggagggatatactgaaatagagagttgagacttgccagttgggggaaaatagcatttaaaatggaaagctgtgtttggaaaattgtgtatgagtatttttgtattaaaaacattttaaaggcttttttcttaa

SEQ ID NO: 565 - DNA, 2263 bp, human
tagcgagggacgcgtaggtgtcttcataagatgccggggcagcggcgcgcgctttcccccaagatggcgtccatgcgggagagcgacacgggcctgtggctgcacaacaagctgggggccacggacgagctgtgggcgccgcccagcatcgcgtccctgctcacggccgcggtcatcgacaacatccgtctctgcttccatggcctctcgtcggcagtgaagctcaagttgctactcgggacgctgcacctcccgcgccgcacggtggacgagatgaagggcgccctaatggagatcatccagctcgccagcctcgactcggacccctgggtgctcatggtcgccgacatcttgaagtcctttccggacacaggctcgcttaacctggagctggaggagcagaatcccaacgttcaggatattttgggagaacttagagaaaaggtgggtgagtgtgaagcgtctgccatgctgccactggagtgccagtacttgaacaaaaacgccctgacgaccctcgcgggacccctcactcccccggtgaagcattttcagttaaagcggaaacccaagagcgccacgctgcgggcggagctgctgcagaagtccacggagaccgcccagcagttgaagcggagcgccggggtgcccttccacgccaagggccgggggctgctgcggaagatggacaccaccaccccactcaaaggcatcccgaagcaggcgcccttcagaagccccacggcgcccagcgtcttcagccccacagggaaccggacccccatcccgccttccaggacgctgctgcggaaggaacgaggtgtgaagctgctggacatctctgagctggatatggttggcgctggccgagaggcgaagcggagaaggaagactctcgatgcggaggtggtggagaagccggccaaggaggaaacggtggtggagaacgccaccccggactacgcagccggcctggtgtccacgcagaaacttgggtccctgaacaatgagcctgcgctgccctccacgagctaccttccctccacgcccagcgtggttcccgcctcctcctacatccccagctccgagacgcccccagccccatcttcccgggaagccagccgcccaccagaggagcccagcgccccgagccccacgttgccagcgcagttcaagcagcgggcgcccatgtacaacagcggcctgagccctgccacacccacgcctgcggcgcccacctcgcctctgacacccaccacacctccggctgtcgcccctaccactcagacacccccggttgccatggtggccccgcagacccaggcccctgctcagcagcagcctaagaagaacctgtccctcacgagagagcagatgttcgctgcccaggagatgttcaagacggccaacaaagtcacgcggcccgagaaggccctcatcctgggcttcatggccggctcccgagagaacccgtgccaggagcagggggacgtgatccagatcaagctgagcgagcacacggaggacctgcccaaggcggacggccagggtagcacaaccatgctggtggacacagtgtttgagatgaactatgccacgggccagtggacgcgcttcaagaagtacaagcccatgaccaatgtgtcctagaaccacctgcctcacagctggccgtcacttgtgggggtccacgggacgatggctttgccagcttaaagtaaccggatggcggacacctggcccccgaggtcccccggccgccgccctgctgctgacccagcctgttttaagttctggatgcatttctctggggtatttggggcttatttttaaaattttaatatgggttcttttttgtgtgatttaaagacactttttggactcaacgttacatttttgaatgtagtaagtaaattaaccaaaaaagttacaacttcctaattttagtgacagctctgcctgtttgttagactcttactttttaaaatcttttctattttccctcgctggggcagtgccctcctacccccagggttgaggggaccaaggtggcacggtggtactgggggtgcggcagggacacccgaccacaccagagcgtgggagacggtgggccttgtcccctgcctgtgcctgcctgggagttttgtattcatcttttgtatagttgtggacatttaagacagtctttgggtacctattttcattgtaaaactatctgaaccattaaagtcgagcttttctaaagaaaaaaaaaaaaaaa

SEQ ID NO: 566 - DNA, 3658 bp, human
gcccagacaagcaacatggctcggaaacgcgcggccggcggggagccgcggggacgcgaactgcgcagccagaaatccaaggccaagagcaaggcccggcgtgaggaggaggaggaggatgcctttgaagatgagaaacccccaaagaagagccttctctccaaagtttcacaaggaaagaggaaaagaggctgcagtcatcctgggggttcagcagatggtccagcaaaaaagaaagtggccaaggtgactgttaaatctgaaaacctcaaggttataaaggatgaagccctcagcgatggggatgacctcagggactttccaagtgacctcaagaaggcacaccatctgaagagaggggctaccatgaatgaagacagcaatgaagaagaggaagaaagtgaaaatgattgggaagaggttgaagaacttagtgagcctgtgctgggtgacgtgagagaaagtacagccttctctcgatctcttctgcctgtgaagccagtggagatagagattgaaacgccagagcaggcgaagacaagagaaagaagtgaaaagataaaactggagtttgagacatatcttcggagggcgatgaaacgtttcaataaaggggtccatgaggacacacacaaggttcaccttctctgcctgctagcaaatggcttctatcgaaataacatctgcagccagccagatctgcatgctattggcctgtccatcatcccagcccgctttaccagagtgctgcctcgagatgtggacacctactacctctcaaacctggtgaagtggttcattggaacatttacagttaatgcagaactttcagccagtgaacaagataacctgcagactacattggaaaggagatttgctatttactctgctcgagatgatgaggaattggtccatatattcttactgattctccgggctctgcagctcttgacccggctggtattgtctctacagccaattcctctgaagtcagcaacagcaaagggaaagaaaccttccaaggaaagattgactgcggatccaggaggctcctcagaaacttccagccaagttctagaaaaccacaccaaaccaaagaccagcaaaggaaccaaacaagaggaaacctttgctaagggcacctgcaggccaagtgccaaagggaagaggaacaagggaggcagaaagaaacggagcaagccctcctccagcgaggaagatgagggcccaggagacaagcaggagaaggcaacccagcgacgtccgcatggccgggagcggcgggtggcctccagggtgtcttataaagaggagagtgggagtgatgaggctggcagcggctctgattttgagctctccagtggagaagcctctgatccctctgatgaggattccgaacctggccctccaaagcagaggaaagcccccgctcctcagaggacaaaggctgggtccaagagtgcctccaggacccatcgtgggagccatcgtaaggacccaagcttgccagcggcatcctcaagctcttcaagcagtaaaagaggcaagaaaatgtgcagcgatggtgagaaggcagaaaaaagaagcatagctggtatagaccagtggctagaggtgttctgtgagcaggaggaaaagtgggtatgtgtagactgtgtgcacggtgtggtgggccagcctctgacctgttacaagtacgccaccaagcccatgacctatgtggtgggcattgacagtgacggctgggtccgagatgtcacacagaggtacgacccagtctggatgacagtgacccgcaagtgccgggttgatgctgagtggtgggccgagaccttgagaccataccagagcccatttatggacagggagaagaaagaagacttggagtttcaggcaaaacacatggaccagcctttgcccactgccattggcttatataagaaccaccctctgtatgccctgaagcggcatctcctgaaatatgaggccatctatcccgagacagctgccatccttgggtattgtcgtggagaagcggtctactccagggattgtgtgcacactctgcattccagagacacgtggctgaagaaagcaagagtggtgaggcttggagaagtaccctacaagatggtgaaaggcttttctaaccgtgctcggaaagcccgacttgctgagccccagctgcgggaagaaaatgacctgggcctgtttggctactggcagacagaggagtatcagcccccagtggccgtggacgggaaggtgccccggaacgagtttgggaatgtgtacctcttcctgcccagcatgatgcctattggctgtgtccagctgaacctgcccaatctacaccgcgtggcccgcaagctggacatcgactgtgtccaggccatcactggctttgatttccatggcggctactcccatcccgtgactgatggatacatcgtctgcgaggaattcaaagacgtgctcctgactgcctgggaaaatgagcaggcagtcattgaaaggaaggagaaggagaaaaaggagaagcgggctctagggaactggaagttgctggccaaaggtctgctcatcagggagaggctgaagcgtcgctacgggcccaagagtgaggcagcagctccccacacagatgcaggaggtggactctcttctgatgaagaggaggggaccagctctcaagcagaagcggccaggatactggctgcctcctggcctcaaaaccgagaagatgaagaaaagcagaagctgaagggtgggcccaagaagaccaaaagggaaaagaaagcagcagcttcccacctgttcccatttgagaagctgtgagctgagcgcccactagaggggcacccaccagttgctgctgccccactacaggccccacacctgccctgggcatgcccagcccctggtggtgggggcttctctgctgagaaggcaaactgaggcagcatgcacggaggcggggtcaggggagacgaggccaagctgaggaggtgctgcaggtcccgtctggctccagcccttgtcagattcacccagggtgaagccttcaaagctttttgctaccaaagcccactcaccctttgagctacagaacactttgctaggagatactcttctgcctcctagacctgttctttccatctttagaaacatcagtttttgtatggaagccaccgggagatttctggatggtggtgcatccgtgaatgcgctgatcgtttcttccagttagagtcttcatctgtccgacaagttcactcgcctcggttgcggacctaggaccatttctctgcaggccacttaccttcccctgagtcaggcttactaatgctgccctcactgcctctttgcagtaggggagagagcagagaagtacaggtcatctgctgggatctagttttccaagtaacattttgtggtgacagaagcctaaaaaaagctaaaatcaggaaagaaaaggaaaaatacgaattgaaaattaaggaaatgttagtaaaatagatcagtgttaaactagattgtattcattactagataaaatgtataaagctctctgtactaaggagaaatgacttttataacattttgagaaaataataaagcatttatctaaaaaaaaaaaaaaaaaaaaaaaaaaaaa

SEQ ID NO: 567 - DNA, 2448 bp, human
gtcaccgccgaatggcagcctccagaaagccaccgcgagtaagggtgaatcaccaggattttcaactgagaaatttaagaataattgaacctaacgaggtgacacactcaggagacacaggtgtggaaacagacggcagaatgcctccaaaggtgacttcagagctgcttcggcagctgagacaagccatgaggaactctgagtatgtgaccgaaccgatccaggcctacatcatcccatcgggagatgctcatcagagtgagtatattgctccatgtgactgtcggcgggcttttgtctctggattcgatggctctgcgggcacagccatcatcacagaagagcatgcagccatgtggactgacgggcgctactttctccaggctgccaagcaaatggacagcaactggacacttatgaagatgggtctgaaggacacaccaactcaggaagactggctggtgagtgtgcttcctgaaggatccagggttggtgtggaccccttgatcattcctacagattattggaagaaaatggccaaagttctgagaagtgccggccatcacctcattcctgtcaaggagaacctcgttgacaaaatctggacagaccgtcctgagcgcccttgcaagcctctcctcacactgggcctggattacacaggcatctcctggaaggacaaggttgcagaccttcggttgaaaatggctgagaggaacgtcatgtggtttgtggtcactgccttggatgagattgcgtggctatttaatctccgaggatcagatgtggagcacaatccagtatttttctcctacgcaatcataggactagagacgatcatgctcttcattgatggtgaccgcatagacgcccccagtgtgaaggagcacctgcttcttgacttgggtctggaagccgaatacaggatccaggtgcatccctacaagtccatcctgagcgagctcaaggccctgtgtgctgacctctccccaagggagaaggtgtgggtcagtgacaaggccagctatgctgtgagcgagaccatccccaaggaccaccgctgctgtatgccttacacccccatctgcatcgccaaagctgtgaagaattcagctgagtcagaaggcatgaggcgggctcacattaaagatgctgttgctctctgtgaactctttaactggctggagaaagaggttcccaaaggtggtgtgacagagatctcagctgctgacaaagctgaggagtttcgcaggcaacaggcagactttgtggacctgagcttcccaacaatttccagtacgggacccaacggcgccatcattcactacgcgccagtccctgagacgaataggaccttgtccctggatgaggtgtaccttattgactcgggtgctcaatacaaggatggcaccacagatgtgacgcggacaatgcattttgggacccctacagcctacgagaaggaatgcttcacatatgtcctcaagggccacatagctgtgagtgcagccgttttcccgactggaaccaaaggtcaccttcttgactcctttgcccgttcagctttatgggattcaggcctagattacttgcacgggactggacatggtgttgggtcttttttgaatgtccatgagggtccttgcggcatcagttacaaaacattctctgatgagcccttggaggcaggcatgattgtcactgatgagcccgggtactatgaagatggggcttttggaattcgcattgagaatgttgtccttgtggttcctgtgaagaccaagtataattttaataaccggggaagcctgacctttgaacctctaacattggttccaattcagaccaaaatgatagatgtggattctcttacagacaaagagtgcgactggctcaacaattaccacctgacctgcagggatgtgattgggaaggaattgcagaaacagggccgccaggaagctctcgagtggctcatcagagagacgcaacccatctccaaacagcattaataaatacctccccggttttgtttttgtaaaatgctctggaggaaggaagaaacgtggcagatccctgacatctttcccctttcctttccttcttccctacctcccctttttactttagactttaagaagaacagaaaatcttcttatcctctttgatattttattgcaaacactcagtcttttatgattttttaattgttgagaacaagccaagaataaaattgctgcaccagaaggagggtccctccaaagttgaacacttggtgaaaggaagatgccccgacttctttggccagtgatggggaatcagtgagtgctccatgatggtcatgttccaggtgctagtacatcattcatgatcaccttaatgctcatgagactatatttatgatcagtgaataaaaatgtcagaactgtgaaaaaaaaaaaaaaaaaa

SEQ ID NO: 568 - DNA, 1674 bp, human
ggcctttgtctctcgtgcccgcacgtgcgtgtctcggtcagtagccctgcgcttctccttcactctcggcggttcaggaggctctgccgcagccggggccctcctgtgacctgcatgtactgggggattcgcagggaggatgtcgggacaccccggaagctgggaaatgaactcggttgcctttgaggatgtggctgtgaacttcacccaggaggagtgggctttgttggatccttcccagaagaatctctatagagacgtgatgcaggaaaccttcaggaatctggcttccataggaaacaaaggggaagaccagagcattgaagatcagtacaaaaattcttcaagaaatctaagttcatttcagatacatcagagaaatcacactggagagaaaccctatgaatgtatggaatgtgggaaagccttaggtttttcccgttctcttaatagacataaaaggattcacactggagaaaaacgctatgaatgtaagcaatgtgggaaagccttcagtcgttccagtcaccttcgtgaccatgaaagaactcatactggagagaaaccctatgaatgtaagcactgtgggaaagccttccgttactccaattgccttcattaccatgaaagaactcacactggagagaaaccttatgtgtgcatggaatgtggcaaagctttcagttgtctcagttccttgcaaggacatataaaggctcatgctggtgaagaaccctatccatgtaagcaatgtgggaaagccttcagatacgccagttcccttcagaaacacgagaaaactcatattgcacagaaaccctatgtatgtaacaattgtggtaaaggcttcagatgttccagttcccttcgtgaccatgaaaggactcatactggagagaaaccctatgaatgtcagaaatgtggcaaagcctttagtcgtgctagtaccctttggaagcataaaaaaactcatactggagaaaagccctataaatgtaaaaaaatgtaaaggctttaatcactacagtttttgtcaaaaacatgaacagtcacatacttgagagaaactgtgaatgtaaggtgtaggaaagtacttaattttcccagatttcctcaaatacatgaaacgaatcaaactggagataaaccctatgactataagcaataaggtaaagcattcaatttttccatttctttttgaaaacttgaaaggactcactgaagaaaatccatatgaatgtttaaaatgtggtaaggcctgcagttgttccagtggtatttgatggtataacataactcattctagagaaaaactttatgaaggtatcgaatgtgagaatgccttcatttatcctataactcactcagagacacatggtaacacatactccagattgaccttataaataaaagaatgcccaccagattgaaatcctagaaatacagaaaattctgaattttaacaattactttaaaggtcatgtgaaaactcccactggaaataaatcctgtaaatgtaaatattatggaaaaccttatggaaaataattatagtacaattctcaagaaaattcactatgtgaatgagatgttttaggagctataaataaattgaatatattggttgctcatttttgaagagagtctctagaatatagattttcacttcttttg

SEQ ID NO: 569 - DNA, 3038 bp, human
ggagttaggctcgcgccggcgcagtgtcggctgccggtgccgcggcctttgtctcgcagtcaggaggagcagggccagccgttcctgccagaagccagggcatgacccctggggtgcgcgtctccacagacccggagcaagtgacgtttgaggacgtggtagtggacttcagccaggaggagtgggggcagctgaagcctgcccagaggaccctgtaccgtgatgtaatgctggacaccttcaggcttctggtctctgtgggacattggttaccgaagccgaatgtcatctccctgctggagcaagaggcagagctgtgggcggtggagtctagacttccccaaggcgtgtacccagacttggaaactagacccaaagtcaaactgtcagttctaaagcaaggcatctctgaagaaatatccaacagtgtcatcttggtagaaagattcctgtgggatggtctgtggtactgcaggggtgaggacactgagggccactgggaatggagttgtgagagtctagagagcctggcagtgccggtggccttcacgcctgtgaagacgcctgttctggagcagtggcagaggaatgggtttggggaaaacataagtctgaaccctgatctcccacatcaaccaatgactcctgaaagacaaagcccccacacatggggaacacgtggaaaaagggagaagccagacctaaatgttttacagaaaacctgtgtaaaagagaaaccctacaaatgtcaggaatgcggaaaggcctttagtcacagctcagcacttatcgaacaccaccggacgcacacaggagagagaccttatgaatgtcacgaatgcttaaaaggcttccggaacagctcggcacttaccaaacaccagagaatccatactggggagaaaccctataaatgcactcagtgtgggaggaccttcaaccaaattgccccactgatccagcaccagagaactcacacaggtgagaagccctatgaatgcagcgaatgtgggaaatccttcagttttaggtcctccttcagccagcacgagcgaactcacacaggcgagaagccctacgagtgcagtgagtgtgggaaagccttccggcaaagcatccacctcacccagcatctgcgaatccacactggggagaaaccctatcagtgtggtgagtgtggcaaggccttcagccacagctcatccttgaccaaacaccagcgaatacacacaggggagaagccctacgagtgccatgagtgtggaaaagccttcacccagatcacaccactgattcagcaccagaggacccacacaggagaaaagccctatgagtgtggtgagtgtgggaaagccttcagtcagagcacactcctgaccgagcatcggaggattcacacaggagagaagccctatggatgcaacgagtgtgggaaaaccttcagccacagctcctcactcagccagcatgagcggacacacacaggagagaagccctatgagtgcagtcagtgtgggaaggccttccggcagagcacacacctcacccaacaccagcgaatccacacaggggagaagccctatgaatgcaatgactgcggcaaggcattcagtcacagctcgtccctcaccaaacatcagcgaatccacactggggagaagccctacgaatgcaaccagtgtggcagagccttcagccagcttgctccactcattcagcatcagaggatccacacaggagagaaaccctatgaatgtaaccagtgtggcagagccttcagccagagctcccttctcatcgaacaccagaggattcacaccaaggaaaagccgtatgggtgcaatgagtgtgggaaatccttcagccacagctcctcgctcagccagcacgaaaggacgcacactggggaaaagccctatgagtgtcacgattgcggaaagtcctttaggcagagcacccacctcactcagcaccggaggatccacacaggagagaagccatatgcatgcagggactgtggaaaggcctttacccacagctcctcccttaccaagcaccagagaactcacactggataaacccactccacatgtgctggggacataggaagaccttaagccatagctcatccctttctagatttgacccaatcatacacatgagaaacgtacgttcatacacaagccttttcacacagcactcccctcagacaccctcagagagttcacactgatgggaaatgaccatgggaccaccaagctctaggtcatccatctctgcatccaaatagtagggaaacgtggagataatcaacactcaggaccttcagccttgaacgcccattagtgctatgttatagaacctacaaaaaagaaatggaacaaatgtagtggatccagggaacgcttttgtccaaggattcaccgtattccaaaccagagatgttcaaattggtgagaaacccaacaaatgcctttcatatatacgagaaccaaatgaagtcagaatttgccattattgcacattacatttttgggggggaaagtgcttatgaatggtgcaggttgactctgatattcattcccaaatgacagtatggcagagtgttccagaaatgagagtggcatctttatggaatcactatggatactgactgtctcagtaaacagctgtcttgtctgtgtgtatattgtttgatcagggtacatggcagccagtcacagattggaattacatatgacaaagtatcagtgtactataaacaggtttttagttatccctgcattatttttgcaattaatctttatatgcaatgagattgaaaagctttgtatgggaagactcaaaatgtaaagctgcttccgtagagtctcactgattctgagatggcttttgctgctctgttctccctctacatttctctgcagaactcgcgttagaaacacagatatttgttttacaaaaagggagatttttcctttgttaaaccatcgtcttataagcaatagcaaattcatgttagaaaaaaaaaaaaaaaa

SEQ ID NO: 570 - DNA, 2314 bp, human
atgggccccaaaaaatcttggcgaagtcacttttttccactgcctgaggtttggctgttgctcctgttatcccaagctctaagcccttcccatggtccccagacccaggcaggggtaggtctcgtctggagtgtcccgctgccaagtgccctgagaagccagtcctgccttggtgctccactgagggacgcttcggagttaaccaccgtgcacttgttcccgacgcggggctggggcgcgcgcagggcattgtgggtgcatagttcagccagcgcgtcgtcggctgctagccgccgtcgcctgcgcgctcaggcctctgggattagtagttttagcctcgtggatggcggggcgcctcgcgaagatggtggcgcgcgtggcgtgtggctcccgtcgtctggccaagtctcagcgcagcgcaccggccggcgtctcgttggcctggagcccacacccaccgggtccctgaccccgcgccccccgcgcccggttcccggcatgcctcgcgcccgtaagggcaacacgctccggaagggtggtcagcgccgtggaggaggtgcccggagcagtgcccaagctgactcgggttccagtgacgatgaggcagccagtgaggcccgcagcaccgccagtgaatgccccagccttctcagcaccactgcagaggacagccttgggggggatgtcgtggatgagcagggccagcaggaagaccttgaggaaaagctgaaggagtatgtggactgtctcacagacaagagtgccaagacccggcagggtgctcttgagagcctgcgcctggccctagcgtcccgcctactccccgacttcttgctggagcgccgcctcacgctagccgatgccctggaaaagtgcctcaagaaagggaagggcgaggaacaagccctggctgctgctgtgctaggcctgctctgcgtgcagctgggccctggacctaagggtgaggagctgtttcacagcctgcagcctctgctggtctctgtgctcagtgacagcacagctagccctgctgcccggctccactgtgcttctgcccttggcctgggctgctacgtggctgccgctgacatccaggacctggtctcttgccttgcctgcttagaaagtgttttcagccggttctatggcttggggggcagctccacaagtcctgtggttcctgccagcctgcacggcctgctctctgctgccctgcaggcctgggcattgctgctcaccatctgccctagcacccaaatcagccacatccttgacaggcagctgccccggctgccccagctcttgtccagtgaaagtgtgaacctgcggatcgctgccggtgaaaccattgcactgctctttgagcttgcccgggaccttgaggaggagtttgtttacgaggacatggaggccctctgcagtgtcctgcgcactctggccactgacagtaacaagtaccgtgccaaggctgatcgtcggcgccagcgctctactttccgcgccgtgctgcactccgtggagggcggtgaatgcgaagaagagatagtgcgcttcggctttgaggtgctctacatggacagctgggctcggcaccggatctacgctgccttcaaggaagtgctgggttcgggcatgcaccaccacctccagaacaatgagctactccgtgacatctttggcctgggccctgtgctgttgctggatgccactgccctgaaggcctgcaaggttccacgctttgagaagcacctgtacaatgctgctgccttcaaagcccggaccaaggctcgaagccgtgtgcgggacaagcgggcagacatcctgtgaagcaggacctgctgaagaggagactttctatgcccttggtccgtatttttaacagaagacagtgcaacaactggtctccaccagtatttgtcactttattttttttaatgacaaaaccaaaaacagacatggggtgggtagctgggggcccggacacttgggaccctgacccctttgtccctgcactcagccctgtggccccttcctgtcctgtctcaggccaggctaaatatgtgccttcctcagggctgtggggcaggcactagggggcctttcccttcctttcctttctcaggccttgctcccccaggatgacccactcttaggggggtggtggcatctggacaaatgccaccacagcaggtggggtggcaaagctacctggaatggatttgtgtgctgatttttaaggattattacagataattaaacagaacggtcagccttcaaaaaaaaaaaaaaaaaaaaattcctgcggccgcaaggc

SEQ ID NO: 571 - DNA, 3000 bp, human
cccgagcggcgagacggtccccgccatgtctgcggccatgagggagaggttcgaccggttcctgcacgagaagaactgcatgactgaccttctggccaagctcgaggccaaaaccggcgtgaacaggagcttcatcgctcttggtgtcatcggactggtggccttgtacctggtgttcggttatggagcctctctcctctgcaacctgataggatttggctacccagcctacatctcaattaaagctatagagagtcccaacaaagaagatgatacccagtggctgacctactgggtagtgtatggtgtgttcagcattgctgaattcttctctgatatcttcctgtcatggttccccttctactacatgctgaagtgtggcttcctgttgtggtgcatggccccgagcccttctaatggggctgaactgctctacaagcgcatcatccgtcctttcttcctgaagcacgagtcccagatggacagtgtggtcaaggaccttaaagacaaggccaaagagactgcagatgccatcactaaagaagcgaagaaagctaccgtgaatttactgggtgaagaaaagaagagcacctaaaccagactggatggaaacttcctgccctctctgtaccttcctactggagcttgatgttatattagggactgtggtataattattttaataatgttgccttggaaacatttttgagatattaaagattggaatgtgttgtaagtttctttgcttacttttactgtctatatatatagggagcactttaaacttaatgcagtgggcagtgtccacgtttttggaaaatgtattttgcctctgggtaggaaaagatgtatgttgctatcctgcaggaaatataaacttaaaataaaattatataccccacaggctgtgtactttactgggctctccctgcacgcattttctctgtagttacatttaggataatctttatggttctacttcctataatgtacaattttatataattctgaaatgtttttaatgtatttgtgcacatgtacatatggaaatgttactgtctgactacaacatgcatcatgctcatggggagggagcaggggaaggttgtatgtgtcatttataacttctgtacagtaagaccacctgccaaaagctggaggaaccattgtgctggtgtggtctactaaataatactttaggaaatacgtgattaatatgcaagtgaacaaagtgagaaatgaaatcgaatggagattggcctggttgtttccctagtatatggcatatgaataccaggatagctttataaagcagttagttagttactcactctagtgataaatcgggaaatttacacacacacacacacacacacacacacagagtaacctgtaactctcaattccctgaaaaactagtaatactgtcttatctgctataaactttacatatttgtctattgtcaagatgctacaatggaaaccatttctggttttatcttcaaagcggagaaacatgttgatttagtcttctttcccaatcttcttttttaaaccagtttaaggaacttctgaagatttgtccacctctgattacatgtatgttcttgtttgtatcattagcaacaacatgctaatgacgacacctagctctaagagcaattctgggagaatgaaaggaagtataaagtaacccataatctgcttggcaatagttaagtcaatctatcttcagtttttctctggcctttaaggtcaaacacaagaggcttccctagtttacaagtcagagtcacttgtagtccatttaaatgccctcatccgtattctttgtgttgataagctgcacatgactacatagtaagtacagaacagtaaagttaaaacggatgtctccattgatctgccaaatcgttatagagagcaatttgtctggactagaaaatctgagttttacaccatactgttaagagtccttttgaattaaactagactaaaacaagtgtataactaaactaacaagattaaatatccagccagtacagtattttttaaggcaaataaagatgattagctcaccttgagataacaatcaggtaagatcataacaatgtctcatgatgtaaaaaatattaaagatatcaatactaagtgacagtatcactctaatataatatggatcagagcatttattttggggaggaaaacagtggtgattaccggcattttattaaacttaaaactttgtagaaagcaaacaaaattgttcttgggagaaaatcaacttttagattaaaaaaattttaagtatctaggagtatttaaatccttttcccataaataaaagtacagttttcttggtggcagaatgaaaatcagcaacttctagcatatagactatataatcagattgacagcatatagaatatattatcagacaagatgaggaggtataaaagttactattgctcataatgacttacaggctaaaattagttttaaaatactatattaaattctgaatgcaatttttttttgttcccttgagaccaaaatttaagttaactgttgctggcagtctaagtgtaaatgttaacagcaggagaagttaagaattgagcagttctgttgcatgatttcccaaatgaaatactgccttggctagagtttgaaaaactaattgagcctgtgcctggctagaaaacaagcgtttatttgaatgtgaatagtgtttcaaaggtatgtagttacagaattcctaccaaacagcttaaattcttcaagaaagaattcctgcagcagttattcccttacctgaaggcttcaatcatttggatcaacaactgctactctcgggaagactcctctactcacagctgaagaaaatgagcacacccttcacactgttattacctatcctgaagatgtgatacactgaatggaaataaatagatgtaaataaaattgagttctcatttaacaaaaaaaaaaaaaaaaaaa

SEQ ID NO: 572 - DNA, 2857 bp, human
ttttgaaaatcttgttgattctggggagccgagcgcgcggcgcgagcgtcacgccagacagcggcccgcgcgccttctcctcggcgtcggccgccgccgcctcccagaacctcctcgtgccctcgcgtgccaggcccgcggcggccgaaatccgcggttcacagcatgtccgcctcggcccctgctgcggagggggagggaacccccacccagcccgcgtccgagaaagaacccgaaatgcccggtcccagagaggagagcgaggaggaagaggacgaggacgacgaggaggaggaggaggaggaaaaagaaaagagtctcatcgtggaaggcaagagggaaaagaaaaaagtagagaggttgacaatgcaagtctcttccttacagagagagccatttacaattgcacaaggaaaggggcagaaactttgtgaaattgagaggatacatttttttctaagtaagaagaaaaccgatgaacttagaaatctacacaaactgctttacaacaggccaggcactgtgtcctcattaaagaagaatgtgggtcagttcagtggctttccatttgaaaaaggaagtgtccaatataaaaagaaggaagaaatgttgaaaaaatttagaaatgccatgttaaagagcatctgtgaggttcttgatttggagagatcaggtgtaaatagtgaactagtgaagaggatcttgaatttcttaatgcatccaaagccttctggcaaaccattgccgaaatctaaaaaaacttgtagcaaaggcagtaaaaaggaacggaacagttctggaatggcaaggaaggctaagcgaaccaaatgtcctgaaattctgtcagatgaatctagtagtgatgaagatgaaaagaaaaacaaggaagagtcttcagatgatgaagataaagaaagtgaagaggagccaccaaaaaagacagccaaaagagaaaaacctaaacagaaagctacttctaaaagtaaaaaatctgtgaaaagtgccaatgttaagaaagcagatagcagcaccaccaagaagaatcaaaacagttccaaaaaagaaagtgagtctgaggatagttcagatgatgaacctttaattaaaaagttgaagaaaccccctacagatgaagagttaaaggaaacaataaagaaattactggccagtgctaacttggaagaagtcacaatgaaacagatttgcaaaaaggtctatgaaaattatcctacttatgatttaactgaaagaaaagatttcataaaaacaactgtaaaagagctaatttcttgagatagaggacagagaagatgactcgttcccatagatttgaagatctgatttataccattataccagcaaagagaatgtatttccttttctaaatccttgttaagcaacgttagtagaacttactgctgacctttttatcttgagtgttatgtgaatttgagtttgctgttttaaattgcatttctatgccatttttagtttaaaatcttgcatggcattaattgttccttgcttttatagttgtattttgtacattttggatttctttatataaggtcatagattcttgagctgttgtggtttttagtgcacttaatattagcttgcttaaggcatacttttaatcaagtagaacaaaaactattatcaccaggatttatacatacagagattgtagtatttagtatatgaaatattttgaatacacatctctgtcagtgtgaaaattcagcggcagtgtgtccatcatattaaaaatatacaagctacagttgtccagatcactgaattggaacttttctcctgcatgtgtatatatgtcaaattgtcagcatgacaaaagtgacagatgttatttttgtatttttaaaaaacaattggttgtatataaagtttttttatttcttttgtgcagatcactttttaaactcacataggtaggtatctttatagttgtagactatggaatgtcagtgttcagccaaacagtatgatggaacagtgaaagtcaattcagtgatggcaacactgaaggaacagttaccctgctttgcctcgaaagtgtcatcaatttgtaattttagtattaactctgtaaaagtgtctgtaggtacgttttatattatataaggacagaccaaaaatcaacctatcaaagcttcaaaaactttgggaaagggtgggattaagtacaagcacatttggcttacagtaaatgaactgatttttattaactgcttttgcccatataaaatgctgatatttactggaaacctagccagcttcacgattatgactaaagtaccagattataatgccagaatataatgtgcaggcaatcgtggatgtctctgacaaagtgtgtctcaaaaataatatacttttacattaaagaaatttaatgtttctctggagttggggctcttggctttcagagtttggttaatcagtgttgattctagatgatcaacataatggaccactcctgaatgagacttaattttgtctttcaaatttactgtcttaaatcagtttattaaatctgaattttaaaacatgctgtttatgacacaatgacacatttgttgcaccaattaagtgttgaaaaatatctttgcatcatagaacagaaatatataaaaatatatgttgaatgttaacaggtattttcacaggtttgtttcttgatagttactcagacactagggaaaggtaaatacaagtgaacaaaataagcaactaaatgagacctaataattggccttcgattttaaatatttgttcttataaaccttgtcaataaaaataaatctaaatcaaaaaaaaaaaaaaaaaaaaaaaaaaa

SEQ ID NO: 573 - DNA, 2967 bp, human
tagctccgcgcgggggcttcctcggctccttgctgttgccgccgccgcagctgctgccgcggttggtggggttgggtgagaggaggagctgtcgcggaccctgtagagtcggtctctgttgctctttttgcctgaggagtcttccatcctacgtcgagctctgactcccgtgctgtcgagagggagtccccggggacacctcggcacgcagcggagatgcctctttttgccaccaatcccttcgatcaggatgttgagaaagcaaccagcgagatgaatactgctgaggactggggcctcattttggatatctgtgataaagttggtcagtctcgcactggacctaaggattgtcttcggtctattatgagaagagtgaaccacaaagatcctcacgttgctatgcaggctttgactcttctaggagcatgtgtatcaaactgtggcaaaatttttcatttagaagtatgttcaagagattttgctagtgaagtaagcaacgtattaaataagggtcatcctaaagtatgtgaaaaattaaaggctcttatggttgaatggacagatgaatttaagaatgatccacagcttagtctaatatcagcaatgattaagaaccttaaggaacaaggagttacgttcccagctattggctctcaggctgcagaacaagcaaaagcaagcccagctcttgtagccaaggatcctggtactgtggctaacaaaaaagaagaagaagatttagcaaaagccattgagttgtctctcaaggaacaaaggcagcagtcaaccaccctttccactttgtatccaagcacatccagtctcttaactaaccaccaacatgaaggccgaaaagttcgtgctatatatgactttgaagctgctgaagacaatgaacttacttttaaagctggagaaattattacagttcttgatgacagtgatcctaactggtggaaaggtgaaacccatcaaggcatagggttatttccttctaattttgtgactgcagatctcactgctgaaccagaaatgattaaaacagagaagaagacggtacaatttagtgatgatgttcaggtagagacaatagaaccagagccggaaccagcctttattgatgaagataaaatggaccagttgctacagatgctgcaaagtacagaccccagtgatgatcagccagacctaccagagctgcttcatcttgaagcaatgtgtcaccagatgggacctctcattgatgaaaagctggaagatattgatagaaaacattcagaactctcagaacttaatgtgaaagtgatggaggccctttccttatataccaagttaatgaacgaagatccgatgtattccatgtatgcaaagttacagaatcagccatattatatgcagtcatctggtgtttctggttctcaggtgtatgcagggcctcctccaagtggtgcctacctggttgcagggaacgcgcagatgagccacctccagagctacagtcttcccccggagcagctgtcttctctcagccaggcagtggtcccaccatccgcaaacccagcccttcctagtcagcagactcaggccgcttacccaaatacaatggtcagttccgttcaaggaaacacatatcccagccaggcgccagtatatagtcctcctcctgccgctactgctgctgctgcaactgccgatgtcactctgtaccagaatgcaggacctaatatgccccaggtgccaaactataacttaacatcatcaactctgcctcagcccggaggcagccaacagccacctcagccacagcaaccatattctcagaaggctctgctataggacccggtgttcctcttggtggcagatacctgctaaatgccactgacaatgttatgagattcattactatcttaagatgtgtttatcctcagcttataggaatctctccaggtcaacaggttcaaatattcaagaaggtagaactctcctcaatttacactgactttttagaggttcttccccccccgcccctgcagaggaatgaaactacttacaacatttaattcctttcataatatgaaagaattgatacaaggctatttgtctcgtaaacctggtctgcagaaagtcaaacttacaaaaactgttgtgacaaatgttatgtacatatattgatatgtaactgcattagtggccattttgaatcacagtggtgatcgtgtgaatatatttaacactgtgttaaattaatttacgttgctattttattttaatcataaacaactaccatgtttcttaatgttttgtgtaaatttaaggtaattatactatccttttaaacttcaagaaaacaaagttgttagcgtatttacatgaaggcgcattatgttgtcgtgtgtttcagtttcacattaaactgaaccttttactaattgtgagctaaagagatatatatatatatgtgtgtgtatatatatatatctacatgtctttctgtagcctctgcatactactggctgtcatcacaccagcgtacagtagctaaatttttggtgcaattatagcaaatgataatgttcccttttgaacttttacattttggcatgacatttcagagtattgtgggaccatgagacaaaattaagtacgatcacattctttatttctcattttaaagaaatgatgttggtttaccttttcctagttgaagatagtaattaggtttctaagctgtatactgtgtttattggtggcagtgacaccaaagatagaggcaatggatagaaatttttaaactggaaagaaaacctgaattacactacattttcgaagtctcttgtaattatttgggatatcaacaaaatttgattcgtctgtctaatcccttgctagtattttaaatatgtctttaacacattgtatcctttaattcttcattaaaatggaaataagtagatgtttcaaagt

SEQ ID NO: 574 - DNA, 3107 bp, human
aatgaaggtggacacccaaatagccccaatacaaatgcctgttcaatcaaccaaacatctaagcagcacatctatgtggtagcatattgccaggccgtgagactgcgaatataaataggaaccgcccctcatctgcaggcgctcacaacctagttagcaaacagtaaaacaattaagcgcgccgtggacataggcccacttgtcctgggaaatgaggggaagctggggtttgcagtggtttgattgaagggggactacatgttagaggcacagactgggtgcaggtacacccaaaggaacgagaagagtggaaggaaacaacatccacaaagtaaccacatgctggcgtatcgaaggccgtgatttacggttttgagactttacctcgccagcaaaggggggccagtctgttagcggtgcagattggaggggtgacattggaagctgtccaggaaaaagaaaatggaactggggagcagaaggcctacgcaagagggcgggacagacaggacttgtgactagtagctctggactgaggaatcctccctgctttctggtgcgggagagctagtggatgatggtgccaataacctggatggggaaagtaagctccctcctggaatgcttcattcacaacctccattttcagcaacatcccatctactggtgcttcctggtcgagatacaagtttcctgaaactgctgctctgttttgggcctcacccggccaacagctcactagctggcaagcagtagtatcaagatggcggccccctaggactggctagtcatgtgacctcgggtttcccaagtttgaagcccggcagtcctttcgggggcaaggttcacctgtcacgaaacgagtgtcaccccttcgactctcgcaagccaatcggcatctgagactgggccactgcggtgaggcgatcggaagattggtcctttccagtcgcctagctagggccaatcacggagcgtcccatacttcgcgggcccgcccgtaggccggggagaagcaggaatatcgtcacagcgtggcggtattattacctaaggactcgataggaggtgggacgcgtgttgattgacaggcagatttccctaccgggatttgagaatttggcgcagtgcccgccttagaggtgcgcttatttgattgccaagtaatattccccaatggagtactagctcatggtgacgggcaggcagcttgagctaatgagtcctccgtggccggcgcagctctccacatgccgggcggcgggccccagtctgagcggcgatggcggcggcggcggcggcggcagcagcagcgggggctgcgggcggtcggggctccgggccggggcggcggcgccatcttgtgcccggggccggtggggaggccggggagggggccccggggggcgcaggggactacgggaacggcctggagtctgaggaactggagcctgaggagctgctgctggagcccgagccggagcccgagcccgaagaggagccgccccggccccgcgcccccccgggagctccgggccctgggcctggttcgggagcccccggcagccaagaggaggaggaggagccgggactggtcgagggtgacccgggggacggcgccattgaggacccggagctggaagctatcaaagctcgagtcagggagatggaggaagaagctgagaagctaaaggagctacagaacgaggtagagaagcagatgaatatgagtccacctccaggcaatgctggcccggtgatcatgtccattgaggagaagatggaggctgatgcccgttccatctatgttggcaatgtggactatggtgcaacagcagaagagctggaagctcactttcatggctgtggttcagtcaaccgtgttaccatactgtgtgacaaatttagtggccatcccaaagggtttgcgtatatagagttctcagacaaagagtcagtgaggacttccttggccttagatgagtccctatttagaggaaggcaaatcaaggtgatcccaaaacgaaccaacagaccaggcatcagcacaacagaccggggttttccacgagcccgctaccgcgcccggaccaccaactacaacagctcccgctctcgattctacagtggttttaacagcaggccccggggtcgcgtctacaggggccgggctagagcgacatcatggtattccccttactaaaaaaagtgtgtattaggaggagagagaggaaaaaaagaggaaagaaggaaaaaaaaaagaattaaaaaaaaaaaaaagaaaaacagaagatgaccttgatggaaaaaaaatattttttaaaaaaaagatatactgtggaaggggggagaatcccataactaactgctgaggagggacctgctttggggagtaggggaaggcccagggagtggggcagggggctgcttattcactctggggattcgccatggacacgtctcaactgcgcaagctgcttgcccatgtttccctgcccccttcacccccttgggcctgctcaagggtaggtgggcgtgggtggtaggagggttttttttacccagggctctggaaggacaccaaactgttctgcttgttaccttccctcccgtcttctcctcgcctttcacagtcccctcctgcctgctcctgtccagccaggtctaccacccaccccacccctctttctccggctccctgcccctccagattgcctggtgatctattttgtttccttttgtgtttctttttctgttttgagtgtctttctttgcaggtttctgtagccggaagatctccgttccgctcccagcggctccagtgtaaattccccttccccctggggaaatgcactaccttgttttggggggtttaggggtgtttttgtttttcagttgttttgtttttttgttttttttttttcctttgccttttttcccttttatttggagggaatgggaggaagtgggaacagggaggtgggaggtggattttgtttatttttttagctcatttccaggggtgggaatttttttttaatatgtgtcatgaataaagttgtttttgaaaataaaaaaaaaaaaaaaaaaaaaaaaaaaaaaaaaaa

SEQ ID NO: 575 - DNA, 3984 bp, human
taggaagaggcactgctgagggggcgcgaggggaacggaggccagagctgcgctgacagcagccatggcgagcggcagtggagacagcgtcacccgtcggagcgtggcatcacagtttttcactcaagaggaggggccgggcatcgatggcatgaccacctcagagagggtggtggatcttctgaaccaggcggcgctgatcaccaatgactcaaagatcacagtgctcaaacaggtccaggagctgatcatcaacaaagacccacactactggacaacttcctggatgagatcatcgcattccaagcagacaagtcaatcgaagtgcgaaaatttgtcatcggcttcatcgaggaggcatgcaagcgagacattgagttgctgctgaaactcattgcaaacctcaacatgctcttgagggacgagaatgtgaacgtggtgaagaaggctatcctcaccatgacccagctctacaaggtggccctgcagtggatggtaaagtcacgggtaattagcgagctacaggaggcctgctgggacatggtatctgccatggcgggggacatcatcctgctattggactctgacaatgacggcatccgcacccacgccatcaagtttgtggagggcctcattgtcaccctgtcaccccgcatggctgactcagagataccccgacgccaggagcatgatatcagcctggaccgcatccctcgtgaccacccctacatccagtacaacgtgctatgggaagagggcaaggcagccttggagcagctgcttaagttcatggtgcaccctgccatctcctccatcaacctgaccacagcgctgggctcccttgccaatatcgcccgccagagacccatgttcatgtctgaggtgatccaggcctatgaaactctgcatgccaacctgcccccgacgctggccaaatcgcaggtgagcagtgtgcgtaagaatctgaagctgcacctgttgagtgtgctgaagcacccggcttccttggagttccaggcccagatcaccaccctgctggtggacctgggcacacctcaggccgagatcgcccgcaacatgccgagcagcaaggacacccgcaagcggccccgcgatgactcggactccacactcaagaagatgaagctggagcccaacctgggggaggacgatgaggacaaagacttggagccaggcccgtcggggacctcgaaggcctcagcgcagatctccggccagtcagacacggacatcacagctgagttcctgcagcctctgctgacgcctgataatgtggctaatctggtcctcatcagcatggtgtacctacccgaggccatgccagcctccttccaggccatctacacccccgtggagtcagcaggcacggaagcccagatcaagcacctggctcggctcatggccacacagatgacagctgccggactgggaccaggtgtagagcagaccaaacagtgcaaggaggagcccaaggaggagaaggtggtgaagacagagagcgtcctgatcaagcggcgcctgtcagcccagggccaagccatctcggtggtgggttccctgagctccatgtcccccctggaggaagaggcaccgcaggccaagaggaggccagagcccattatccctgtcactcagccccggctggcaggcgctggtgggcgcaagaaaattttccgtctcagcgacgtgctgaagccccttaccgatgcccaggtggaagccatgaagctgggcgctgtgaagcggatcctgcgggctgagaaggctgtggcctgcagcggggcagcccaggtccgcataaagatcctggccagcctggtgacacagttcaactcgggcctgaaggcggaggtcctgtccttcatcctggaggatgtgcgggcccgcctggacctggccttcgcctggctctaccaggagtacaacgcctacctggccgcaggtgcctcgggctccctggacaagtatgaggactgcctcatccgcctgttgtctggcctgcaggagaaaccagaccagaaggatgggatcttcaccaaggttgtgctggaggcgccactcatcacagagagtgccctggaggtggtccgcaagtactgcgaggatgagagtcgcacctatctgggcatgtccacacttcgagacctgatcttcaagcgcccgtcccgccagttccagtacctgcatgtcctcctcgacctcagctcccatgagaaggacaaggtgcgctcccaggccctgctgttcatcaaacgcatgtatgagaaggagcagctgcgggagtatgtggagaaatttgccctcaactacctgcagctcctggtgcaccccaacccaccgtctgtgctgtttggagctgacaaggacacagaggtggcagcaccctggacggaggagacagtgaagcagtgtctgtacctctacctggccctcctgcctcagaaccacaagctgatccacgaactggcggccgtgtacactgaagccatcgccgacatcaagcggacggtgctgagggtcattgagcagccgatccgaggaatgggcatgaactccccggagctgctcctgctggtggaaaattgtcccaagggagcagagacactggtcacgagatgtctgcacagcctcacagacaaagtcccaccctccccagagctggtgaagcgggtccgggatctctaccacaagcgactgccagacgtccgcttcctcatcccggtgctcaatgggctggagaagaaagaggtgatccaggccctgcctaaactcatcaaactcaaccccatcgtggtgaaggaagtcttcaaccgcctgctgggcacccagcatggtgagggaaactcagccttgtccccgctgaaccctggagagctcctgatcgcattacacaacattgactccgtgaagtgcgacatgaaatccatcatcaaagccaccaacctgtgctttgcggagcggaacgtgtacacgtcagaggtgctggccgtggtgatgcagcagctgatggagcagagccccctgcccatgctgctcatgaggaccgtcatccagtccctgaccatgtacccccgcctggggggcttcgtcatgaacatcctgtcccgcctcatcatgaagcaggtgtggaagtaccccaaggtgtgggagggcttcatcaagtgctgccagcgcacaaagccccagagcttccaggtcatcctgcagctgccgccccagcagctgggagccgtctttgacaagtgcccagagctccgggagcccctgctggcccatgtccgctccttcaccccccaccagcaagctcacatccctaactccatcatgaccatcttggaggccagcggcaagcaggagccagaggccaaggaggcgcctgcggggcccttggaggaggatgatctggagcccctgaccttggccccggccccagcaccccggccccctcaggacctcatcggcctgcgactggcccaggagaaggccttaaagcggcagctggaggaggaacagaagctgaagccgggaggagtgggagccccctcctcttcctccccctctccctctccgtcggcccggccaggcccgcccccgtctgaggaagccatggatttccgggaggaggggcctgagtgcgagaccccgggcatcttcatcagcatggatgacgactcggggctgaccgaggccgcgctgttggactctagtctcgagggccccctacccaaggagacggcagcgggcgggctgaccttgaaggaggagcggagcccccagaccctcgcacctgttggagaagatgctatgaagactcccagcccggctgccgaggacgccagggaacccgaggccaaggggaacagctgacggggctcgagggggaaagggggtgggacagggactcggggctgggggacggggcggggcttgacctgcgggtgctttgccttaaaaagaaataaa

SEQ ID NO: 576 - DNA, 3415 bp, human
ggtggtcggagcgccgactcccttctcgtcgtcgccattttgagctggtgactgtggccggctgggagtaggcggcagtgagtttccctgggagggcagcgcgcttggcgcttctcccctccccccgatctgcctccagtctcggacttggttgttgcgcgctccggctccggctgagctgggagagttggaggaggtggcggcgggcagaggtgatgtctgggagcccttccttgacagcccgggccgagaagagtccctgcaggaagcatcacccaggctggcagatcatggtagcagcagcgggggtggctgggaagtgaaacggagccagcggctgaggaggggccccagcagcccccgaaggccctatcaggacatggagtatgaaagacgtggtggtcgtggtgacaggactggccgctatggagccactgaccgctcgcaggatgatggtggggagaaccgcagccgagaccacgactaccgggacatggactaccgttcatatcctcgcgagtatggcagccaggagggcaagcatgactatgacgactcatctgaggagcagagtgcggaggattcctacgaggcctccccgggctccgagactcagcgtaggcggcggcggcggcacaggcacagccccaccggcccgccaggcttcccccgagacggcgactatcgggaccaggactatcggaccgagcaaggggaggaggaggaggaggaggaggatgaggaggaggaggagaaggccagtaacatcgtcatgctgaggatgctgccacaggcagccactgaggatgacatccgtggccagctgcagtcgcacggcgtgcaagcacgggaggttcggctgatgcggaacaaatcttcaggtcagagccggggcttcgccttcgtcgagtttagtcacttgcaggacgctacacgatggatggaagccaatcagcactccctcaacatcctgggccagaaggtgtcgatgcactacagtgaccccaagcccaagatcaatgaggactggctgtgcaataagtgtggcgtccagaacttcaaacgccgagagaagtgcttcaaatgtggcgtgcccaagtcagaggcagagcagaagctgcccctcggcacgaggctggatcagcagacactgccactgggtggccgggagctgagccagggcctgcttcccctgccgcagccctaccaggcccagggagtcctggcctcccaagccctgtcacagggctcggagccaagctcagagaacgccaatgacaccatcattttgcgcaacctgaacccacacagcaccatggattccatcctgggggccctggcaccctacgcggtgctgtcctcctccaacgtgcgcgtcataaaggacaagcagacccaactgaaccgcggctttgccttcatccagctctccaccatcgtggaggcagcccagctgctgcagatcctgcaggccctgcacccaccactcactatcgacggcaagaccatcaatgttgagtttgccaagggttctaagagggacatggcctccaatgaaggcagtcgcatcagtgctgcctctgtggccagcactgccattgctgcggcccagtgggccatctcacaggcctcccaaggtggggagggtacctgggccacctccgaggagccgccggtcgactacagctactaccaacaggatgagggctatggcaacagccagggcacagagtcttccctctatgcccatggctacctcaagggcaccaagggccctggcatcactggaaccaaaggggatcccactggagcaggtcccgaggcctccctagagcctggggccgactctgtgtcgatgcaggctttctctcgcgcccagcctggtgctgctcctggcatctaccaacaatcagccgaggcgagcagtagccagggcactgctgccaacagccagtcgtataccatcatgtcacccgctgtgctcaaatctgagctccagagccctacccatcctagttctgctctcccaccggctaccagccccactgcccaggaatcctacagccagtaccctgttcccgacgtctctacctaccagtacgatgagacctccggctactactatgacccccagaccggcctctactatgaccccaactcccagtattactacaatgctcagagccagcagtacctgtactgggatggggagaggcggacctatgttcccgccctggagcagtcggccgacggacataaggagacaggggcaccctcgaaggagggcaaagagaagaaggagaagcacaagaccaagacagctcaacagattgccaaggacatggaacgctgggcccgcagtctcaacaaacaaaaagaaaacttcaaaaatagcttccagcctatcagctccctgcgagatgacgagaggcgggagtcagccactgcagatgctggctatgccatcctcgagaagaagggagcactagccgagagacagcacaccagcatggatctcccgaaattggccagtgacgaccgcccaagccctccgcgaggactggtggcagcctacagcggggagagtgacagtgaggaggagcaggagcgtgggggccctgagcgggaggagaagctcaccgactggcagaagctggcctgtctgctctgccgacgccagttccccagcaaagaggcgctcatccggcaccagcagctctcagggctccacaagcaaaaccttgagattcaccggcgagcccacttgtcagaaaacgagctagaagcactagagaagaatgacatggagcaaatgaagtaccgggaccgtgcagctgaacgcagagaaaagtatggcatccccgagccgccagagcccaagaggaggaagtacggcggcatatccacagcctctgtagacttcgagcagcctactcgggacgggctgggcagtgacaacattggcagtcggatgctgcaggccatgggctggaaagagggcagcggcctgggccgcaagaagcagggcattgtaacgcctatcgaggcccaaacacgggtgcggggctccggcctgggtgcacggggcagctcctacggggtcacctcaaccgagtcctacaaggagacactgcacaagacaatggtgacccgcttcaacgaggcccagtgagcagcttcaagagcaacttctccacatgttgggtgtccatcctggggcagggaaggacagagtgttggatggctgggacggggccttgctcttgtcggccagcccactccccagccagagagggcttgaccaaatcaaattgaggtggtgacttttgttggaaaattgggctgggatcacgtcctgttttgtaataaaagctgaaaagtctgaaaaaaaaaaaaaaaaaaaaaaaaaaaaaaa

SEQ ID NO: 577 - DNA, 1912 bp, human
ccggcggctgttgtcgggcctccagcgggcggggccgttggcggagcagagcggaggcgcagccgggcggagggcccacgagggctcagccttcccggtcagcggtggtgacggtatcccagagtgccagagaaccgttgcttttccgagttgctcttcttccaggctccgttggtggtcggcatggcccgtggaaatcaacgagaacttgcccgccagaaaaacatgaagaaaacccaggaaattagcaagggaaagaggaaagaggatagcttgactgcctctcagagaaagcagagttctggaggccagaaatctgagagcaagatgtcagctgggccacacctccctctgaaggctccaagggagaatccttgctttcctcttccagctgctggtggctccaggtattacttggcttatggcagcataactcctatctctgcctttgtctttgtggtcttcttttctgtcttcttcccttctttttatgaggacttttgctgttggatttaggttccattctaacctaggatgatctcatttggaaatccttaatttcatctacaaaaactgttttcccaaataggtcacattcacgcatatcagatggacagatgtatcattttggggtccaccattcaacccactacaaggagttttttaaacaaaaataggaaacttagatgtaacttagcactttttttttttttttttgagatggagtctcactctgtcaccagactggagtgcagtggcgccatctcagctccatgcaacctctgcctcctgggttcaagcagttctcttgcctcagcctcctgggtagctgggattacaggcacgcgctgccacacccaggtaatttatttattttttttttgagacagagtctcgcactgttgcccaggctggactgcagtggcgtgatctctgctcactgcaacctccgcctcccgggttcaagcgattctccagcctcagcttcctgagtagatgggattacaggcgcctgccaccacgcccagctaatttttttgtattcttagtagagatggggtttcaccatgttggccaggctggtctccatctcctgacctcgtgattcacccgcctcggcctcccaaagtgctgggattacaggcgtgagtcacagcccccggccataatttagcactttaaaaaataatagccatgttgggccaggcgtggtggctcatgcctgtaatctgagcactttgggagaccaaggcgggtagatcccttgtgcccaggagttcaagaccagcctgggcaacatggcgaaaccccatttctactaaaaatacaaaaattagctggggcgaggggataggccgagttccgggtgtaagggggccattagggagagcagagcgaggcagctgatcttccggattgggggccttgcccggaagctggacctcacggagatgaaacggaagatgcacgaggatatgatctccatacagaactttctcatctacgtggccctgctgcgagtcactccatttatcttaaagaaattggacagcatatgaagattggacatcacatgtgaatgcatgatatgaagagcctggttacagtttctactgttctctgcaagtaaataggcccagaaaggtataagagactctttgaatggacataaaaattctgcttgttaagaacaagttgagctctggtaactgatcttaatagctaaaatataaaaatatttgggaagtctgaaatgaggtctcctggccctggtgtgcccttaatgcctgtgacagttggcctctgtgaatattggtataattgtaaataatgtcaaactccattttctagcaagtattaataattaagggaagtatgtctgaaatggcaaaaaaaaaaaaaaaaaaaaaaa

SEQ ID NO: 578 - DNA, 370 bp, human
atgtcaggacgcggcaaaggaggtaagggcctggggaaagggggtgccaagcgccaccgcaaggtgctgcgcgacaacatccagggtatcaccaagccagccattcggcgccttgctcgccgcggcggcgtgaagcgcatttctggcctcatctatgaggagacccgcggagtgttgaaggtgttcctggagaacgtgatccgggacgccgtgacctacacggagcacgccaagcgcaagacggtcaccgccatggacgtggtctacgcgctcaagcgccagggccgcaccctctatggcttcggcggctaaatggcattttgaagcccagtcattctctaaaaaggccctttttagggcccctaagctt

SEQ ID NO: 579 - DNA, 2415 bp, human
cggatcctttcctgcttttggtttccctggcaggggttgaactgtggagtgtgtgggctcttatcacgcgatggcatccactgtggaaggaggcgacacagctctgctcccagaattccccagggggcccctcgatgcctaccgagcaagagcgtccttcagctggaaggacgtggcgctgttcacggaaggggagggcaatgtccgctttaagaaaaccatcttctcagctcttgagaatgaccctcttttcgctcgttcccctggagccgacctgtccttggagaagtatcgcgagctgaacttccttcgatgcaagcggatcttcgagtatgacttcctcagtgtcgaagcaatgttcaagagccctctgaaggtccccgccttgattcagtgcctgggcatgtatgactcttctctggctgccaagtacctcctccatagcttggtttttggatcagcagtttacagttctggttctgaaagacatctcacatatattcaaaagatcttcaggatggagatttttggatgttttgctctgaccgaattaagccacggcagtaataccaaggccattcgcacaactgcccactacgatcctgccactgaggaattcatcatacattcccctgatttcgaagctgccaagttttgggttggcaacatgggcaagacagccactcacgcggtggtgtttgctaagctgtgtgtgccaggggaccagtgccatgggctgcatccctttatcgtgcagatccgggacccgaagacccttcttcccatgcctggagtgatggttggcgacataggaaaaaaactcgggcagaacggtctagataatggtttcgccatgttccacaaggtcagagttcctcgccagagccttctgaaccggatgggagacgtcacccccgagggcacctatgtcagcccctttaaggacgtcaggcagcgctttggagcgtccctggggagcctgtcctcgggccgggtctccatcgtgagcctggccatccttaacctaaagctggccgtggccatcgctcttcgcttctcagccactcggcgtcagtttggacccacagaggaggaggaaataccagtgcttgagtatccaatgcagcaatggcgcttgcttccatatctggcagctgtctacggcttagaccatttctccaagtcgctcttcctggacctggtggagctccagcgaggacttgcatcgggagaccgcagcgccagacaggcagagcttggacgtgagatccacgccctggcatcggccagcaagcccctggcctcgtggaccacccagcaaggaattcaggaatgccgggaggcgtgtggaggacacggctatctggccatgaaccggttgggtgtccttagagatgacaacgatcccaactgcacatacgaaggtgacaacaacatcctgctgcagcagacaagcaactatttgctgggtctcctggcacaccaggtccacgatggagcttgcttccgcagtccgctgaagtcagtggactttctggacgcctatcccggcatccttgaccagaagtttgaggtctccagtgttgccgactgcttggactctgcagtcgccctggcagcatacaagtggctggtttgctacctgctccgagagacttatcaaaaattaaaccaagagaaaagatcaggaagcagtgactttgaagcaaggaacaaatgccaggtgtcccacggccgtccgttggcgctggccttcgtggagctcacggtggtccagaggttccacgagcacgtgcaccagccttccgtgccgccctcgctgcgggccgtgctggggcggctcagtgctctgtacgccctgtggtccctgaagcgccacgcggccctgctctaccgaggaggatacttctccggtgagcaggcgggagaagtgttggagagcgccgtcctggctttgtgttcccagctgaaagacgatgcagttgccctggtagacgtgatcgctcctcctgactttgttctggactcaccgattggcagagccgacggcgagctctacaaaaacctctggggcgctgtcctgcaggaaagcaaggtgttggagcgggcatcctggtggccagagttttctgtgaacaaacctgtcataggaagtctgaaatcgaagctctagtgggactggcacattcagccaagtctaatgaaacgaagggaactaatcagacgtggacctcaacttctgattccagaacacgccggagattgctgctgctttctgagcccgcacctgtgcgcctaaactgctgattggcctcaacttgcccaggcggacgggagggaggcacccggccggctggacctaatctgggatcgcggtgatttgcaccgtggaaaagaaattgcagattgatcatg

SEQ ID NO: 580 - DNA, 3713 bp, human
attaacaggccgtggttaggaaggacggagaaggggcgttcgctcctttgggacttttcatgcctcgtttttttttcagatgtggcttggtctgggcgcaaggtcccagcagccagcttaagcttactcttctgtgaaaggggaaagtatcccctgtggaaagcggttaaacttgtggagggggtgcgggacgtgagttcttccccatgccaggcgaatggtgtggccttgagctggtccaggagccggctcgacgtgtctgagggaggcccggagggggcggggaggtggcccacagaacgcgggttctgtaaagagacgttgggaagattcgattccgagaagaggaagaaccggattgaaagagagccaggccgctgagggggagggggctgctaagatggcgtcggcctcctccgggccgtcgtcttcggtcggtttttcatcctttgatcccgcggtcccttcctgtaccttgtcctcagcatctggaatcaagagacccatggcatctgaggtgccttatgcctctggcatgcccatcaagaaaataggccatagaagtgttgattcctcaggagagacaacatataaaaagacaacctcatcagccttgaaaggtgccatccagttaggcattacccacactgtggggagcctgagtaccaaaccagagcgtgatgtcctcatgcaagatttctacgtggttgagagtatcttctttcccagtgaagggagcaacctgacccctgctcatcactacaatgactttcgtttcaagacctatgcacctgttgccttccgctacttccgggagctatttggtatccggcccgatgattacttgtattccctctgcagtgagccgctgattgaactctgtagctctggagctagtggttccctattctatgtgtccagcgacgatgagttcattattaagacagtccaacataaagaggcggaatttctgcagaagctgcttccaggatactacatgaacctcaaccagaaccctcggactttgctgcctaaattctatggactgtactgtgtgcaggcaggtggcaagaacattcggattgtggtgatgaacaatcttttaccaagatcggtaaaaatgcatatcaaatatgacctcaaaggctcaacctacaaacggcgggcttcccagaaagagcgagagaagcctcttcccacatttaaagacctagacttcttacaagacatccctgatggtctttttttggatgctgacatgtacaacgctctctgtaagaccctgcagcgtgactgtttggtgctgcagagcttcaagataatggattacagcctcttgatgtcaatccataatatagatcatgcacaacgagagcccttaagcagtgaaacacagtactcagttgatactcgaagaccggccccccaaaaggctctgtattccacagccatggaatccatccagggagaggctcgacggggtggtaccatggagactgatgaccatatgggtggcatccctgcccggaatagtaaaggggaaaggcttctgctttatattggcatcattgacattctacagtcttacaggtttgttaagaagttggagcactcttggaaagccctggtacatgacggagacactgtctcagtgcatcgcccaggcttctacgctgaacggttccagcgcttcatgtgcaacacagtatttaagaagattcccttgaagccttctccttccaaaaagtttcggtctggctcatctttctctcggcgagcaggctccagtggcaactcctgcattacttaccagccatcggtctctggggaacacaaggcacaagtgacaacaaaggcagaagtggagccaggcgttcaccttggtcgtcctgatgttttacctcagactccacctttggaggaaatcagtgagggctcgcctattcctgaccccagtttctcacctctagttggagagactttgcaaatgctaactacaagtacaaccttggaaaagcttgaagttgcagagtcagagttcacccattaagcgcaaagcctcagaagacctggaacaagattctgccatctctgtgatcccaagatgtcagcccttgccccagcaatgctgaattttcttctacttggtcatcaaaaaaggagtgtaatagaagtgaggggagctgctcctccatcttcttcctgaagaagaaccttctctccttcctcttcctcatgaatgggccttagtgcctcagagagttgaggaccgcagcatcccctccactccagagttgggtggtacggattttcaactggccaaccctttgcctccactattgaatttttttcagacccccattcttcatgctggaaatgggattgctggacttggcagctttctttcccctcgtctttgactaggaaccggactcttaatttcctcaggacagactagctggcacattatccctaccttagttctttctctctgactcctggaagaatactcctgtaatctctgtaaaggtttttgggggataagggtgtttaaccacctcccagctttcttcttcttttttttttctgaaaaaaggaaaaagcacacagcacacaatttcaagccattttcagatcagaactccagaagtgttgacaagatgcctattcgtagagttccctcagaagagccatggtgtttatgaagagaagagtagtgattgctctgccagaagcagctcctctttaaactcctcctctcttgatgaatttcttaaggctgaaggaatgaagagagtgggacatggggtaatctttatcccttttgttaaaacaggaggcagccatgggctgggagatcatagcccttcctaggcagaatcctgttcactgccaggctatagtaattattactattttgcaatttgaaatatattctggttgtttttctaaatgtgaagacttaccaaatgaattttagatcattctccagaggagattttttttgctcttctcatcttttccaacagtgttctcctgtttgtggagctaaggtaaagaggggacacttctgtctgtttaacagacagtccatatctgtgaggccagcaaatattttcttaaactcatggggagacagcagattcttgccttggtgaggtcattgctgtgccatatgtcctacccccctgtcttcatgcagggaagttggaaatgggggctacatatgccctctcctccccgtctacaagagttgtggttttccatctgatccttccactcttgtcaggggaagaagggggcctggtatctcaggcagattgttgaattcctgttctatcccttctctatcccaccctgccttgataatatgttagcccataccccaaataactgtctatattagacacccccagccagtttctggctgcctgtctttgctgccatgttttttacaagaaggaaagaattcttgctatttttttttcataatttactatttatgatgtatttaagtgttttattaaggacagagttctgttaggggtgggagggaatatttgagggagggctgggtcttagggaaaggaatggggaagcaacatttttattaagtgttactatttgcctctactttgtattgttcagaaatggcaaatacaatataaaagtgatatatggttttaatgtaataaactttaatgagttattta

SEQ ID NO: 581 - DNA, 1020 bp, human
ggccttccaaagtgctgggattacaggcgtgagtcaccgcgcccggccaaataaaataaaatgttaaagcaaattcaggactacccctcctccaagtcttctgttccctttgggcgcccaggtgagcgggggaggggctgggggagtaataacatcaaaagagcgccttttcctcccttattccgaggagacttccctgggcctgactcccggtcctgtccccagcgccccgcggcctctggagccccttcagtgaccaagatacagagatcaggacgcctttgcgccgccccaggtgcccgcccctagctggctctgcttgggccgcgagggaaggtgaggtcgggggcggagccggggcgtgacagccggggtgtgtgtccgccgggcttggtgcctccggtggccctgcagcaccgtcccacctctgccaccctccgatggggccgctacctgtgtgcctgccaatcatgctgctcctgctactgccgtcgctgctgctgctgctgcttctacctggccccgggtccggcgaggcctccaggatattacgtgtgcaccggcgtgggatcctggaactggcaggaactgtgggttgtgttggtccccgaacccccatcgcctatatgaaatatggttgcttttgtggcttgggaggccatggccagccccgcgatgccattgactggtgctgccatggccacgactgttgttacactcgagctgaggaggccggctgcagccccaagacagagcgctactcctggcagtgcgtcaatcagagcgtcctgtgcggaccggcagagaacaaatgccaagaactgttgtgcaagtgtgaccaggagattgctaactgcttagcccaaactgagtacaacttaaagtacctcttctacccccagttcctatgtgagccggactcgcccaagtgtgactgactaccttgacttgaaatgctcttttgcacaaggaaataaagcgtcctctcagtaatgaaaaaaaaaaaaaaaaaaaaaaaaa

SEQ ID NO: 582 - DNA, 2808 bp, human
cggcatgagaggccagcctgccagggaaatccaggaatctgcaacaaaaacgatgacagtctgaaatactctctggtgccaacctccaaattctcgtctgtcacttcagacccccactagttgacagagcagcagaatatcaactccagtagacttgaatgtgcctctgggcaaagaagcagagctaacgaggaaagggatttaaagagtttttcttgggtgtttgtcaaacttttattccctgtctgtgtgcagaggggattcaacttcaattttctgcagtggctctgggtccagccccttacttaaagatctggaaagcatgaagactgggccttttttcctatgtctcttgggaactgcagctgcaatcccgacaaatgcaagattattatctgatcattccaaaccaactgctgaaacggtagcacctgacaacactgcaatccccagtttatgggctgaagctgaagaaaatgaaaaagaaacagcagtatccacagaagacgattcccaccataaggctgaaaaatcatcagtactaaagtcaaaagaggaaagccatgaacagtcagcagaacagggcaagagttctagccaagagctgggattgaaggatcaagaggacagtgatggtcacttaagtgtgaatttggagtatgcaccaactgaaggtacattggacataaaagaagatatgattgagcctcaggagaaaaaactctcagagaacactgattttttggctcctggtgttagttccttcacagattctaaccaacaagaaagtatcacaaagagagaggaaaaccaagaacaacctagaaattattcacatcatcagttgaacaggagcagtaaacatagccaaggcctaagggatcaaggaaaccaagagcaggatccaaatatttccaatggagaagaggaagaagaaaaagagccaggtgaagttggtacccacaatgataaccaagaaagaaagacagaattgcccagggagcatgctaacagcaagcaggaggaagacaatacccaatctgatgatattttggaagagtctgatcaaccaactcaagtaagcaagatgcaggaggatgaatttgatcagggtaaccaagaacaagaagataactccaatgcagaaatggaagaggaaaatgcatcgaacgtcaataagcacattcaagaaactgaatggcagagtcaagagggtaaaactggcctagaagctatcagcaaccacaaagagacagaagaaaagactgtttctgaggctctgctcatggaacctactgatgatggtaataccacgcccagaaatcatggagttgatgatgatggcgatgatgatggcgatgatggcggcactgatggccccaggcacagtgcaagtgatgactacttcatcccaagccaggcctttctggaggccgagagagctcaatccattgcctatcacctcaaaattgaggagcaaagagaaaaagtacatgaaaatgaaaatataggtaccactgagcctggagagcaccaagaggccaagaaagcagagaactcatcaaatgaggaggaaacgtcaagtgaaggcaacatgagggtgcatgctgtggattcttgcatgagcttccagtgtaaaagaggccacatctgtaaggcagaccaacagggaaaacctcactgtgtctgccaggatccagtgacttgtcctccaacaaaaccccttgatcaagtttgtggcactgacaatcagacctatgctagttcctgtcatctattcgctactaaatgcagactggaggggaccaaaaaggggcatcaactccagctggattattttggagcctgcaaatctattcctacttgtacggactttgaagtgattcagtttcctctacggatgagagactggctcaagaatatcctcatgcagctttatgaagccaactctgaacatgctggttatctaaatgagaagcagagaaataaagtcaagaaaatttacctggatgaaaagaggcttttggctggggaccatcccattgatcttctcttaagggactttaagaaaaactaccacatgtatgtgtatcctgtgcactggcagtttagtgaacttgaccaacaccctatggatagagtcttgacacattctgaacttgctcctctgcgagcatctctggtgcccatggaacactgcataacccgtttctttgaggagtgtgaccccaacaaggataagcacatcaccctgaaggagtggggccactgctttggaattaaagaagaggacatagatgaaaatctcttgttttgaacgaagattttaaagaactcaactttccagcatcctcctctgttctaaccacttcagaaatatatgcagctgtgatacttgtagatttatatttagcaaaatgttagcatgtatgacaagacaatgagagtaattgcttgacaacaacctatgcaccaggtatttaacattaactttggaaacaaaaatgtacaattaagtaaagtcaacatatgcaaaatactgtacattgtgaacagaagtttaattcatagtaatttcactctctgcattgacttatgagataattaatgattaaactattaatgataaaaataatgcatttgtattgttcataatatcatgtgcacttcaagaaaatggaatgctactcttttgtggtttacgtgtattattttcaatatcttaataccctaataaagagtccataaaaatccaaaaaaaaaaaaaaaaaaaaaaaaaaaaaaaaaaaaaaaaaaaaaaaaaaaaaa

SEQ ID NO: 583 - DNA, 1360 bp, human
gcccttgccttgagtcagtgcgctgctctccagcccgcttgaacgctccccgcagccaccgccacccattggaatggccaacaggggacctgcatatggcctgagccgggaggtgcagcagaagattgagaaacaatatgatgcagatctggagcagatcctgatccagtggatcaccacccagtgccgaaaggatgtgggccggccccagcctggacgcgagaacttccagaactggctcaaggatggcacggtgctatgtgagctcattaatgcactgtaccccgaggggcaggccccagtaaagaagatccaggcctccaccatggccttcaagcagatggagcagatctctcagttcctgcaagcagctgagcgctatggcattaacaccactgacatcttccaaactgtggacctctgggaaggaaagaacatggcctgtgtgcagcggacgctgatgaatctgggtgggctggcagtagcccgagatgatgggctcttctctggggatcccaactggttccctaagaaatccaaggagaatcctcggaacttctcagataaccagctgcaagagggcaagaacgtgatcgggttacagatgggcaccaaccgcggggcgtctcaggcaggcatgactggctacgggatgccacgccagatcctctgatcccaccccaggccttgcccctgccctcccacgaatggttaatatatatgtagatatatattttagcagtgacattcccagagagccccagagctctcaagctcctttctgtcagggtggggggttcagcctgtcctgtcacctctgaggtgcctgctggcatcctctcccccatgcttactaatacattcccttccccatagccatcaaaactggaccaactggcctcttcctttcccctgggaccaaaatttaggggcctcagtccctcaccgccatgccctggcctattctgtctctccttcttccccctggcctgttctgtctctgagctctgtgtcctccgttcattccatggctgggagtcactgatgctgcctctgccttctgatgctggactggccttgcttctacaagtatgcttctcccacagctgtggctgcaggaacttaatttatagggaggagcctgtggcagctgctgccccagccacagctgcactgactgtgctcaccacacatctggggcagccttccctggcaggggccctcgtggcttctcattttccattcccttcactgtggctaaggggtggggtgaggggatggagagggagggctgcctaccatggtctggggcttgaggaagatgagtttgttgatttaaataaagaatttgtcatttttg

SEQ ID NO: 584 - DNA, 1599 bp, human
ggaccaaagctgacagtttctttacttgcaggtagctgacagcatctactcctgaagaccggaaacatggcttgtaccatccaaaaggcagaagcacttgacggggctcatttgatgcagatcctctggtatgatgaggaagagtctctctacccagctgtatggttgagagacaactgtccgtgctctgattgctacctggattctgcaaaagcacggaaacttctagtggaagctcttgatgtgaacattggaattaaaggcttgatatttgacagaaaaaaggtgtacatcacatggcccgatgagcattacagtgaattccaggctgattggctgaagaaaagatgcttttccaagcaggccagagcaaagctccaaagagaattgttttttccagaatgccaatactggggctcagagctccagctacccactttggattttgaagatgttttaagatatgatgaacatgcatacaagtggctctccaccctcaagaaagtaggcatagtaagactcaccggagcatctgacaaaccaggagaagtttcaaaacttgggaaaaggatgggtttcctctatctcacattttatggacatacttggcaagtgcaagacaaaatcgatgcaaacaatgtggcttacacaactgggaagctaagctttcacactgattatccagccctccatcatccacctggggttcagcttcttcactgcataaagcaaacagtcacagggggtgattcagaaattgtagatgggtttaatgtgtgccaaaaactaaagaaaaataatcctcaggcattccagattttgtcctctacctttgtggactttacagacattggagtggattactgtgatttttctgtacaatcaaaacataaaattatagagttagatgataaaggccaagtggttcgcatcaacttcaataacgcaactagggacacaatatttgatgtacctgttgaaagagttcagcctttttatgctgctctgaaggagtttgttgacctcatgaacagcaaagaatccaagtttaccttcaagatgaatccaggtgatgtgattacttttgataactggcgcttacttcatggccgacgtagctatgaagcaggaactgagatatcccgccatctagaaggagcttatgctgactgggatgtggtcatgtcaaggcttcgtatcttaaggcagagggtggagaatggaaactgaagtcacctgtagataattttaataagattccaatgaccatattttgtgagatatggcacattattcacagaccatgatctttgtgatttacatataatttccttaacaatgaacatgtaacttctctcacaagagtactctttactttgtaatcatatacaatgtcaactttttagatgtttcaccactcttttgcaaataaagcatcctttctgctctgttgcatgcctgctctaatttcttttgcccatatatgagtatctccagaatgtctacaaatagtttttgtagcaaatgaaaatttcttcaaataagccttttgtttcaaataaaacttgtctcaaaacatgcttcaaaaaaaaaaaaaaa

SEQ ID NO: 585 - DNA, 1593 bp, human
ctgggagcgcggcgtaggtggctgccgagtcttttcctgtttagggtcttatcctggcattgagggcgccggactggcgcttttggccggcttggcattgggtgggcggcttcttgggacccacatgagccagtggcatcatccccgcagtggctggggccggagacgcgacttttcaggacgctcctcagccaagaagaagggcggaaaccacatccccgaaaggtggaaagactatctcccagttggacagcggatgcctgggactcgtttcattgctttcaaagttcctttgcaaaagagttttgaaaagaaacttgctccagaagaatgcttttcccctttggatctttttaacaaaatccgagaacaaaatgaagaacttggactgattattgatttaacatatactcaacgctattataaaccagaggatttgccagaaactgttccttacttaaaaatttttacagttggacatcaagtgcctgatgatgagactatttttaaattcaaacacgctgttaatgggtttttgaaagaaaataaagataatgataaacttattggtgtccactgtacccatggtttaaacaggactggctacctcatttgcagatatttgattgatgtagaaggcgtgaggccagatgatgcaattgaattattcaataggtgccggggacattgcttagaaagacaaaactacattgaagaccttcagaatggtcctatcagaaagaattggaattccagtgtacccaggtcaagtgattttgaagactcagcacatctcatgcaaccagtccacaataagcctgttaaacaaggacctaggtataatctacatcagatccagggtcactcagctcctcgacatttccacacccagacccaaagtttgcaacaatcagtcagaaaattttcagagaatccacatgtttaccagagacaccatctccctcctcctggtccccctggagaggactattcacacaggaggtattcttggaatgtgaagcccaatgccagtcgggcagcccaggatagaagaaggtggtatccttataattactccagactctcctatccagcctgttgggaatggacccagtgatacaaacctgtcctggaattctacctggagaccagagctggcctgaaaattactggtgtgacttttaattagttcaggtctaatcaggtttctttattgttcccttatgtattcaagcttaaggaaaaattgcattgctgtttacctctttgctgataaatttgcagtaattacagcattgcaggaaaaacaatctgttattccagtcttaaatttttctaaaagaagacaatattttagaactgaagcattgagaacttcccttgcaaattatttttaaaattctatcttgtttttctatgtatttctttctgactagacttgtgatatgcgtgtgtttatgtacagaaatttttagtgtttttgttatgttctgttattgacccaaaggccatctttattttctataactgttcaaaatttatattaaaatctacttaggagataatttctttagaaaaaaaaaaaaaaaaaaa

SEQ ID NO: 586 - DNA, 6787 bp, human
tctcgctcaggcggaggaggagaaggaggaggaggaggacgacgttcggcctgcgcagtgagatgtttgtccgtcgccgccgccgccgccatcgcggaggagcgcgataaagggagccgagccggacgtgagggggaccccgcggagccgccgcgccagcgcagccccccagccgcatcggagtcgccagagtccgagccgccgccgccgccgccgccgcccccgccgccgccgcggctgcccaggggccggccagctccccagccctgcccgggggtcgcgccgccgccgcccccagcgtcgcccctagcctgcctgcccgccttaaatgtgacaccggcgtcgcggagcgcgacctgaagccgccgccggggaggggacgagcaccatgtcgaatctgagcaaaggcacgggcagccggaaggacaccaagatgcggatccgggcctttccgatgaccatggatgaaaaatatgtaaacagcatttgggaccttctgaaaaatgcaattcaagaaatccagcgtaagaataacagtggtcttagttttgaggagctctatagaaatgcatatacaatggttttgcataaacatggagaaaagctctacactggactaagagaagttgttaccgaacatctcataaataaggtgcgagaagatgtactaaattcattgaataacaactttcttcaaacgctaaatcaagcttggaatgatcatcaaacagctatggtgatgattagagacatactaatgtacatggaccgtgtgtatgtacaacaaaataatgtggagaacgtctacaatttgggattaattatttttcgagatcaagttgtacgttatgggtgtattagggatcatctacggcaaactctattggatatgattgcaagagagcggaaaggagaagtcgtagacagaggcgcaataagaaatgcttgccagatgttaatgattttaggtctcgaaggaagatcagtctatgaagaagattttgaggctccttttttggaaatgtctgcagaattttttcagatggaaagccagaaatttttagcagaaaatagtgcttcagtatatataaagaaagtagaagctagaattaatgaagaaatagaacgagtgatgcactgccttgacaaatcaacggaagaaccaattgtaaaggtggttgaaagggaactcatttccaagcacatgaagactatagtagaaatggagaattctgggctagtacatatgttgaaaaatggaaagacagaagaccttggttgcatgtacaagttatttagtcgtgtgccaaatggtttgaaaacaatgtgtgagtgtatgagttcctatttgagggagcaaggtaaagctcttgtttctgaagaaggagaaggaaagaatcctgttgactatatccagggcttattggatctgaagagtaggttcgatcgcttcctcctggaatcattcaacaatgaccgtctctttaaacaaactattgcgggtgactttgagtattttctcaacctcaactccaggtctcctgaatacctctcattatttattgatgataagctgaaaaagggagtcaaagggctaacagaacaagaagtagaaacaatattggataaagcaatggtcctttttaggtttatgcaagaaaaagatgtatttgaacgttattataaacaacacttggcaaggagacttctcacaaataaaagtgtttctgatgactctgaaaaaaacatgatatctaagttaaagactgaatgtggatgtcagttcacgtcaaaactggaaggaatgtttagggatatgagcatctcaaacacaacgatggatgaattcaggcaacatctacaggcaactggtgtatctttaggtggtgttgatcttacagtccgggtgctcacgacaggatattggcccactcagtcagccacaccaaagtgcaacatcccaccagcaccaagacatgcttttgagatattcagaaggttctacttagccaaacacagtggtcgacagctcacactccagcatcatatgggttctgcagatctcaatgccacattttatggaccagttaaaaaggaagatggatctgaagttggtgttggaggtgcacaagtaactggctctaatacacggaagcacatattgcaagtttccactttccagatgaccatattaatgctctttaataatagagaaaaatacacatttgaggaaattcagcaagagacagatatccctgaaagagagcttgttagagccctacagtccctcgcctgtggtaaaccaacacagcgggttcttacaaaagaacccaaatcaaaggaaatagaaaatggtcatatatttacagttaatgatcaattcacatccaaactacacagagtcaagattcaaacagttgctgccaaacaaggtgaatccgacccagagaggaaagaaacaaggcagaaagtagacgacgacagaaaacatgagatagaagctgctatagtgcggataatgaaatctagaaagaagatgcagcacaatgttctagtagcggaggtaactcagcagttgaaggcgcgattcttaccaagtccagttgttattaagaaacgtattgaaggacttattgagagagaatatttggcacgaacacctgaggatcgcaaagtatacacatatgtagcataaaatgcgttcagaaatttgatttattcttggactgtactcttcgcatggactgggaagttcttttaaatcattaaatattaagacgaccatctcttctattaaattacagtacatgttctagaccattgagatcaagcctttactccctttgagagtttccaacatcagttgattgagcttcaggctttacaacgtttatccctgtagagatcatctttacagttcctcgggaaaatgtgaatgtgctgcgttttgttttctttactgtatgaaaacaggaaaataaaagagaaatttagaaaatacagctcattacaataaaattgttggatttcatttccccaggtcttcagtgttgatgtaaatgtgttttgtagtgttgcttagcactttgcgcattgtgtaagttgggtaacaaaaatggcaaaagaaatgcagatttcccagttatcttgctctgaagacatttctttagctagtcttatttaattttaaaggtttgataaatatacaaagacccaagcatacaatttgagcatgctgtattctaccacttgcacttactcatcttctagccttatgaccaggaacctttgttttgggctcaagtacacatcctgatttggtttctccctgttgtaatttgagatttcccaaattaagtcttataatgattaggttttgttctgagttatttctagagaaagaaagtattttagtatgtgtaaattgtacaataatttttttgctgttgtactcactgctaatagtggattgtatagggtggtgtttttatttcatttattgtagacaaaaataatgaatttagtatacacatacccactaattcaagtatgtcagagcacaaagttggcagctggttatatttaattcagcccctctgaaaagcacatacagtctatactttgtttataaataccctaggtcctccctgcccctaaatatatattttggtgaagctgtggtgcactattaattttctgtttcaaaatgcaatctaaagatgcaataaatatgatgaccttgatagttttaatgaaatcttcaattcttgcagctgtgttttggaaagtgattaagcaatatttctcaaacctgatgattcttggatatttagctattgtcctccaaagagtcatcgtttcacgttttcaaacatgtgctttgtgctgaagattcttgtcagatatcctgtgcttccagagtatttttatcttcaattttatttaattttgtttcattttgttttcataagacaatgtttcagatatgtaatggggcaaaccactatagatttctgttggatagaaaaatgaaatgttactaataagtttaaattgacccttcgttgactatcagtactgttgatacatttattagaatgtatgtctcagaagatggtttctgtttaaatttatggtcaagttacaacaactgaattctaatatggattaaaaactccacataaatatttttccccatgcgtcttgggttataattttccttttagacttgcaaatatgcttttattgcaattttgtctccatctgtactgtagaattacaagccttgtgctctttatctctacattttccacttctacatgatgcaattaagatgccaatgaaaagtattgtgaacattattctcaggacacttttaccatacttgagtagtactaagtcaggtgtaacatggaaagctaagggtttcaccttctgattttgacataattggaaattttctataatggtaagatgtttataggaaagtaatggtagttcatgtttgagaatttttttattgctttcatttcccagttaaatgatatttaacacctgggaaaacaggacagctcagattgtcgagttagtaaacatgagcgatgtaaaaactttatttgaaatctcctaagtgagacattaaacattttagtgctagtttaagccattaaaagtaaagtttaagtttacgtcattgtctcaagtgtggctgtaaaaatcagatctagagtttagagacatacttgttaactttggagcacaggtttgatatttatgcttctaaatacattaaaacatttctgaattgcagttgaatggttggagattgctggcgatgtgatgctgcactgaaaaaactggtcacacaaaatgtttatatgtttgactgcataagtattattttaggtcataaaggttataacaaaatacatttaacattgctttctttttagcaagaggtcacagatgctattttttctcagtttttaatgctttaatttgaaagaaaaatgcatcctaaccattccatcctgttggtgcagagaaattttggtgatttattagaagacttttaaggagggtggatacatagtttttcaactgcaaaaatcatgtcatctcttcagtaactgttaaagtgtaattctctgccttcattatcaagtccaggacagtgtttattttgaatcgttaacattatttaaagactgaaaattcattgcaattagggaacgcacagcctcacaaaagtggttgtgattgcaaggattctttatgtcagtgaacttaaaaagggaatgggggaagagatgcatgcctttctaaaggtatgctagagtcacctgtgtagcattgtaattatgtactatcaaacccccaagatgctgatgataggccttctctgtaagaatccttctcatagtgaagcactgttgatgttttgttcaccggatatgttgggtagcagaaaaggcctagaaccagttttaagattatgcctacatctctagaagactagtacactggcatcatcttaggtttctaaatattatttaattccttaatttggaaagcagttttaatgtttacagtttaagatactcattttcagtaactagtgttaaagatttttatctttgcctgtctactgtaacttaagactttcatagaataattttttatagagtatatggtatattgtgtcaatcttggaaggaaagctgttgcatatcaattgtaggtcatgtattttactatatgttgcatagtattttgcattctgtaaatacgaatgttaaaacatttcaggtcagcaaaattagaagtcatttctagtcctcaaagcagaaataattagaaatgttaacatttaagtgcttatcatatgccagatactattctgaatattttatgtatattcattcatttagttgtcatattggctttatgtgacataactgtcattataccagtgttgtccaaggttgctagcaggaaatggcagagccaggagttggacctaggtttaatcctatccatattccatgttacaaattgacatgattttccatattaaaaaattttcatttattttgtacctcattcacatgaatagtaatgtgacaaactaaagttaatacatgaagcattgcaatatggaattttgcacatttttgttagctttacattatttgctgataccaacttttggtaggaaggaaaacagggaaggtgattgctgctattctggaatgtgtccattgaaaagaaaataggcgctttgtctcctacaatcttagagaaagttttacatacttaagtgggtaccacagataggcatgtaccttaaattcaaatctacagttttacaaaatgttttcctttgtgtgcctttcctatgtcaaattagccagaaggaagaagagacgttaagaatggcagataaatttaacaggtaatgatacagagattggccattacgctagctctcaggagaaaaacaactaggatgtcttgaaacccgtgcatttaattttagaaatggcaaatttgtaagcgtgtcatttaagtaatttgatgctcagttttagggtctaagttgacctcgagtgagccatgcaaaaatagctttaaaattatacatgagcagctcaaagtaaacgtgtattttttagtaacaatgaaattgtcaaatttcaagattttaataacaggacagttcaactaataaactttattgcatacaagatttattgcaatgtgggaaaattaaaattctcagtctcag

SEQ ID NO: 587 - DNA, 2500 bp, human
cacagccgagtcaccttttccctttctacactccacactctcagtcccccaccccgcccctttccaagcgtgtcccgggccgcagcagcagaaaccgcaccatctccacccccacattctcctcgcgggaagcgcagcagtgcctccaagggttcttaaagcagagatgaataatacggcagctagtccaatgtctactgcaacttcaagtagtggaaggagtacagggaagtctataagctttgcaacagaattacagagtatgataaactgcttatcaataacagctgtagcactgtggcttttctccatggactcatggtggtctttggaacaacgttcttcaactttgacagcttcatagggaaaacagattctatagaaataattggaaaatcagtttttccctattgttatcacaatatccttccactgctgaatgattctggcaggtattctttaggtgatgctagaaggcctcttcatgaaacagcagttttggtagaagatgtggtacacactcagttaattaatctgttacagcaagctgctgaagtttctcagctgcggggagcaagggtaatcactcctgaagatcttctgtttttgatgcgcaaagataagaaaaaacttagaagactgctaaaatacatgtttatccgagactacaaatcaaagattgtcaaaggcatcgatgaggatgatcttctcgaagacaaattgagtggcagcaataatgcgaacaaaagacaaaagattgctcaggacttcctcaactctattgaccagacaggagaacttttagcaatgtttgaagatgacgaaattgatgaagttaaacaagaaagaatggagagagcagaaagacaaactcgaattatggattcagctcaatatgcagaattctgtgaaagtcgacaattaagtttctccaaaaaagcttccaaatttcgagactggttggactgcagcagtatggagataaaacccaatgttgtcgcaatggaaatcttagcatatttagcgtatgaaactgtggcacagttagtggatctggctcttcttgtgaggcaagacatggtaaccaaggcaggggaccccttcagccatgccatttctgcaaccttcattcagtatcacaactctgctgagagcactgcagcctgtggtgttgaggctcacagcgatgccatccagccctgccacatcagagaggccattcgacgctacagccacaggattggcccactttccccattcacaaatgcctaccgcaggaatgggatggcttttctagcctgctgatgtgacaactgtgatgtgcctgcaacaacaggaaaggcaatgttatattaaggtgatttcttgtgaacaaaataaaatacaaatttacctttcttttatctgagggagtgggctggtctgttgtgactttcaacttgctgactcctcctcttttccagcccctcaaccatcggtcttgtttactagatgggctgttcagctaattaatggcaggatgtttaggatagtctgtaggtggacaagaatgcagatcacacagttttgaaattttaatttgagtatatttactgccctcagctcacataccttaaaagcagtggttgcccccgtccagcgttttgtctgcattttatttgatatattttataatccaggtttggaacaaggaaacaaaattaaaaggacagtgagttttcgccttcccttacaccaccaactttactttccaacatttgttgacatgtattttagtgacagctatccattttataaacttacagtaatcaaagatctaacagacctgataaatcacctgttcccacctcctttccccttcactccacttatagtatgtgtcattttcaatgcctgcttcccaacttcctgccatctgcctttcatgtgtgtttttcctcacacagaacctcttcctccatcttcatttccctccttttcctgttcctccaatccccagatccaccactcctgcacatgccatacacatttagaagccaagtattcagaatcagtagaaggggagcagagtgatttcttgcttcctcccttcaaagcactaccacacctagactggaaatgtgggctgggtaatttcttgctgttagcagccgagctacccttctggcatctatactttctccagtaaatgaggaaccgtaactctttggaacaaaccaaaatatagcagatgtaattgtacagttcctgattaaacttcagttgcaaaaaagaaagttatttctttaattctgtgggagttttgtataattttacttttatggtttttacacatacttgaaacactctttctaaagaattaataaaaacagaaatgagaaacatgaaaaaaaaaaaaaaaaaaaaaaaaaaaaaaaaaaaaaaaaaaaaaaaaaaaaaaaaaaaaaaaaaaaaaaaaaaaaaaaaaaaaaaaaaaaaaaaaaaaaaaaaaaaaaaaaaa

SEQ ID NO: 588 - DNA, 4435 bp, human
tccttttattgtggatgaacaccacgtacatgccgtaaatgctccctaggctggctgcggctacaaggcagacccgggagctgagaatagaggaatacctgcccaagcaactcattctgcacagcagccgacaagacagcgattttcctgtgctggaatgtgcccatccaaagacacttggattggacttaatcttaaacctctggagttcaagaccttttaaaaagggctaaataaacaatctctacatgtaaaaggccactgactcctacttcctctgtatagagcaactgttgaactcagctgcctgtagggcgtgattctcagtcaccagactcagcttggagatcttacaatgatggcaatcaggagacactgaacggagatgctacatattcctctcttgcagcaaaaggttttagaagcgttcgaccaaacctacaagataaaagatcaccaactcagagccagataacagtgaatggaaactcaggaggtgccgtgagtcccatgagttactatcagaggccgttttccccctcggcatattctctcccagcctcactcaactccagcattgtcatgcagcacggcacatccctcgattccacagacacatatccccagcatgcgcagtctctggatggcaccaccagcagctctatccccctgtaccgatcctcagaggaagagaagagagtgacagtcatcaaagccccgcattacccagggatcgggcccgtggatgaatccggaatccccacagcaattagaacgacagtcgaccggcccaaggactggtacaagacgatgtttaagcaaattcacatggtgcacaagccggatgatgacacagacatgtataatactccttatacatacaatgcaggtctgtacaacccaccctacagtgctcagtcacaccctgctgcaaagacccaaacctacagacctctttccaaaagccactccgacaacagccccaatgcctttaaggatgcgtcctccccagtgcctcccccacatgttccacctccagtcccgccgcttcgaccaagagatcggtcttcaacagaaaagcatgactgggatcctccagacagaaaagtggacacaagaaaatttcggtctgagccaaggagtatttttgaatatgaacctggcaagtcatcaattcttcagcatgaaagaccagcctccttgtatcagtcctctatagacagaagcctggaaagacccatgagttctgcaagcatggccagtgacttcaggaagcggaggaagagcgagcctgcagtgggtccaccacggggcttgggagatcaaagtgcgagcaggactagcccaggccgagtggacctcccaggatcaagcaccactcttacaaagtctttcactagctcttctccttcttccccatcaagagcaaaaggtggggatgatagcaaaatatgtccatccctttgcagttactcagggctcaacggcaacccctccagtgagttagattactgtagcacttacagacagcacttggatgtccctcgggactcaccaagagccattagtttcaagaacggctggcaaatggcccggcaaaacgcagaaatctggagcagcacggaagaaaccgtctctcccaaaatcaaatcccggagctgtgacgatctcctaaacgacgactgcgatagcttcccggacccgaaagtcaagtcggaaagcatgggctccctgttatgtgaggaggactccaaggagagctgccccatggcgtgggggtccccctacgtcccggaggttcgcagtaacggcagatcaaggatcagacacaggtcagcccgcaacgccccggggttcctgaagatgtacaagaaaatgcaccgcatcaaccgcaaggacctgatgaactccgaggtgatctgctccgtgaagtccaggattctgcagtacgagagcgagcagcagcacaaggacctgctgcgcgcctggagccagtgctccacggaggaggtgccccgggacatggtgcccacacgcatctccgaattcgaaaagctgatccagaagtccaaatccatgccaaatttaggggatgacatgctgtctcccgtaaccctagaaccaccgcaaaatggcctatgtcccaagaggcggttttccattgagtatttgctggaggaagaaaatcaaagcggcccccccgctcggggccggcgaggctgccagtctaacgccctggtgcccattcacattgaagtcaccagcgatgagcagccccgagcacacgtggagttttccgacagcgaccaggacggggttgtgtccgaccacagtgactacattcacctagaggggtcatccttctgcagtgaaagtgactttgatcacttttccttcacatcctccgaaagcttttacggatccagccaccaccaccaccatcaccaccaccaccaccaccgccacctcatcagctcctgcaaaggcaggtgcccggcctcctacactcgatttaccacaatgttaaaacacgaaagagccagacacgaaaacaccgaggagcccagaaggcaagaaatggaccctggcctttctaaacttgcttttctagtcagtcctgtgcctttccggaggaaaaaaaattcggctcctaagaaacagactgaaaaggcaaaatgtaaagcatctgtgtttgaggctctggactctgcccttaaagacatctgtgaccaaattaaagctgaaaagaaaagggggagcttgccggacaacagcatcctgcaccgcctcatcagtgagctgctgccagatgttcccgagaggaactcatccctgagagcgctgaggaggagccccctgcaccagcctctccacccactgcctcccgatggtgctattcattgtccaccctaccagaatgactgcgggagaatgccccgcagtgcctctttccaagacgtggacacagccaacagcagctgccaccaccaagaccgtggcggtgcactccaagaccgtgagtcccctagaagttactcatccactttgactgacatggggagaagtgcaccaagggaaagaagaggaactccagaaaaagagaaattgcctgcaaaagctgtttatgattttaaggctcagacatctaaggagttgtcatttaagaaaggagatactgtctacatcctcaggaaaattgatcaaaattggtatgagggagaacaccacgggagagtgggcatcttcccgatctcatacgtagagaaactcacacctcctgagaaagcacagcctgcaagaccacctccgccagcccagcccggagaaatcggagaagctatagccaaatacaacttcaacgcagacacaaatgtggagctgtcactgagaaagggagatagagttattcttcttaaaagagttgatcaaaactggtatgaaggtaaaatcccaggaaccaacagacaaggcatcttccctgtttcctatgtggaggtcgtcaagaagaacacaaaaggtgctgaggactaccctgaccctccaataccccacagctattctagtgataggattcacagcttgagctcaaataagccacagcgtcctgtgtttactcatgaaaatattcaaggtgggggggaaccgtttcaggctctgtataactatactcccaggaatgaagatgagctggagctcagagaaagtgatgtcattgatgtcatggaaaagtgtgatgacggctggtttgtggggacctcaagaagaaccaaattctttggtactttccccggaaactacgtcaagaggctgtgaattgcgctccctccttctgtagaggccgcctgccagccatgcacctgcgtcaacgcgcctgaaacaccccgcgggcctcccgttgtcatgccttacggtttccaatgcgccgtcaccatctccacctgccaccaaaccaccagcagagtagccgccgctgctgtgagcctggggacgacatggcaggctggtccccctccgtgaaagtgtggattcctacttcctgctctaagctttgacacgtcaaaatgtgggatcagaaagaaaaaaatcatgatatttaaaaatggtcaaatatttgaggcaaaaaaaaaaaaaaaaagtgtctccaggaggctgtccagcctcgtggctccatttcaacatctccccccaggcgatgttctcccccaagacgaccagaaaattgtttattggggaatgctgtggtttgcattttcatattcttcgcttggcagtgtgtattcttttcacaagtttgcctagtgtcttggtttacacaatatgacaactgtaactgtactttagctattgtttgcctgcacatacatgttgtaatatgcacagtgattacaacctttaaagcaagaggaggcgagttaatttggatgagtgtgatttt

SEQ ID NO: 589 - DNA, 4141 bp, human
gagccggccgcggcgccctctctccgtgtggccccctgagcggcccccctcccctgcccgggagggaggcggggggcacctggggcccgccatgaaccccggcttcgatttgtcccgccggaacccgcaggaggacttcgagctgattcagcgcatcggcagcggcacctacggcgacgtctacaaggcacggaatgttaacactggtgaattagcagcaattaaagtaataaaattggaaccaggagaagactttgcagttgtgcagcaagaaattattatgatgaaagactgtaaacacccaaatattgttgcttattttggaagctatctcaggcgagataagctttggatttgcatggagttttgtggaggtggttctttacaggatatttatcacgtaactggacctctgtcagaactgcaaattgcatatgttagcagagaaacactgcagggattatattatcttcacagtaaaggaaaaatgcacagagatataaagggagctaacattctattaacggataatggtcatgtgaaattggctgattttggagtatctgcacagataacagctacaattgccaaacggaagtctttcattggcacaccatattggatggctccagaagttgcagctgttgagaggaaggggggttacaatcaactctgtgatctctgggcagtgggaatcactgccatagaacttgcagagcttcagcctcctatgtttgacttacacccaatgagagcattatttctaatgacaaaaagcaattttcagcctcctaaactaaaggataaaatgaaatggtcaaatagttttcatcactttgtgaaaatggcacttaccaaaaatccgaaaaaaagacctactgctgaaaaattattacagcatccttttgtaacacaacatttgacacggtctttggcaatcgagctgttggataaagtaaataatccagatcattccacttaccatgatttcgatgatgatgatcctgagcctcttgttgctgtaccacatagaattcactcaacaagtagaaacgtgagagaagaaaaaacacgctcagagataacctttggccaagtgaaatttgatccacccttaagaaaggagacagaaccacatcatgaacttcccgacagtgatggttttttggacagttcagaagaaatatactacactgcaagatctaatctggatctgcaactggaatatggacaaggacaccaaggtggttactttttaggtgcaaacaagagtcttctcaagtctgttgaagaagaattgcatcagcgaggacacgtcgcacatttagaagatgatgaaggagatgatgatgaatctaaacactcaactctgaaagcaaaaattccacctcctttgccaccaaagcctaagtctatcttcataccacaggaaatgcattctactgaggatgaaaatcaaggaacaatcaagagatgtcccatgtcagggagcccagcaaagccatcccaagttccacctagaccaccacctcccagattacccccacacaaacctgttgccttaggaaatggaatgagctccttccagttaaatggtgaacgagatggctcattatgtcaacaacagaatgaacatagaggcacaaacctttcaagaaaagaaaagaaagatgtaccaaagcctattagtaatggtcttcctccaacacctaaagtgcatatgggtgcatgtttttcaaaagtttttaatgggtgtcccttgaaaattcactgtgcatcatcatggataaacccagatacaagagatcagtacttgatatttggtgccgaagaagggatttataccctcaatcttaatgaacttcatgaaacatcaatggaacagctattccctcgaaggtgtacatggttgtatgtaatgaacaattgcttgctatcaatatctggtaaagcttctcagctttattcccataatttaccagggctttttgattatgcaagacaaatgcaaaagttacctgttgctattccagcacacaaactccctgacagaatactgccaaggaaattttctgtatcagcaaaaatccctgaaaccaaatggtgccagaagtgttgtgttgtaagaaatccttacacgggccataaatacctatgtggagcacttcagactagcattgttctattagaatgggttgaaccaatgcagaaatttatgttaattaagcacatagattttcctataccatgtccacttagaatgtttgaaatgctggtagttcctgaacaggagtaccctttagtttgtgttggtgtcagtagaggtagagacttcaaccaagtggttcgatttgagacggtcaatccaaattctacctcttcatggtttacagaatcagataccccacagacaaatgttactcatgtaacccaactggagagagataccatccttgtatgcttggactgttgtataaaaatagtaaatctccaaggaagattaaaatctagcaggaaattgtcatcagaactcacctttgatttccagattgaatcaatagtgtgcctacaagacagtgtgctagctttctggaaacatggaatgcaaggtagaagttttagatctaatgaggtaacacaagaaatttcagatagcacaagaattttcaggctgcttggatctgacagggtcgtggttttggaaagtaggccaactgataaccccacagcaaatagcaatttgtacatcctggcgggtcatgaaaacagttactgagaattgttgtgctttgacagttaactctagaaagaaagaacactaccactgcaacattaatggatgcttgaagctgtacaaaagctgcagtaacctgtcttcagttactttgtaatttattgtggcatgagataagatggggaaaattttgttttaagtggtatggatatatttagcatattgaaccacacaagtgcttaattcattgttatgtaatctttgtacatataggcagtattttttctgtgaaacttcatattgctgaagacatacactaagaatttatgtagataatgtacttttatgagatgtacaagtaagtgtcttatctgtacagatgtaaatgttgatgaaaatgcaattggggttaatattttaagaattctttagtatattcttgggtgtggctatattacaaaatgggatgctggcaatgaaacaatacatttaacactattgtatttttattatatgtaatttagtaatatgaatataaatcttgtaacttttaaaattgtaatggaggctgtaatcattttataatctttttaattttaatgcaagtacactggtgtttatatttgcacaaagtattgatatgtgatgtattaagtcacaaaagtaagctgtgacattgtctataagcatttggctccacaaatgtatttggattgttttctatgtgaagcaaaccaattataattaaccacatgttgtagtaactggtctttttatatttaagcagaatcctgtaagattgcttgtctttgcttaaaaacaatacctttgaacatttttgaatcacagaatagcggtaccatgatagaatactgcaattgtggtcagaattacagtatgcacaaagaattaattagcattattaaagagtcctcactaaacatttcatatgatcacactgaagaactgtaacattccatagagtgaagtggttcaaatttctcttggaatttttacttttgttggccttattttatgatccttttcatatttcttttgacttagagtattaatacatggccaaaataatttagttactacctcatacaaacaatataatggttactacacatcacaggaacttagttttggtttaagtcatttttgattgcttttttccaatggaatatgtatataccaggttttagcaaaatgcacacttttggctctttttggtatatgttctttatattttaatgtgagtatatacactaagaacaaactaaattgtgatttatgatcttcatttattttaatgataatggttttaaaatatgttcctgattgtacatattgtaaaataaacatgttttttaacaaaaaaaaaaaaaaaaaaaaaaaaaaaaa

SEQ ID NO: 590 - DNA, 5227 bp, human
gctcctcctccgctccgccagtgtccggccgcgggccggccttagtgactggggcggcgggccccggggccgcggcgtggggcgggcaggcggacgccggccgcgggctgctttcgtcggctcccaagctctcccggagcgagcagccgcccgcgagccgccgcggagcctcctcgcccgctcccgccggcgagcaagatgatgtgcgaggtgatgccgaccatcagcgaagcagaaggcccccctggaggaggtggaggccatggttccggctccccttcacagccagatgcagattcacattttgaacagttgatggtctccatgctagaagaaagggaccgccttcttgatacactgagagagactcaagaaacgctggccttaacccaggggaagttacacgaggttggtcatgaaagagattccttgcagagacagctcaacacggcacttccacaggagttcgcagcacttactaaagaactcaatgtatgcagggaacagctccttgaaagggaagaagaaattgctgaactgaaagcagaaaggaataacaccaggctgctgttagagcatttggaatgccttgtctccaggcatgagcggtctcttaggatgaccgtggtgaagagacaagcgcagtctccagcaggcgtgtccagcgaagtggaagtgctgaaagcactgaagtccttatttgaacaccacaaagctctggatgaaaaggtgagagagcgattacgagtagcacttgaaagatgtagtttgttagaagaggaattaggtgccacacacaaagagctaatgattcttaaagaacagaataatcagaaaaaaactctaacagatggagtgctggacataaaccatgaacaagaaaatacaccaagcacgagtggaaagagatcttctgatggttctttaagccacgaggaagaccttgctaaagtaattgagctccaagaaatcataagtaagcagtcaagggaacagagccaaatgaaagaacgcctggcttccctttccagtcatgtgacagaactggaagaggatctggacacggctagaaaagatctcatcaaatctgaagaaatgaacacaaaattgcaacgagatgtccgtgaagccatggcccaaaaggaagatatggaagagagaatcactactcttgaaaaacgctacctcgctgcacagcgtgaagccacatctgtgcatgacctcaatgataaacttgaaaatgaaattgcaaataaagattctatgcatcgacagactgaagataaaaaccgccagttacaggagcgcttggaattggcagagcaaaagctgcaacagacactgaggaaggcagagacgctcccggaggtggaggcggagctggcccagagggtggcagcgctttccaaggctgaagagagacacggcaacattgaagaaaggttacgacagatggaagcacagttggaggagaagaatcaagaactgcagcgggcaaggcaaagagaaaaaatgaacgaagaacataataaacgtttatcagacactgttgacaagctgctttcagaatctaatgagaggcttcaacttcatcttaaagagagaatggctgctttggaagataagaactctcttttaagagaagttgaaagtgcaaaaaagcagttagaagaaacacaacacgataaggatcagcttgtcctaaacattgaagcactgagggctgaactagaccacatgagactaagaggtgcttcacttcatcatggccgaccccacttgggcagtgtcccagatttcaggttccccatggcagacggccacacagactcctacagcaccagtgcagtgctgcggcgcccacagaaaggccggctggcagccctgcgagatgagccttccaaggtacaaactcttaatgagcaggattgggaacgtgcccagcaagctagtgtcttggcaaatgtagcacaagcattcgagagtgatgctgacgtgtctgatggtgaagatgacagggacactctcctcagctcagttgacctgctatcgcccagcgggcaggccgacgcgcacacactagccatgatgcttcaggagcagctggacgccatcaacaaagagatcaggttgattcaggaagaaaaagaaaatacagagcagcgggcagaggagattgaaagtcgagttggcagtggaagtctagacaatcttggtcgttttagatcaatgagctccattcccccctaccctgcttcctcgcttgctagctcctcccctccgggcagtgggcgctccaccccacgaaggatccctcacagcccagctcgggaagtggacagactgggcgtcatgacccttttgccaccttccagagaagaggtacgagatgacaagacaaccataaagtgtgaaacctccccgccttcctccccgagagcccttcggttagaccggctgcacaaaggggcgctgcacaccgtcagccacgaggacatcagggacataaggaactccacaggctcccaggatggtcccgtgagcaaccccagcagtagcaacagtagccaggactcgctccacaaagccccaaagaagaaaggcattaagtcctccattggccgcttgtttggcaagaaagaaaagggccgacctggacaaactggcaaagaagcattaggacaagctggtgtttccgagacggataactcatctcaggatgccttgggacttagcaaattggggggacaggctgaaaaaaatcgtaaacttcaaaaaaagcatgaattgctggaggaagcccggagacaaggtttaccttttgcccaatgggacgggccaacggttgtggtctggctagagctctgggttgggatgccagcctggtatgtggctgcctgccgagcaaacgtgaaaagcggggccatcatgtcggccctgtccgacacagagatccagcgtgagattggcatcagcaaccccctgcacaggctgaagctgaggctggccatccaggagatcatgtcgctgaccagcccgtctgccccgcccacatctagaacgacactcgcctatggggacatgaaccacgagtggatcggcaacgagtggctccccagcctgggcctcccccagtaccgcagctacttcatggagtgccttgtagacgccaggatgctggaccacttgaccaagaaagaccttcgagggcagctgaaaatggtcgacagttttcacagaaacagtttccagtgtggaattatgtgcctgagaaggttaaattatgaccggaaagaactggaaagaaaaagagaagaaagtcagagtgaaataaaagacgtgcttgtttggagcaatgatcgagtgattcgctggatcctgtcaattggccttaaagaatatgcaaacaatcttatagagagtggtgttcacggagcacttctggccttagatgaaaccttcgacttcagtgcactggcactgctgttacagatcccgacgcagaacacacaggctcgtgctgtcttggaaagagaatttaacaaccttttggtcatggggactgatagaaggtttgatgaagatgatgataaaagctttaggagagcaccttcatggagaaaaaagtttagaccaaaggacattcgtggcttagctgctgggtcagcagagactctccctgcaaacttccgggtgacttcttctatgtcttccccctctatgcagccaaagaagatgcagatggacggcaatgtatcaggaacacagaggttggattctgctacagtcaggacttactcctgctaaagtctcctgttgtttacccacactacttctacagatgattatgcagcatttgaatccaacaaagactacattttggaatccagtggaatctttaatcttgttaatacttgttatatggaccctaagatattttattacagagtttttaattagtgaaaaattcatgaataccatagagaaaatattttagaatttaatgtttcttatatttatgtaaacttatgactcttcatttatatagttacttactttttcatgtatatccaggctataaatatcctttcaaatcatgttcttatacctaattttagtctttcaaatgaatgtactgtaatgcttgtatgtataaatcctatgaatagagggcttttgtaaattatgcatttattgtaattatcattaattttttaatgataaaccatgacaaaggattttacgtttataaaattatgacagaagccatgtgcattatcctttacggacgcagcctagctctacagcaatcatcctgaaataagcatacctaatttcaagcaattgttgtattttcatgactgaccttaactgtactttttctagcaagagatgctttattctgcagcatgaacagatttaaaatggctggtgttaaatatcagctcctaataagatgtggactgaaaacactatcacaacactatgagaagcccctagcactggttaacgctttcctagcctagtctctggatttggggagcttgtcttcagtggctgagactgtgagctgggagcagttctctcagctggagagactcgggatggggtaacctggggaccagtctagcccctgcaccctcttccctgcctctgctccttgggagcgggtggagagacacccatgtggctccccttagggccagcaccaagcaccacgctctcatcctgcaagtcggcgcacacagtggatgaaggcaggagacccagaaagcagtgcagtgcagctctaataaaggccttatttttcttatgtaaatcatctttttacatttgtttgtaaacatgtttaaagaacgaacctagtgggacatttttagactttgatgctctagccattttggattgtgtaagttgcagatgtggcttttactttttaaatggcatattaacaagccagcaaagtgtgtcagaccatggcgtggtatttattgtgcagcagatccagagacagaggcagcctgtcttttcagttggtttctgcttttaatttacttgtacaattcattgttactgttctgtttttctattaatcttttgtcaacttcctgattatgtaacaaagtatgtacagtctacttttgaactatttttatcacagtattatttattgctttctttcaataaagtactgaagcattttccactgccaaaaaaaaaaaaaaaa

SEQ ID NO: 591 - DNA, 2233 bp, human
tcccacgctcccattttaccgaggtggatctgaggcccagagtgggcaaagggcttgccaaggtcgcagagcgcgcagaggattagaaccctgattccgtccagcacctgcggagttggagacgcccacaggaaacgcccacctgaccgggtgagtgagggggcgggcgagccggaggggtggagtttattcgcgccccgctccgccaccagggcttgggggcggggccttcctgcaacctttgcggctccaacatggctccgcggctgtgcagcatctctgtgacggcgcggcggctgctggggggcccggggcctcgcgctggggacgttgcgtctgcagctgcggcgcgtttctattccaaggacaatgaaggcagctggttccgctccctctttgttcacaaagtggatccccggaaggatgcccactccaccctgctgtccaagaaggaaaccagcaacctctataagatccagtttcacaatgtaaagcctgaatacctggatgcctacaacagcctcacggaggctgtgctgcccaagcttcacctggatgaggactacccatgctcactcgtgggcaactggaacacgtggtatggggagcaggaccaggcagtgcacctgtggcgattctcaggtggctacccagccctcatggactgcatgaacaagctcaaaaacaataaggagtacctggagttccgaagggagcggacgcagatgctgctgtccaggagaaaccagctgctccttgagttcagcttctggaatgagccacagcccagaatgggtcccaacatctatgagctgaggacatacaagctcaagccaggaaccatgatcgagtgggggaacaactgggctcgggccatcaagtaccggcaggagaaccaggaggcagtgggcggcttcttctcacagataggagagctctacgtggtgcaccatctctgggcctataaagacctgcagtctcgggaggagactcgaaacgctgcctggaggaagagaggctgggatgaaaatgtctactatacagtccccctggtgcgacacatggagtctaggatcatgatccccttgaagatctcgcctctgcagtgatgctgcctacacctccacctccttccccttctccctcaggcaaccccgacagacagtggcactcctggtcctgctgtcttggttttgtcttggctctgggaggactctgaggggcagtgctcagttcagacaagggggaactgaaggctgacaagttctgaggattacagctctgcccaggccctttctactttccctgcctgcctccctccccctgctagaagtagtttctgatttccctgaatgaaagatagtgatcttttaggccttcatatatcttctaaaattcctcatctcaaggccaccagtccccagttatcacccttggaaatcctctgtttagcttagttgcacaaaaggtagtatgtccagtggctagaggtggggtgggaagagaggaggccaggccaggccctcaggaattccctggtttccactgggccacccacttgctggacagtctgagccaagtccctcctgctggagaaaagcctggaactgccaaaacaaaaaaacaaatacaaacaaacctcgtcaccacggtcaggaggaggttcagacattctgcccagaggggctggggaaagggatgggagccaggaaagatttaggggcaggagacagacacgtaacaggaactcggaaggtagaacttagaattcagaacttgggtttcaattgtagaatttggaatctggaatacagaattgggaagaagaacagagatgacaaaagaccacttgaagagaggttcctaatactagacagatggagagtggcttggctgtttccccctgcatattggggttgaaaacttaaatgtgtagttccagtccttctatgcagagtctctcctgccctccctccttcctgcaggcaaatatacaagctagaccctgttccctcaccctgtatcctgtctcccctaattgacattctatcagcccaaccctcattctgcagggccacctggtgtgtggaggtggcgggaggggtcagtgactctgggggtctcctcagtgacccccatacctcatcatgaacccttgggtagcttgattctgcctaccatccaggaaaacttgtgctggaattgctgatggaaacaattaaatatttactat

SEQ ID NO: 592 - DNA, 3607 bp, human
tcctggagcggcggcggcagcggcttcccgggcacctgggcgtggggagcgggggcgcgcggcgcggggcgggcggagcgagcgcgcgccatggaggtggcgggcggcgcggagcgggcgtgctgagccccggccgccggcccggcatgggcgtctcccgcgggccctccgccggccggggctagggccggatggagccgcgggacggtagccccgaggcccggagcagcgactccgagtcggcttccgcctcgtccagcggctccgagcgcgacgccggtcccgagccggacaaggcgccgcggcgactcaacaagcggcgcttcccggggctgcggctcttcgggcacaggaaagccatcaccaagtcgggcctccagcacctggccccccctccgcccacccctggggccccgtgcagcgagtcagagcggcagatccggagtacagtggactggagcgagtcagcgacatatggggagcacatctggttcgagaccaacgtgtccggggacttctgctacgttggggagcagtactgtgtagccaggatgctgcagaagtcagtgtctcgaagaaagtgcgcagcctgcaagattgtggtgcacacgccctgcatcgagcagctggagaagataaatttccgctgtaagccgtccttccgtgaatcaggctccaggaatgtccgcgagccaacctttgtacggcaccactgggtacacagacgacgccaggacggcaagtgtcggcactgtgggaagggattccagcagaagttcaccttccacagcaaggagattgtggccatcagctgctcgtggtgcaagcaggcataccacagcaaggtgtcctgcttcatgctgcagcagatcgaggagccgtgctcgctgggggtccacgcagccgtggtcatcccgcccacctggatcctccgcgcccggaggccccagaatactctgaaagcaagcaagaagaagaagagggcatccttcaagaggaagtccagcaagaaagggcctgaggagggccgctggagacccttcatcatcaggcccaccccctccccgctcatgaagcccctgctggtgtttgtgaaccccaagagtgggggcaaccagggtgcaaagatcatccagtctttcctctggtatctcaatccccgacaagtcttcgacctgagccagggagggcccaaggaggcgctggagatgtaccgcaaagtgcacaacctgcggatcctggcgtgcgggggcgacggcacggtgggctggatcctctccaccctggaccagctacgcctgaagccgccaccccctgttgccatcctgcccctgggtactggcaacgacttggcccgaaccctcaactggggtgggggctacacagatgagcctgtgtccaagatcctctcccacgtggaggaggggaacgtggtacagctggaccgctgggacctccacgctgagcccaaccccgaggcagggcctgaggaccgagatgaaggcgccaccgaccggttgcccctggatgtcttcaacaactacttcagcctgggctttgacgcccacgtcaccctggagttccacgagtctcgagaggccaacccagagaaattcaacagccgctttcggaataagatgttctacgccgggacagctttctctgacttcctgatgggcagctccaaggacctggccaagcacatccgagtggtgtgtgatggaatggacttgactcccaagatccaggacctgaaaccccagtgtgttgttttcctgaacatccccaggtactgtgcgggcaccatgccctggggccaccctggggagcaccacgactttgagccccagcggcatgacgacggctacctcgaggtcattggcttcaccatgacgtcgttggccgcgctgcaggtgggcggacacggcgagcggctgacgcagtgtcgcgaggtggtgctcaccacatccaaggccatcccggtgcaggtggatggcgagccctgcaagcttgcagcctcacgcatccgcatcgccctgcgcaaccaggccaccatggtgcagaaggccaagcggcggagcgccgcccccctgcacagcgaccagcagccggtgccagagcagttgcgcatccaggtgagtcgcgtcagcatgcacgactatgaggccctgcactacgacaaggagcagctcaaggaggcctctgtgccgctgggcactgtggtggtcccaggagacagtgacctagagctctgccgtgcccacattgagagactccagcaggagcccgatggtgctggagccaagtccccgacatgccagaaactgtcccccaagtggtgcttcctggacgccaccactgccagccgcttctacaggatcgaccgagcccaggagcacctcaactatgtgactgagatcgcacaggatgagatttatatcctggaccctgagctgctgggggcatcggcccggcctgacctcccaacccccacttcccctctccccacctcaccctgctcacccacgccccggtcactgcaaggggatgctgcaccccctcaaggtgaagagctgattgaggctgccaagaggaacgacttctgtaagctccaggagctgcaccgagctgggggcgacctcatgcaccgagacgagcagagtcgcacgctcctgcaccacgcagtcagcactggcagcaaggatgtggtccgctacctgctggaccacgcccccccagagatccttgatgcggtggaggaaaacggggagacctgtttgcaccaagcagcggccctgggccagcgcaccatctgccactacatcgtggaggccggggcctcgctcatgaagacagaccagcagggcgacactccccggcagcgggctgagaaggctcaggacaccgagctggccgcctacctggagaaccggcagcactaccagatgatccagcgggaggaccaggagacggctgtgtagcgggccgcccacgggcagcaggagggacaatgcggccaggggacgagcgccttccttgcccacctcactgccacattccagtgggacggccacggggggacctaggccccagggaaagagccccatgccgccccctaaggagccgcccagacctagggctggactcaggagctgggggggcctcacctgttcccctgaggaccccgccggacccggaggctcacagggaacaagacacggctgggttggatatgcctttgccggggttctggggcagggcgctccctggccgcagcagatgccctcccaggagtggaggggctggagagggggaggccttcgggaagaggcttcctgggccccctggtcttcggccgggtccccagcccccgctcctgccccaccccacctcctccgggcttcctcccggaaactcagcgcctgctgcacttgcctgccctgccttgcttggcacccgctccggcgaccctccccgctcccctgtcatttcatcgcggactgtgcggcctgggggtggggggcgggactctcacggtgacatgtttacagctgggtgtgactcagtaaagtggatttttttttctttaaaaaaaaaaaaaaaaaaa

SEQ ID NO: 593 - DNA, 3752 bp, human
cgcgctgtgcgcggtgactggcggctgcactggcggcagctggaggtgtaatagtgcgggtagtgggtttggagaagttccgaggcggcggtggcgccggtcaggacaaggatagcggaaccgggccctgggcttgtcgctcaccatgccgacagtagaggagctttaccgcaattatggcatcctggccgatgccacggagcaagtgggccagcataaagatgcctatcaagtgatattggatggtgtgaaaggtggtactaaggaaaagcgattagcagctcaatttattccgaaattctttaagcattttccagaattggctgattctgctatcaatgcacagttagacctctgtgaggatgaagatgtatctattcgacgtcaagcaattaaagaactgcctcaatttgccactggagaaaatcttcctcgagtggcagatatactaacgcaacttttgcagacagatgactctgcagaatttaacctagtgaacaatgccctattaagtatatttaaaatggatgcaaaagggactttaggtgggttgttcagccaaatacttcaaggagaggacattgttagagaacgagcaattaaattcctttctacaaaacttaagactttaccagatgaagtcttaacaaaggaagtggaagagcttatactaactgaatccaaaaaggtcctagaagatgtgactggtgaagaatttgttctatttatgaagatactgtctgggttaaaaagcttacagacagtgagtggaagacagcaacttgtagagttggtggctgaacaggccgacctagaacagaccttcaatccctcggatcctgactgtgtggacaggctcttacagtgcactcggcaggcagtacccctcttctctaaaaatgtccattccacaaggtttgtgacatatttctgtgagcaggttctccctaacctcggtaccttgactaccccagtggaaggtcttgatatacagttggaggtattgaaattgttggcggagatgagttcattttgtggtgacatggaaaaactagaaacaaatttaaggaaactatttgataagttattggaatacatgcccctccctccagaagaggcagaaaatggagagaatgctggtaatgaagaacccaagctacagttcagttatgtggaatgtttgttgtacagttttcaccagttgggccgaaaacttccagatttcttaacagccaaactgaatgcagaaaagctcaaagatttcaaaatcaggctgcagtactttgcacggggcctgcaagtttatatcagacaacttcgcttagctctccagggtaaaacgggtgaggccttaaaaacagaagagaacaagattaaagtcgttgcattgaaaataacaaacaatatcaatgttttaatcaaggatctcttccacattcctccttcttataagagcacagtaacactatcctggaaacctgtacaaaaggttgagattgggcaaaagagagccagtgaagatacaacttcaggttcaccacccaagaaatcttcagcaggaccaaaaagagatgccaggcagatttataaccctcccagtgggaaatatagcagcaatttgggcaactttaattatgagaggagccttcaggggaagtagaggtggccgaggttggggcacacgaggaaatcgtagtcggggaagactctactgaataagacatcagcattcttcagcattgtcatgagcttaatatacttaaattctactactcattggattgccggggatgtccctttaaacagactgctgccttcagctaaaaacttaatgttctttatacctttgtatgtatgacctacttttgtaacagaccatggttgtgtccaaggtaaaaccacagtgatatttttggatgctttgtctgcaatcttgacttgtttttgcagtatcattattcagacttcaaattgtgaatcttttaaacatcttgataatttgttgttgagagctgttcattctaaaatgtaatgaaattcagtctagttctgctgataaagatcatcagttttgaaaggttactgattttcctcttccctcttagttttttacccaatatatggagaagagtaatggtcaatcttaacattttgttttaattgtttaataaagctgctgggcagtggtgcagcattcctacctagtgtcataaaagcaaaatacttacatagctttcttaaaatataggaatgacattacatttttaggagaaagtaagttgctttgcaccgcctacttaattcttttccatatattgtgatacaaacttttgaatatggaatcttactatttgaatagaaatgtgtatgtataatatacatacatacataagcatatatgtgtgtgtgtgtgtgtatatatatatatatgcatgctgtgaaacttgactacacaacataaatcactttttaaattccaggaacgggtagtctgacacggtgattatccttttgaggctgaatccgttattaacttgttatttaggtttttactcccagtagcaagggattctaagttagttgcacttacatgattattgttatttaaaactaagaataaaggctgcattttcaaagataaattggaattgctgttggtgaaataacaaccaaaatactgaatctgatgtacatacaggtttctacaggaagagatggtataatttacaatttggagatttaataaccagggctacccagaaaaagtgacttgataacatggtaccaataagtaagggatgctctctcggtttgcttttgccactttcaagattttaacttctcaggttattaatcaaaattattgtataagttagccaatagaatttttaggttaaaacaacagatggggggtttgtggagtgtttaatgtcatgggcatttttagtagcatagaccctttgttctgcatttgaatgtttcgtatatttttgtttcacagttaatcttccctccccaagtttgctattcaaatcaactgcctgaatgacatttctagtagtctgatgtatttttctgaggaatagtttgtgattccaatgcaggtgtcttcattaccattacctctacactgcagaagaagcaaaactcctttattagaattactgcacatgtgtatggggaaaatagttctgaaaggctagaatgatacaagtgagcaaaagttggtcagcttggctatggagtggtggcaataatctctaaacattccaaaagaccatgagctgaacctaaactcccttggaatctgaacaaaggaatataaaattgccatttgaaaactgaccagctaatctggacctcagagatagatcagccagtggcccaaagccatttcaagtacagaaattatagagactacagctaaataaatttgaacattaaatataattttaccactttttgtctttataagcatatttgtaaactcagaactgagcagaagtgactttactttctcaagtttgatactgagttgactgttcccttatccctcacccttccccttccctttcctaaggcaatagtgcacaacttaggttatttttgcttccgaatttgaatgaaaaacttaatgccatggatttttttcttttgcaagacacctgtttatcatcttgtttaaatgtaaatgtccccttatgcttttgaaataaatttccttttgtaattttaaaaaaaaaaaaaaaaaa

SEQ ID NO: 594 - DNA, 1681 bp, human
cacagccggccgacaccacaccagccggggagccgccgccgccgccgccacctctgagcagccggctgggagcgagagccgacagctagtctgcaagccaccgctgtcgccatggggagccgcgtctcgcgggaagacttcgagtgggtctacaccgaccagccgcacgccgaccggcgccgggagatcctggcaaagtatccagagataaagtccttgatgaaacctgatcccaatttgatatggattataattatgatggttctcacccagttgggtgcattttacatagtaaaagacttggactggaaatgggtcatatttggggcctatgcgtttggcagttgcattaaccactcaatgactctggctattcatgagattgcccacaatgctgcctttggcaactgcaaagcaatgtggaatcgctggtttggaatgtttgctaatcttcctattgggattccatattcaatttcctttaagaggtatcacatggatcatcatcggtaccttggagctgatggcgtcgatgtagatattcctaccgattttgagggctggttcttctgtaccgctttcagaaagtttatatgggttattcttcagcctctcttttatgcctttcgacctctgttcatcaaccccaaaccaattacgtatctggaagttatcaataccgtggcacaggtcacttttgacattttaatttattactttttgggaattaaatccttagtctacatgttggcagcatctttacttggcctgggtttgcacccaatttctggacattttatagctgagcattacatgttcttaaagggtcatgaaacttactcatattatgggcctctgaatttacttaccttcaatgtgggttatcataatgaacatcatgatttccccaacattcctggaaaaagtcttccactggtgaggaaaatagcagctgaatactatgacaacctccctcactacaattcctggataaaagtactgtatgattttgtgatggatgatacaataagtccctactcaagaatgaagaggcaccaaaaaggagagatggtgctggagtaaatatcattagtgccaaagggattcttctccaaaactttagatgataaaattagccgggcgtggcggcacatgcctgtaatcccagctacatgggaggctgaggtgggagaattgcttgaacccaggaggcggaggcagaggctgcagtgacccaagattgtgccactgcactccaccctgggcaacagagcaagaccccatctcaaaaataaataaatatatataaaaaataaaaagctatttctagtttatttcactataaagttttgctttattaaaaagctaataaacagctattaatcacagtgtattagtatttgttacatttttgtatttcactatctttatactatataatatggtaacttgggtaccgggggaactttaaaatttcatctcaaaaataatttttaaaaagcctgaggtatgatatagcataaaagattgagatgaaaatatatttccctgtaagctgaattactcatttaaaaattttaacttctatatgggacccgaattagacactgctgaatcctgtacagccttactcataaataaagtacttactgaatttccaccattcaaaaaaaaaaaaaaa

SEQ ID NO: 595 - DNA, 2964 bp, human
gagcacagcatggcggtcaaggtgcagacaactaagcgaggggatcctcatgagttaagaaacatatttctacagtatgccagtactgaggttgatggagagcgttatatgaccccagaagactttgttcagcgctatcttggactgtataatgatccaaatagtaacccaaagatcgtgcagctcttggcaggagtagctgatcaaaccaaggatgggttgatctcctatcaagagtttttggcatttgaatctgttttatgtgctccagattccatgttcatagtggctttccagttgtttgacaagagtggaaatggagaggtgacatttgaaaatgtcaaagaaatttttggacagactattattcatcatcatatcccttttaactgggattgtgaatttatccgactgcattttgggcataaccggaagaagcatcttaactacacagaattcacgcagtttctccaggagctgcaattggaacatgcaagacaagcctttgcactcaaagacaaaagcaaaagtggcatgatttctggtctggatttcagtgacatcatggttaccattagatctcacatgcttactccttttgtggaggagaacttagtttcagcagctggaggaagtatctcacaccaggttagcttctcctacttcaatgcatttaactcgttactgaataacatggagcttgttcgtaagatatatagcactctagctggcacaaggaaagatgttgaagtcacaaaggaggaatttgcccagagtgccatacgctatggacaagtcacaccactagaaattgatattctatatcagcttgcagacttatataatgcttcagggcgcttgactttggcagatattgagagaatagccccattggctgagggggccttaccttacaacctggcagaacttcagagacagcagtctcctgggttaggcaggcctatctggctccagattgccgagtctgcttacagattcactctgggctcagttgctggagctgtgggagccactgcagtgtatcctatagatctggtgaagacccgaatgcaaaaccagcgtggctctggctctgttgttggggagctaatgtacaaaaacagctttgactgttttaagaaagtcttgcgttatgagggcttctttggactctacaggggtctgataccacaacttataggggttgctccagaaaaggccattaaactgactgttaatgattttgttcgggacaaatttaccagaagagatggctctgttccacttccagcagaagttcttgctggaggctgtgctggaggctctcaggtcatttttaccaacccattggagatagtgaagattcgtctgcaagtagctggagagatcaccacgggacccagagtcagcgccctgaatgtgctccgggacttgggaatttttggtctgtataagggtgccaaagcgtgtttcctccgagacattcccttctctgcaatctattttcctgtttatgctcattgcaaactacttctggctgatgaaaatggacacgtgggaggtttaaatcttcttgcagctggagccatggcaggtgtcccagctgcatctctggtgacccctgctgatgtcatcaagacaagactgcaggtggctgcccgcgctggccagacgacatacagtggtgtcatcgactgtttcaggaagattctccgggaagaagggccctcagcattttggaaagggactgcagctcgagtgtttcgatcctctccccagtttggtgttaccttggtcacttatgaacttctccagcggtggttttacattgattttggaggcctcaaacccgctggttcagaaccaacacctaagtcacgcattgcagaccttcctcctgccaaccctgatcacatcggtggatacagactcgccacagccacgtttgcaggcatcgaaaacaaatttggcctttatctcccgaaatttaagtctcctagtgttgctgtggttcagccaaaggcagcagtggcagccactcagtgatgagacaactgttgagtgtggcaaaatggcgccttgaagaaagaggcctaggagagcagccctgtaatgtatccagtcagctgcatggtactgactgagctgaggagtcaaactcttctttctgtatgacatatacatatacttgtttataaaataatcatttgcccagggaaaaaaccacaacgctgtttcaagctttagtcttatgtgttgaaatgtttttgtaagccttggcatgaattagtgttctagactctgctttgcacagcttgcacttacagtgattgtacatattgtacatctttgtacagagacatcttggcacctcatcccaacaaatcacatttgtagaaatgtaatgcggttctgagtggcttgaaatgtacagaatgttttgaaagtgttttattaagaatcacacaaaaataaatgtattaaaattaaattcattctcttattggtgacttatggaaataaagcatcaatattggatgtatttaattcctagtttgttttccattctggaataaaaaggtatttgctgataaaaggcataacgagacatagtgctgctaccactgaataagtgatactttggaaagatgcatgccagtggatgccagaggaccaggctaatgacttgtgtgtgctgatgtgtttccatttgtatttaatgtgtgtagaccctcctctgttcatcaatcaaaaagcatttcctaggcagctcctcgcctgtcagtgtgcatatggaaacagggacatctccatcattactggcttagttttgctttcctttgacacagtaaggcaaaggccaagctttcaaaagagtaaaggatactttcacaatttcccttcatatggatatgattccagtcaaaaataaaatgcacaccaaaatgtaaaaaaaaaaaaaaa

SEQ ID NO: 596 - DNA, 4932 bp, human
cccggctttatatctatatatacacaggtatatgtgtatattttatataattgttctccgttcgttgatatcaaagacagttgaaggaaatgaattttgaaacttcacggtgtgccaccctacagtactgccctgacccttacatccagcgtttcgtagaaaccccagctcatttctcttggaaagaaagttattaccgatccaccatgtcccagagcacacagacaaatgaattcctcagtccagaggttttccagcatatctgggattttctggaacagcctatatgttcagttcagcccattgacttgaactttgtggatgaaccatcagaagatggtgcgacaaacaagattgagattagcatggactgtatccgcatgcaggactcggacctgagtgaccccatgtggccacagtacacgaacctggggctcctgaacagcatggaccagcagattcagaacggctcctcgtccaccagtccctataacacagaccacgcgcagaacagcgtcacggcgccctcgccctacgcacagcccagctccaccttcgatgctctctctccatcacccgccatcccctccaacaccgactacccaggcccgcacagtttcgacgtgtccttccagcagtcgagcaccgccaagtcggccacctggacgtattccactgaactgaagaaactctactgccaaattgcaaagacatgccccatccagatcaaggtgatgaccccacctcctcagggagctgttatccgcgccatgcctgtctacaaaaaagctgagcacgtcacggaggtggtgaagcggtgccccaaccatgagctgagccgtgaattcaacgagggacagattgcccctcctagtcatttgattcgagtagaggggaacagccatgcccagtatgtagaagatcccatcacaggaagacagagtgtgctggtaccttatgagccaccccaggttggcactgaattcacgacagtcttgtacaatttcatgtgtaacagcagttgtgttggagggatgaaccgccgtccaattttaatcattgttactctggaaaccagagatgggcaagtcctgggccgacgctgctttgaggcccggatctgtgcttgcccaggaagagacaggaaggcggatgaagatagcatcagaaagcagcaagtttcggacagtacaaagaacggtgatggtacgaagcgcccgtttcgtcagaacacacatggtatccagatgacatccatcaagaaacgaagatccccagatgatgaactgttatacttaccagtgaggggccgtgagacttatgaaatgctgttgaagatcaaagagtccctggaactcatgcagtaccttcctcagcacacaattgaaacgtacaggcaacagcaacagcagcagcaccagcacttacttcagaaacagacctcaatacagtctccatcttcatatggtaacagctccccacctctgaacaaaatgaacagcatgaacaagctgccttctgtgagccagcttatcaaccctcagcagcgcaacgccctcactcctacaaccattcctgatggcatgggagccaacattcccatgatgggcacccacatgccaatggctggagacatgaatggactcagccccacccaggcactccctcccccactctccatgccatccacctcccactgcacacccccacctccgtatcccacagattgcagcattgtcagtttcttagcgaggttgggctgttcatcatgtctggactatttcacgacccaggggctgaccaccatctatcagattgagcattactccatggatgatctggcaagtctgaaaatccctgagcaatttcgacatgcgatctggaagggcatcctggaccaccggcagctccacgaattctcctccccttctcatctcctgcggaccccaagcagtgcctctacagtcagtgtgggctccagtgagacccggggtgagcgtgttattgatgctgtgcgattcaccctccgccagaccatctctttcccaccccgagatgagtggaatgacttcaactttgacatggatgctcgccgcaataagcaacagcgcatcaaagaggagggggagtgagcctcaccatgtgagctcttcctatccctctcctaactgccagccccctaaaagcactcctgcttaatcttcaaagccttctccctagctcctccccttcctcttgtctgatttcttaggggaaggagaagtaagaggctacctcttacctaacatctgacctggcatctaattctgattctggctttaagccttcaaaactatagcttgcagaactgtagctgccatggctaggtagaagtgagcaaaaaagagttgggtgtctccttaagctgcagagatttctcattgacttttataaagcatgttcacccttatagtctaagactatatatataaatgtataaatatacagtatagatttttgggtggggggcattgagtattgtttaaaatgtaatttaaatgaaagaaaattgagttgcacttattgaccattttttaatttacttgttttggatggcttgtctatactccttcccttaaggggtatcatgtatggtgataggtatctagagcttaatgctacatgtgagtgacgatgatgtacagattctttcagttctttggattctaaatacatgccacatcaaacctttgagtagatccatttccattgcttattatgtaggtaagactgtagatatgtattcttttctcagtgttggtatattttatattactgacatttcttctagtgatgatggttcacgttggggtgatttaatccagttataagaagaagttcatgtccaaacgtcctctttagtttttggttgggaatgaggaaaattcttaaaaggcccatagcagccagttcaaaaacacccgacgtcatgtatttgagcatatcagtaacccccttaaatttaataccagataccttatcttacaatattgattgggaaaacatttgctgccattacagaggtattaaaactaaatttcactactagattgactaactcaaatacacatttgctactgttgtaagaattctgattgatttgattgggatgaatgccatctatctagttctaacagtgaagttttactgtctattaatattcagggtaaataggaatcattcagaaatgttgagtctgtactaaacagtaagatatctcaatgaaccataaattcaactttgtaaaaatcttttgaagcatagataatattgtttggtaaatgtttcttttgtttggtaaatgtttcttttaaagaccctcctattctataaaactctgcatgtagaggcttgtttacctttctctctctaaggtttacaataggagtggtgatttgaaaaatataaaattatgagattggttttcctgtggcataaattgcatcactgtatcattttcttttttaaccggtaagagtttcagtttgttggaaagtaactgtgagaacccagtttcccgtccatctcccttagggactacccatagacatgaaaggtccccacagagcaagagataagtctttcatggctgctgttgcttaaaccacttaaacgaagagttcccttgaaactttgggaaaacatgttaatgacaatattccagatctttcagaaatataacacatttttttgcatgcatgcaaatgagctctgaaatcttcccatgcattctggtcaagggctgtcattgcacataagcttccattttaattttaaagtgcaaaagggccagcgtggctctaaaaggtaatgtgtggattgcctctgaaaagtgtgtatatattttgtgtgaaattgcatactttgtattttgattattttttttttcttcttgggatagtgggatttccagaaccacacttgaaacctttttttatcgtttttgtattttcatgaaaataccatttagtaagaataccacatcaaataagaaataatgctacaattttaagaggggagggaagggaaagtttttttttattatttttttaaaattttgtatgttaaagagaatgagtccttgatttcaaagttttgttgtacttaaatggtaataagcactgtaaacttctgcaacaagcatgcagctttgcaaacccattaaggggaagaatgaaagctgttccttggtcctagtaagaagacaaactgcttcccttactttgctgagggtttgaataaacctaggacttccgagctatgtcagtactattcaggtaacactagggccttggaaattcctgtactgtgtctcatggatttggcactagccaaagcgaggcacccttactggcttacctcctcatggcagcctactctccttgagtgtatgagtagccagggtaaggggtaaaaggatagtaagcatagaaaccattagaaagtgggcttaatggagttcttgtggcctcagctcaatgcagttagctgaagaattgaaaagtttttgtttggagacgtttataaacagaaatggaaagcagagttttcattaaatccttttaccttttttttttcttggtaatcccctaaaataacagtatgtgggatattgaatgttaaagggatatttttttctattatttttataattgtacaaaattaagcaaatgttaaaagttttatatgctttattaatgttttcaaaaggtattatacatgtgatacattttttaagcttcagttgcttgtcttctggtactttctgttatgggcttttggggagccagaagccaatctacaatctctttttgtttgccaggacatgcaataaaatttaaaaaataaataaaaactaattaagaaaaaaaaaaaaaaaaaaaaaaaaaaaaa

SEQ ID NO: 597 - DNA, 1416 bp, human
ggaggggaggggcgcggccgccggacgcgccctcgcagcttccgccgggcccctccggaaatcccgtatcgtagggcgacggcggcttagaaagtgcttcctggagcgcagacgaggtcatgaatcatgtgacggtggcttgaggaggaacctgtctttaaagctgtccctgaagtgacagcggagagaaccaggcagcccagaaaccccaggcgtggagattgatcctgcgagagaagggggttcatcatggcggatgacctaaagcgattcttgtataaaaagttaccaagtgttgaagggctccatgccattgttgtgtcagatagagatggagtacctgttattaaagtggcaaatgacaatgctccagagcatgctttgcgacctggtttcttatccacttttgcccttgcaacagaccaaggaagcaaacttggactttccaaaaataaaagtatcatctgttactataacacctaccaggtggttcaatttaatcgtttacctttggtggtgagtttcatagccagcagcagtgccaatacaggactaattgtcagcctagaaaaggaacttgctccattgtttgaagaactgagacaagttgtggaagtttcttaatctgacagtggtttcagtgtgtaccttatcttcattataacaacacaatatcaatccagcaatctttagactacaataatacttttatccatgtgctcaagaaagggcccctttttccaacttatactaaagagctagcatatagatgtaatttatagatagatcagttgctatattttctggtgtagggtctttcttatttagtgagatctagggataccacagaaatggttcagtctatcacagctcccatggagttagtctggtcaccagatatggatgagagattctattcagtggatcagaatcaaactggtacattgatccacttgagccgttaagtgctgccaattgtacaatatgcccaggcttgcagaataaagccaactttttattgtgaataataataaggacatatttttcttcagattatgttttatttctttgcattgagtgaggaacataaaatggcttggtaaaagtaataaaatcagtacaatcactaactttcctttgtacatattattttgcagtatagatgaatattactaatcagtttgattattctcagagggtgctgctctttaatgaaaatgaaaattatagctaatgttttttcctcaaactctgctttctgtaaccaatcagtgttttaatgtttgtgtgttcttcataaaatttaaatacaattcgttattctgtttccaatgttagtatgtatgtaaacatgatagtacagccatttttttcatatgtgagtaaaaataaaatagtatttttaaaaataaaaaa

SEQ ID NO: 598 - DNA, 3573 bp, human
ggcacgagggcgcttgagttggtcgggggcagcggcagatttgaggcttaagcaacttcttccggggaagagtgccagtgcagccactgttacaattcaagatcttgatctatatccatagattggaatattggtgggccagcaatcctcagacgcctcacttaggacaaatgaggaaactgaggcttggtgaagttacgaaacttgtccaaaatcacacaacttgtaaagggcacagccaagattcagagccaggctgtaaaaattaaaatgaacaaattacggcaaagttttaggagaaagaaggatgtttatgttccagaggccagtcgtccacatcagtggcagacagatgaagaaggcgttcgcaccggaaaatgtagcttcccggttaagtaccttggccatgtagaagttgatgaatcaagaggaatgcacatctgtgaagatgctgtaaaaagattgaaagctactggaaagaaagcagttaaagcagttctgtgggtctcagcagatggactcagagttgtggatgaaaaaactaaggacctcatagttgaccagacgatagagaaagtttctttctgtgccccagacaggaactttgatagagccttttcttacatatgccgtgatggcaccactcgtcgctggatctgtcactgcttcatggctgtcaaggacacaggtgaaaggttgagccatgcagtaggctgtgcttttgcagcctgtttagagcgcaagcagaagcgggagaaggaatgtggagtgactgctacttttgatgctagtcggaccacttttacaagagaaggatcattccgtgtcacaacagccactgaacaagcagaaagagaggagatcatgaaacaaatgcaagatgccaagaaagctgaaacagataagatagtcgttggttcatcagttgcccctggcaacactgccccatccccatcctctcccacctctcctacttctgatgccacgacctctctggagatgaacaatcctcatgccatcccacgccggcatgctccaattgaacagcttgctcgccaaggctctttccgaggttttcctgctcttagccagaagatgtcaccctttaaacgccaactatccctacgcatcaatgagttgccttccactatgcagaggaagactgatttccccattaaaaatgcagtgccagaagtagaaggggaggcagagagcatcagctccctgtgctcacagatcaccaatgccttcagcacacctgaggaccccttctcatctgctccgatgaccaaaccagtgacagtggtggcaccacaatctcctaccttccaagctaatggcactgactcagccttccatgtgcttgctaagccagcccatactgctctagcacccgtagcaatgcctgtgcgtgaaaccaacccttgggcccatgcccctgatgctgctaacaaggaaattgcagccacatgttcggggaccgagtggggtcaatcttctggtgctgcctctccaggtctcttccaggccggtcatagacgtactccctctgaggccgaccgatggttagaagaggtgtctaagagcgtccgggctcagcagccccaggcctcagctgctcctctgcagccagttctccagcctcctccacccactgccatctcccagccagcatcacctttccaagggaatgcattcctcacctctcagcctgtgccagtgggtgtggtcccagccctgcaaccagcctttgtccctgcccagtcctatcctgtggccaatggaatgccctatccagcccctaatgtgcctgtggtgggcatcactccctcccagatggtggccaacgtatttggcactgcaggccaccctcaggctgcccatccccatcagtcacccagcctggtcaggcagcagacattccctcactacgaggcaagcagtgctaccaccagtcccttctttaagcctcctgctcagcacctcaacggttctgcagctttcaatggtgtagatgatggcaggttggcctcagcagacaggcatacagaggttcctacaggcacctgcccagtggatccttttgaagcccagtgggctgcattagaaaataagtccaagcagcgtactaatccctcccctaccaaccctttctccagtgacttacagaagacgtttgaaattgaactttaagcaatcattatggctatgtatcttgtccataccagacagggagcagggggtagcggtcaaaggagcaaaacagactttgtctcctgattagtactcttttcactaatcccaaaggtcccaaggaacaagtccaggcccagagtactgtgaggggtgattttgaaagacatgggaaaaagcattcctagagaaaagctgccttgcaattaggctaaagaagtcaaggaaatgttgctttctgtactccctcttcccttacccccttacaaatctctggcaacagagaggcaaagtatctgaacaagaatctatattccaagcacatttactgaaatgtaaaacacaacaggaagcaaagcaatctccctttgtttttcaggccattcacctgcctcctgtcagtagtggcctgtattagagatcaagaagagtggtttgtgctcaggctggggaacagagaggcacgctatgctgccagaattcccaggagggcatatcagcaactgcccagcagagctatattttgggggagaagttgagcttccattttgagtaacagaataaatattatatatatcaaaagccaaaatctttatttttatgcatttagaatattttaaatagttctcagatattaagaagttgtatgagttgtaagtaatcttgccaaaggtaaaggggctagttgtaagaaattgtacataagattgatttatcattgatgcctactgaaataaaaagaggaaaggctggaagctgcagacaggatccctagcttgttttctgtcagtcattcattgtaagtagcacattgcaacaacaatcatgcttatgaccaatacagtcactaggttgtagttttttttaaataaaggaaaagcagtattgtcctggttttaaacctatgatggaattctaatgtcattattttaatggaatcaatcgaaatatgctctatagagaatatatcttttatatattgctgcagtttccttatgttaatcctttaacactaaggtaacatgacataatcataccatagaagggaacacaggttaccatattggtttgtaatatgggtcttggtgggttttgttttatcctttaaattttgttcccatgagttttgtggggatggggattctggttttattagctttgtgtgtgtcctcttcccccaaacccccttttggtgagaacatccccttgacagttgcagcctcttgacctcggataacaataagagagctcatctcatttttacttttgaacgttggccttacaatcaaatgtaagttatatatatttgtactgatgaaaatttataatctgctttaacaaaataaatcttcatggtagaaaaaaaaaaaaaaaaaaaaa

SEQ ID NO: 599 - DNA, 5256 bp, human
ggcgactgctggcgaggcgcgtgggaccttacgctggttccccttcgtctcctctcccggcccgggccactagagagttcgctgacgccgggtgagctgagcctgccgccaagatgccggcctattttcagaggccggaaaatgccctcaaacgcgccaacgaatttcttgaggttggcaaaaagcagcctgctctggatgttctttatgatgttatgaaaagtaaaaaacatagaacatggcaaaagatacacgaaccaattatgttgaaatacttggaactttgcgtggatcttcgcaagagccacttggcaaaggaggggttataccagtataagaacatttgtcaacaggtgaacataaaatctctggaggatgttgttagggcatatttgaaaatggcagaggaaaaaactgaagctgctaaagaagaatctcagcagatggtcttagatatagaggatctagataatattcaaactcctgagagtgttctcctaagtgctgtaagtggtgaagacactcaggatcgtactgacagattacttttaactccatgggttaaattcctgtgggagtcttacaggcagtgtttggaccttcttagaaacaattctagagtagagcgcctgtaccatgatattgcccagcaagctttcaaattctgcctccaatacacgcgtaaggctgaattccgtaaactgtgtgacaatttgagaatgcacttatcgcagattcagcgccaccataaccaaagtacggcaatcaatcttaataatccagagagccagtccatgcatttggaaaccagacttgttcagctggacagtgctatcagcatggaattgtggcaggaagcattcaaagctgtggaagatattcacgggctattctccttgtctaaaaaaccacctaaacctcagttgatggcaaattactataacaaagtctcaactgtgttttggaaatctggaaatgctctttttcatgcatctacactccatcgtctttaccatctctctagagaaatgagaaagaatctcacacaagacgagatgcaaagaatgtctactagagtccttttagccactctttccatccctattactcctgagcgtacggatattgctcgacttctggatatggatggcattatagttgaaaaacagcgtcgccttgcaacactactaggtcttcaagccccaccgacacgaattggccttattaatgatatggtcagatttaatgtactacaatatgttgtcccagaagtgaaagacctttacaattggcttgaagtagaatttaacccattaaaactctgtgagcgagtcacaaaggttctaaattgggttagggaacaacctgaaaaggaaccggaattgcagcagtatgtgccacaactgcaaaacaacaccatcctccgccttctgcagcaggtgtcacagatttatcagagcattgagttttctcgtttgacttctttggttccttttgttgatgctttccaactggaacgggccatagtagatgcagccaggcattgcgacttgcaggttcgtattgatcacacttctcggaccctgagttttggatctgatttgaattatgctactcgagaagatgctccgattggtcctcatttgcaaagcatgccttcagagcagataagaaaccagctgacagccatgtcctcagtacttgcaaaagcacttgaagtcattaaaccagctcatatactgcaagagaaagaagaacagcatcagttggctgtcactgcataccttaaaaattcacgaaaagagcaccagcggatcctggctcgccgccagacaattgaggagagaaaagagcgccttgagagtctgaatattcagcgtgagaaagaagaattggaacagagggaagctgaactccagaaagtgcggaaggctgaggaagagaggctgcgccaggaagcaaaggagagagagaaggagcgtatcttacaggaacatgaacaaatcaaaaagaaaactgtccgagagcgtttggagcagatcaagaaaacagaactgggtgccaaagcattcaaagatattgatattgaagaccttgaggaattggatccagattttatcatggctaaacaggttgaacaactggagaaagaaaagaaagaacttcaagaacgcctaaagaatcaagaaaagaagattgactattttgaaagagccaaacgtttggaagaaattcctttgataaagagcgcttacgaggaacagagaattaaagacatggatctgtgggagcaacaagaggaagaaagaattactacaatgcagctagaacgtgaaaaggctcttgaacataagaatcgaatgtcacgaatgcttgaagacagagatttattcgtaatgcgactcaaagctgcacggcagtctgtttatgaggaaaaacttaaacagtttgaagagcgattagcagaagaaaggcataatcgattggaagaacggaaaaggcagcgtaaagaagaacgcaggataacatactatagagaaaaagaagaggaggagcagagaagggcagaagaacaaatgctaaaagagcgggaagagagagagcgcgccgaacgagcaaaacgcgaggaagagctacgagagtatcaggagcgggtgaagaaattagaagaagtggaaaggaaaaaacgccaaagggagttggaaattgaagaacgagaacggcgtagagaggaagagagaagacttggcgatagttccctttctagaaaggactctcgttggggagatagagattcagaaggcacctggagaaaaggacctgaagcagattctgagtggagaagaggcccgccagagaaggagtggagacgtggagaagggcgagatgaggacaggtctcatagaagagatgaagagcggccccggcgtctgggggatgatgaagatagagagccctctcttagaccagacgatgatcgggttccccggcgtggcatggatgatgacagaggccctagacgtggtcctgaggaagataggttctctcgtcgtggggcagacgatgaccggccttcctggcgtaacacagatgatgacaggcctcccagacgaattgccgatgaagacaggggaaactggcgtcatgcggatgatgacagaccacctagacgaggactggatgaggacagaggaagctggcgaacagctgatgaggacagaggaccaagacgtgggatggatgatgaccgggggccgaggcgaggaggcgctgatgatgagcgatcatcctggcgtaatgctgatgatgaccggggtcccaggcgagggttggatgatgatcggggtcccaggcgaggcatggatgatgaccggggtcccaggcgaggcatggatgatgaccggggtcccaggcgaggcatggatgatgaccggggtcccaggcgagggttggatgatgatcgaggaccttggaggaacgccgatgatgacagaattcccaggcgtggtgcagaggatgacaggggcccttggagaaacatggatgatgatcgcctttcaagacgtgctgatgatgatcggtttcccagacggggtgatgactcaagacctggtccttggagaccattagtcaagccaggtggatggagagagaaagaaaaagccagagaggagagctggggtccacctcgagaatcaaggccatcagaagaacgtgaatgggacagagaaaaagaaagggacagagataatcaagatcgggaggagaatgacaaggaccctgagagagaaagggacagagagagagatgtggatcgagaggatcgcttcagaagacctagggatgaaggtggctggagaagaggaccagctgaggaatcttcaagctggagagactcaagtcgccgggacgatagggatagggatgaccgtcgccgtgagagggatgaccggcgtgatctaagagaaagacgagatctaagagacgacagggaccgaagaggacctccactcagatcagaacgtgaagaagtaagttcttggagacgtgctgatgacaggaaagatgaccgggtggaagagcgggaccctcctcgtcgagttcctcccccagctctttcaagagaccgagaaagagaccgagaccgagaaagagaaggtgaaaaagagaaggcctcatggagagctgagaaagatagggaatctctccgtcgtactaaaaatgagactgatgaagatggatggaccacagtacgacgttaagtctcaagataatggatttaaactggtgtcttaaataggtttgatcacattcaaggattattatacttgtgcttcaaccaatctaaattggattctttaatgttgtttcaccataacacaaaaagcatgaacttgtattaatcctatataatagattgatcatgcaccatatccacaggaggttggaaaaaccatgccattttctggaatttaagggtgttgcattatttcatcaatcatttgttgacaaaaaagaaaaactaaaaaataaatttaaaatgtgaaccttcaggtattgagtaacacctttatcttggtatagaactgataccattttttgattttgaaatatctgataataatttggaatgaagtaaggttctgttaaaatatatttgaagaccctttaaagcagtgaatctgaaacaattttcacacccttaagtggttgatacgtacctattttaggtattttgaggtatttaccataaactaaatttagaaattttttagattcacttgaagtaaacattacaaacattggatacggtggggttttctttagattttacttgagagaaggtgagtacaaagcaatttgcagttgttgtaatgacaagattactgcgcaagtgtgaatccaaacagtatagcttttaaattttaaagcatttggtaaattatcgctgagtttttttctgttgccaatagcaaactgcttttccattaatggagaattcatgcctttcaagcattttaaatatgacaatatttataaatgtatggtttggaggaatcgtttaaattctctttcctaattttctttcttttgaagatagattctttcaacaagtaatttgtagtaatgactgtgttgacttcaattttggagcgcagtagctatgttaaagatgaactatttggtctcattgaagccaacacagaacttgctgctgtgttttttcttcagtgataaataaaatacttacagaaa

SEQ ID NO: 600 - DNA, 2996 bp, human
gggagagtcggaagcgcggcggccgcggagccctgcgagtaggcagcgttgggcccatgcaggacgcggagaacgtggcggtgcccgaggcggccgaggagcgcgccgagcccggccagcagcagccggccgccgagccgccgccagccgaggggctgctgcggcccgcggggcccggcgctccggaggccgcggggaccgaggcctccagtgaggaggtggggatcgcggaggccgggccggagtccgaggtgaggaccgagccggcggccgaggcagaggcggcctccggcccgtccgagtcgccctcgccgccggccgccgaggagctgcccgggtcgcatgctgagccccctgtcccggcacagggcgaggccccaggagagcaggctcgggacgagcgctccgacagccgggcccaggcggtgtccgaggacgcgggaggaaacgagggcagagcggccgaggccgaaccccgggcgctggagaacggcgacgcggacgagccctccttcagcgaccccgaggacttcgtggacgacgtgagcgaggaagaattactgggagatgtactcaaagatcggccccaggaagcagatggaatcgattcggtgattgtagtggacaatgtccctcaggtgggacccgaccgacttgagaaactcaaaaatgtcatccacaagatcttttccaagtttgggaaaatcacaaatgatttttatcctgaagaggatgggaagacaaaagggtatattttcctggagtacgcgtcccctgcccacgctgtggatgctgtgaagaacgccgacggctacaagcttgacaagcagcacacattccgggtcaacctctttacggattttgacaagtatatgacgatcagtgacgagtgggatattccagagaaacagcctttcaaagacctggggaacttacgttactggcttgaagaggcagaatgcagagatcagtacagtgtgatttttgagagtggagaccgcacttccatattctggaatgacgtaaaagaccctgtctcaattgaagaaagagcgagatggacagagacgtatgtgcgttggtctcctaagggcacctacctggctacctttcatcaaagaggcattgctctatgggggggagagaaattcaagcaaattcagagattcagccaccaaggggttcagcttattgacttctcaccttgtgaaaggtacctggtgacctttagccccctgatggacacgcaggatgaccctcaggccataatcatctgggacatccttacggggcacaagaagaggggttttcactgtgagagctcagcccattggcctatttttaagtggagccatgatggcaaattctttgccagaatgaccctggatacgcttagcatctatgaaactccttctatgggtcttttggacaagaagagtttgaagatctctgggataaaagacttttcttggtctcctggtggtaacataatcgccttctgggtgcctgaagacaaagatattccagccagggtaaccctgatgcagctccctaccaggcaagagatccgagtgaggaacctgttcaatgtggtggactgcaagctccattggcagaagaacggagactacttgtgtgtgaaagtagataggactccgaaaggcacccagggtgttgtcacaaattttgaaattttccgaatgagggagaaacaggtacctgtggatgtggtcgagatgaaagaaaccatcatagcctttgcctgggaaccaaatggaagtaagtttgctgtgctgcacggagaggctccgcggatatctgtgtctttctaccacgtcaaaaacaacgggaagattgaactcatcaagatgttcgacaagcagcaggcgaacaccatcttctggagcccccaaggacagttcgtggtgttggcgggcctgaggagtatgaacggtgccttagcgtttgtggacacttcggactgcacggtcatgaacatcgcagagcactacatggcttccgacgtcgaatgggatcctactgggcgctacgtcgtcacctctgtgtcctggtggagccataaggtggacaacgcgtactggctgtggactttccagggacgcctcctgcagaagaacaacaaggaccgcttctgccagctgctgtggcggccccggcctcccacactcctgagccaggaacagatcaagcaaattaaaaaggatctgaagaaatactctaagatctttgaacagaaggatcgtttgagtcagtccaaagcctcaaaggaattggtggagagaaggcgcaccatgatggaagatttccggaagtaccggaaaatggcccaggagctctatatggagcagaaaaacgagcgcctggagttgcgaggaggggtggacactgacgagctggacagcaacgtggacgactgggaagaggagaccattgagttcttcgtcactgaagaaatcattcccctcgggaatcaggagtgacctggagcactgtgcgcagccgtgtgtgctgtggagccgaggccgtcctgcaggaagccgcgtgactcccgcctcctccctgtgctctctggctctggactgtgactgcgcctggattctgccattgcgacacatttttgtgcctttcagcccctggtgtctgcagtgggggatttaaggcacccgcttccacttctttcttgtttggagttttctgttggaaccgccggcgttggctccgaagacttagcgacgccactggcggcaccttctcctgcgcccagtgatgtttccacggtgcctgtacacagccgagcagcatttccgttgaaggacttgcatccccattgcgggcagtgctggacgtgtcccggagacccaccgggagggcgccgccatgccttgtacccccaccgtgcaggttgtggccggttttctccgcaggttgaacatggaaataaaagcaaacttgtatgaaaaaaaaaaaaaaaaaaa

SEQ ID NO: 601 - DNA, 1280 bp, human
gaaagatggcgtcccgcaaggaaggtaccggctctactgccacctcttccagctccaccgccggcgcagcagggaaaggcaaaggcaaaggcggctcgggagattcagccgtgaagcaagtgcagatagatggccttgtggtattaaagataatcaaacattatcaagaagaaggacaaggaactgaagttgttcaaggagtgcttttgggtctggttgtagaagatcggcttgaaattaccaactgctttcctttccctcagcacacagaggatgatgctgactttgatgaagtccaatatcagatggaaatgatgcggagccttcgccatgtaaacattgatcatcttcacgtgggctggtatcagtccacatactatggctcattcgttacccgggcactcctggactctcagtttagttaccagcatgccattgaagaatctgtcgttctcatttatgatcccataaaaactgcccaaggatctctctcactaaaggcatacagactgactcctaaactgatggaagtttgtaaagaaaaggatttttcccctgaagcattgaaaaaagcaaatatcacctttgagtacatgtttgaagaagtgccgattgtaattaaaaattcacatctgatcaatgtcctaatgtgggaacttgaaaagaagtcagctgttgcagataaacatgaattgctcagccttgccagcagcaatcatttggggaagaatctacagttgctgatggacagagtggatgaaatgagccaagatatagttaaatacaacacatacatgaggaatactagtaaacaacagcagcagaaacatcagtatcagcagcgtcgccagcaggagaatatgcagcgccagagccgaggagaacccccgctccctgaggaggacctgtccaaactcttcaaaccaccacagccgcctgccaggatggactcgctgctcattgcaggccagataaacacttactgccagaacatcaaggagttcactgcccaaaacttaggcaagctcttcatggcccaggctcttcaagaatacaacaactaagaaaaggaagtttccagaaaagaagttaacatgaactcttgaagtcacaccagggcaactcttggaagaaatatatttgcatattgaaaagcacagaggatttctttagtgtcattgccgattttggctataacagtgtctttctagccataataaaataaaaaaaaaaaaaaaaaaaaaaaaaaaaaaaaaaaaaaaaaaaaaaaaaaaaaaaaa

SEQ ID NO: 602 - DNA, 1976 bp, human
gaatggacgagagaggcggccgtccattagttagcggctccggagcaacgcagccgttgtccttgaggccgacgggcctgacgcgggcgggttgaacgcgctggtgaggcggtcacccgggctacggcggccggcagggggcagtggcggccgttgtctagggcccggaggtggggccgcgcgcctcgggcgctacgaacccggcaggcccacgcttggctgcggccgggtgcgggctgaggccatgggcgaccgcggcagctcccggcgccggaggacagggtcgcggccctcgagccacggcggcggcgggcctgcggcggcggaagaagaggtgcgggacgccgctgcgggccccgacgtgggagccgcgggggacgcgccagccccggcccccaacaaggacggagacgccggcgtgggcagcggccactgggagctgaggtgccatcgcctgcaggattctttattcagctctgacagtggcttcagcaactaccgtggcatcctgaactggtgtgtggtgatgctgatcttgagcaatgcccggttatttctggagaacctcatcaagtatggcatcctggtggaccccatccaggtggtttctctgttcctgaaggatccccatagctggcccgccccatgcctggttattgcggccaatgtctttgctgtggctgcattccaggttgagaagcgcctggcggtgggtgccctgacggagcaggcgggactgctgctgcacgtagccaacctggccaccattctgtgtttcccagcggctgtggtcttactggttgagtctatcactccagtgggctccctgctggcgctgatggcgcacaccatcctcttcctcaagctcttctcctaccgcgacgtcaactcatggtgccgcagggccagggccaaggctgcctctgcagggaagaaggccagcagtgctgctgccccgcacaccgtgagctacccggacaatctgacctaccgcgatctctactacttcctcttcgcccccaccttgtgctacgagctcaactttccccgctctccccgcatccggaagcgctttctgctgcgacggatccttgagatgctgttcttcacccagctccaggtggggctgatccagcagtggatggtccccaccatccagaactccatgaagcccttcaaggacatggactactcacgcatcatcgagcgcctcctgaagctggcggtccccaatcacctcatctggctcatcttcttctactggctcttccactcctgcctgaatgccgtggctgagctcatgcagtttggagaccgggagttctaccgggactggtggaactccgagtctgtcacctacttctggcagaactggaacatccctgtgcacaagtggtgcatcagacacttctacaagcccatgcttcgacggggcagcagcaagtggatggccaggacaggggtgttcctggcctcggctttcttccacgagtacctggtgagcgtccctctgcgaatgttccgcctctgggctttcacgggcatgatggctcagatcccactggcctggttcgtgggccgctttttccagggcaactatggcaacgcagctgtgtggctgtcgctcatcatcggacagccaatagccgtcctcatgtacgtccacgactactacgtgctcaactatgaggccccagcggcagaggcctgagctgcacctgagggcctggcttctcactgccacctcaaacccgctgccagagcccacctctcctcctaggcctcgagtgctggggatgggcctggctgcacagcatcctcctctggtcccagggaggcctctctgccctatggggctctgtcctgcacccctcagggatggcgacagcaggccagacacagtctgatgccagctgggagtcttgctgaccctgccccgggtccgagggtgtcaataaagtgctgtccagtgggag

SEQ ID NO: 603 - DNA, 2168 bp, human
ggctacgcagcttgctcctggcacgggcaccttgaatctcctcctcacacagatggagaccatgcttgatttcctgaacttgtagtaagaagaaggaaaacacagcacgctggagccaacagagttaagaggaagatttatgagtcatggaaccctccatcagatttggaagaaagtagaatgagcgcagaggtgacagacagccactgaggcccatggacaatctccacctcacgcttctctatcaaacttgaagatttattagtaatatgctgcctttggaagatgaaaacaaactagtgccaaggaggcgtattcttcaatatttggaatagacgtgttctcaagacaatggcttcaaaggtctcctgtttgtatgttttgacagttgtgtgctgggccagcgctctctggtacttgagtataactcgccctacttcttcttacactggctccaaaccattcagccacctaacagttgccaggaaaaacttcacctttggcaacataagaactcgacctatcaacccacattcttttgaatttcttatcaacgagcccaataaatgtgagaaaaacattccttttcttgttatcctcatcagcaccactcacaaggaatttgatgcccgtcaggcaatcagagagacgtggggggatgagaacaactttaaggggatcaagatagccaccctgttcctcctgggcaagaatgctgatcctgttctcaatcagatggtggagcaagagagccaaatcttccatgatatcatcgtggaggactttattgactcctaccataaccttaccctcaaaacattaatggggatgagatgggtggccactttttgttcaaaagccaagtatgtcatgaaaacagacagcgacatttttgtaaacatggacaatcttatttataaattactgaaaccctccaccaagccacgaagaaggtattttactggctatgtcattaatggaggaccgattcgggatgtccgcagtaaatggtatatgcccagggatttgtacccagacagtaactacccacctttctgttcggggactggctacatcttttcagccgatgtagctgaactcatttacaagacctcactccacacaaggctgcttcaccttgaagacgtatatgtgggactgtgtcttcgaaagctgggcatacatcctttccagaacagtggcttcaatcactggaaaatggcctacagtttgtgtaggtatcgccgagttatcactgtgcatcagatctctccagaagaaatgcacagaatctggaatgacatgtcaagcaagaaacatctcagatgttaggatttttaccaatgtaaatatgtttcttttctttttttaagaaatgggacctaaggtgttggtattttccaggtgtcgggggaaatgaactggtgaaggggttttgtaaagtttttgcttcctgctataagttcttttcttggattaccaatttatgaatgttagactctggtcatagaaacaataaatgagttagaagggccagatttcattctcagtcccagagcattgctatttatctcaaaaagtgacttccaaacaactcttaggattgacgtaccgtgcatctgagataaaaatttggttctgggaaactgaaactcacagtaatgtgtcatatcatccctgcaaaaattaatacacaaatagaaaccattttcaaaagcaattcagaaaggatgcacagtcaggaagacacactggatgtgattattaatatcgtgtgtgttgttacattatatttttacatatattcccatgtaatgtgtacagtctttgcagttccaccaagaaatgaacttggtacctgcagagtggctgcagttaaatagatgggagtttaaatttgagaatcaaacattctatgtgtttggaagacaactctgcttgctcatccaaggattaaatctggtcagcaggtggaatgtgtataaaatgctacttaacaaagtaaacaaaagattttttttttctttttttttctttcttttttgttttgctctttcagaacaaacattaaatggtgcctccaaggaaactttgccaaatataatctcacctgcttccttccagacagtgtcgctaagtgcatttcacagtttttggatctggcaggc

SEQ ID NO: 604 - DNA, 658 bp, human
gccggacggacgctcgtcttcgcccgccatggccgagagcgactgggacacggtgacggtgctgcgcaagaagggccctacggccgcccaggccaaatccaagcaggctatcttagcggcacagagacgaggagaagatgtggagacttccaagaaatgggctgctggccagaacaaacaacattctattaccaagaacacggccaagctggaccgggagacagaggagctgcaccatgacagggtgaccctggaggtgggcaaggtgatccagcaaggtcggcagagcaaggggcttacgcagaaggacctggccacgaaaatcaatgagaagccacaggtgatcgcggactatgagagcggacgggccatacccaataaccaggtgcttggcaaaatcgagcgggccattggcctcaagctccggggaaaggacattggaaagcccatcgagaaggggcctagggcgaaatgaacacaaagcctcgaaatcagtgcgctccagctgatctcgttccgccggttccccttggccgccagttccgttctcctcacgggccgaacggaacaaggggtccagcttgcgggggaccctccccagcccattcctgctgtcaaacaaacaaaaccttgcaaagcgaaaaaaaaaaaaaaaaaa

SEQ ID NO: 605 - DNA, 2039 bp, human
ggaggactcaggccccgctggccgcgggctcggtacccggtgggtcggtggagcgtctgttgggtccgggccgccggcttcgccctcgccatggcgccctggctgcagctcctgtcgctgctggggctgctcccgggcgcagtggccgcccccgcccagccccgagccgccagctttcaggcctgggggccgccgtccccggagctgctggcgcctacccgcttcgcgctggagatgttcaaccgcggccgggctgcggggacgcgggccgtgctgggccttgtgcgcggccgcgtccgccgggcgggccaagggtcgctgtactccctggaggccaccctggaggagccaccctgcaacgaccccatggtgtgccggctccccgtgtccaagaaaaccctgctctgcagcttccaagtcctggatgagctcggaagacacgtgctgctgcggaaggactgtggcccagtggacaccaaggttccaggtgctggggagcccaagtcagccttcactcagggctcagccatgatttcttctctgtcccaaaaccatccagacaacagaaacgagactttcagctcagtcatttccctgttgaatgaggatcccctgtcccaggacttgcctgtgaagatggcttcaatcttcaagaactttgtcattacctataaccggacatatgagtcaaaggaagaagcccggtggcgcctgtccgtctttgtcaataacatggtgcgagcacagaagatccaggccctggaccgtggcacagctcagtatggagtcaccaagttcagtgatctcacagaggaggagttccgcactatctacctgaatactctcctgagaaaagagcctggcaacaagatgaagcaagccaagtctgtgggtgacctcgccccacctgaatgggactggaggagtaagggggctgtcacaaaagtcaaagaccagggcatgtgtggctcctgctgggccttctcagtcacaggcaatgtggagggccagtggtttctcaaccaggggaccctgctctccctctctgaacaggagctcttggactgtgacaagatggacaaggcctgcatgggcggcttgccctccaatgcctactcggccataaagaatttgggagggctggagacagaggatgactacagctaccagggtcacatgcagtcctgcaacttctcagcagagaaggccaaggtctacatcaatgactccgtggagctgagccagaacgagcagaagctggcagcctggctggccaagagaggcccaatctccgtggccatcaatgcctttggcatgcagttttaccgccacgggatctcccgccctctccggcccctctgcagcccttggctcattgaccatgcggtgttgcttgtgggctacggcaaccgctctgacgttcccttttgggccatcaagaacagctggggcactgactggggtgagaagggttactactacttgcatcgcgggtccggggcctgtggcgtgaacaccatggccagctcggcggtggtggactgaagaggggcccccagctcgggacctggtgctgatcagagtggctgctgccccagcctgacatgtgtccaggcccctccccgggaggtacagctggcagagggaaaggcactgggtacctcagggtgagcagagggcactgggctggggcacagcccctgcttccctgcaccccattcccaccctgaagttctgcacctgcacctttgttgaattgtggtagcttaggaggatgtcggggtgaagggtggtatcttggcagttgaagctggggcaagaactctgggcttgggtaatgagcaggaagaaaattttctgatcttaagcccagctctgttctgcccccgctttcctctgtttgatactataaattttctggttcccttggatttagggatagtgtccctctccatgtccaggaaacttgtaaccacccttttctaacagcaataaagaggtgtccttgtaaaaaaaaaaaaaaaaaaaaaaaaaaaaaa

SEQ ID NO: 606 - DNA, 6376 bp, human
gacagggaaggtacccggctctactgcccgtcccggacgactcatcctggcggactgtgcagtcccaccctgacttcagcctcaatttccaggaaacaggctccttctcttctcccatctgctaccagagccgggagagctgctcggagacgcctccggggtgcgggctggacatgagcagcggctgccggtcctgggactaggccccgccattttggatccgctgacaggtttgccaagatggtggataagaatatttacatcattcaaggggagattaacattgtggttggggccatcaaacgaaatgcccgatggagcacccatacaccactggatgaagaacgggatcctctgctgcatagtttcggtcatctaaaggaggttttaaacagtataacagaactctcagaaattgagcccaatgtattccttcgaccttttctggaagtgattcgctctgaagataccactggccctatcactggactggcactcacctctgtcaacaagttcctgtcctatgcactcatagatcccacccatgagggcacagcagagggcatggagaacatggcagatgctgtcacccatgctcgttttgtgggcacggatcctgccagtgatgaagttgtcctgatgaaaatccttcaggttctacggactctgctgctaaccccagtgggtgcccacctaaccaatgaatctgtgtgtgagattatgcagtcttgcttccggatctgctttgaaatgaggctcagtgagttattgagaaaatccgcagagcacactctcgtagacatggtgcagctgctcttcacaaggttacctcagtttaaagaagaacccaagaactatgtggggaccaacatgaagaagctgaaaatgagagccggaggcatgagtgattcatccaaatggaagaaacagaagagatcccctcggcccccacgccatatgaccaaagtcacaccaggttcagagctgcccactcccaatggaaccaccttatcatctaacctcactggtggcatgcccttcattgatgtgcccactcccatctcctctgcaagttcagaagctgcctcagcagtggtcagtccctctacagacagtggcctggaattctcctcccaaaccacttccaaggaagaccttactgatctagagcaacctggctctccagggtacagcacagctacagagcctggaagcagtgagctaggtgttcccgagcagcctgacctccaggaagggacccatgtggaaaagtcccagtcagcatctgtggagtccatccctgaagtgttagaggagtgcacgtcccctgccgaccactctgactctgcctctgtccatgacatggattacgtcaatccccggggcgtgcgctttacacagtcctcccagaaagaaggcacagctttggtcccctatggtcttccctgcatccgcgagctcttccgcttcctcatctccctcaccaatccacacgaccgccataactcagaggttatgattcacatgggactgcatttgctgacagtggcccttgagtcagcccctgtagcccagtgccagaccctcttgggcctcatcaaggatgagatgtgccgtcacttattccagctactcagcatagagcgactaaacctttatgctgcttccctgcgagtatgcttcctactgtttgagagcatgcgagagcacctcaagttccaaatggagatgtacatcaaaaagcttatggagatcatcactgtggagaaccccaagatgccttatgagatgaaggagatggcactggaggccattgtgcagctctggcgcatccccagctttgtcacagagctctacatcaactatgattgtgactactactgttccaacctctttgaggaactcacaaagctgctgtccaagaatgccttccctgtgtctggtcaactctatacaacacacctactatctcttgatgccctattgacagtgattgacagcaccgaggcccactgccaggctaaagtcctcaacagcctcacccagcaagagaagaaggagacagccagaccaagctgtgagatagtagatggcacccgagaagctagcaatactgagagaactgccagcgatgggaaagctgtaggcatggcctcagacatcccaggcctgcatctgccaggtggagggcggctgccaccagaacatgggaaatcaggatgcagtgatctggaggaagctgttgactctggggctgacaaaaagtttgcccggaagccaccccgattttcctgtctcctgccagatccacgggaactaattgaaattaaaaacaaaaagaagctgctaatcactggcacagagcagttcaatcagaaaccaaagaaggggattcagtttctgcaagagaaaggcctcctcaccatcccaatggacaacacagaggttgctcagtggctccgagagaaccctcggctggacaagaagatgattggagagtttgtgagtgaccgcaaaaacattgacctgttggagagctttgtgagcaccttcagttttcagggtctgcgactggacgaagccctccgcctctacctggaagccttccgtttgcctggggaagcaccagtcatccagaggttgctggaggcattcacagagcgttggatgaattgtaatggctccccatttgccaatagcgatgcctgcttttccctggcctatgctgtcatcatgcttaatactgaccagcacaaccacaatgttcgtaaacagaatgcacccatgaccctggaggagtttcgcaaaaatctgaaaggtgtgaatggaggcaaggactttgagcaagacatcctggaggacatgtaccatgccatcaagaatgaggaaattgtaatgcctgaggagcagacaggcttggttcgggagaactatgtgtggaatgtgctgcttcatcgaggtgccacccctgagggcatattcctgcgtgtgcctactgccagctatgatcttgacctcttcaccatgacctggggccccactattgctgctctctcttatgtctttgacaaaagccttgaggagacaatcatccagaaagccatctcaggcttcaggaagtgcgccatgatctccgcccactatggcctcagcgatgtgtttgacaatctcatcatctctctatgcaaattcacagctctcagcagtgagtctattgagaacctgcccagtgtatttggaagcaaccctaaagcccatattgcagccaagacagtattccatttggcccatcgtcatggtgacatcctgcgggagggctggaagaatatcatggaggccatgctgcagctcttccgagcccaactactgcccaaggctatgatagaggtagaagatttcgtggatcccaatggcaagatctctctacagcgggaagagacaccatcaaaccgaggagagtcaacagtgctgagctttgtgagctggctaacactgagtggtcctgagcagtctagtgttcggggcccatccactgaaaaccaagaggccaagagagtggccttagagtgtataaagcaatgtgacccagaaaaaatgatcacagaaagcaagttcctccagctggagtcactacaggagctcatgaaggctctggtctcagtgacaccagatgaagagacatatgatgaggaagatgctgctttctgcctagagatgctgctaaggattgtgttggagaacagggatcgtgtgggctgtgtgtggcagactgttcgagaccatctataccacctctgtgttcaggcacaagatttctgcttccttgtggagcgggcagtggtggggttgctacgcctggccattcggcttctccggagagaagagatcagtgctcaggtgctgctctccctgcgcattttgctactgatgaagcccagtgtgctatcccgagtcagccaccaggttgcgtatgggctccatgaactcctgaagaccaatgcagccaacatccactcaggtgatgactgggccacactcttcacactgctggagtgcatcggctcaggtgtgaagcctccagctgctctgcaggccacagccagggcagatgcacctgatgccggggcccagtcagatagtgagctcccatcctaccatcagaatgacgtgagcctggatcgagggtacacttccgactcagaggtctacactgaccatggcaggccgggcaagatacaccgatcagccacagatgccgatgtggtcaacagtggttggttagtggttgggaaggatgacgttgataactccaagccagggcccagccgcccaggcccttcacccctgatcaatcaatacagcctaacagtgggactggatttggggccacacgacactaagtctctgcttaagtgtgtggaatcgctgtccttcatcgtgcgtgatgctgcccacatcacacctgacaactttgagctctgcgtcaagactctccggatctttgtggaggccagtctgaatggcggatgcaagtcccaggagaaacgtggcaagagtcacaaatatgacagcaaagggaaccgcttcaagaagaaatccaaagagggatcaatgcttcgccggcctcgaacctccagccaacatgcctctcggggcgggcagagtgatgatgatgaggacgaaggcgtgcctgccagctaccatacggtgtctttacaggtcagtcaggacttgctagacctgatgcacaccctgcacacgcgggcagcctctatctacagctcatgggcggaggagcaacgccacctggagacaggtggccagaagattgaagctgattctcgcaccctctgggcccactgctggtgccctttactgcagggtattgcctgcctgtgctgcgatgcccggcgccaggtacggatgcaggcactgacctatctgcagcgagcactacttgtacatgatctgcaaaagctagatgccctggaatgggagtcctgttttaacaaggtgctgtttcctctacttaccaagctcttggagaacatcagccctgcagatgtgggtgggatggaggagacccggatgagggcttccacattgctctctaaggtcttcctgcagcacctgtctccactgctgtcactctctacctttgcggccctctggctcaccatcttggacttcatggacaagtacatgcacgcaggctccagcgacttactgtcagaggcgatccctgagtctctgaagaacatgcttctggtgatggacacagcggagattttccacagtgcagatgcacggggaggcggcccctcggccctctgggagatcacctgggaacgcattgactgttttctccctcacctacgagatgaactcttcaagcagaccgtcatccaggaccccatgcccatggagcctcaaggccaaaagcctctcgcctcagcccacctgacttccgctgctggcgacactaggacacctggccatccaccgcccccagagattccatctgagctgggggcctgtgactttgagaagcccgagagcccccgagccgccagcagcagctccccaggatcaccagtggcctcaagccccagcaggctgagccccacccccgacgggcctccacccttggctcagcccccactgatcctgcagcccttggcctccccactgcaggtgggcgtgccacctatgactctgcccatcatcctcaaccctgcgctcatcgaggccacctcaccagtgcccctcctggccacaccccgccccacagatcccatacccacctctgaggtcaactaaggcaggtcactcagagatcaggaccagtgcttcccaccaggctttccttgaccccacttctggctgtcctgcgggccacaagctcttcaggccaagtcagagctgctgttgctgccacttggatggggacctgaaaaagagaatgttgatagccccagctaagacccccaatcagctgtgggacctttttcctcctctgcgctccattcctgggggttcagcctgagagtgaactcagctgtcatctgcagcctctgcctccagcccggcagctctggggaggcatccgtgtgccggccctgcagtgcctgcccacggtcaggcattgaaaactaagcccaaccactctgcactttgtttcccactcccattagccctgggccacctcctccagttcttcctcttttactaattagttggtcagtttggagagttgactggcaccatggagggtaggcaggtgggggctgggtgggggactgcccacaggagcatgtacatatggaaaaacagaacaacagtggactttttatgatataataaatgtcttagtacc

SEQ ID NO: 607 - DNA, 2393 bp, human
agcggcagggaggggctcttcacccagtccggcagttgaagctcggcgctcgggttacccctgcagcgacgccccctggtcccacagataccactgctgctcccgccctttcgctcctcggccgcgcaatgggcacccgcgacgacgagtacgactacctctttaaagttgtccttattggagattctggtgttggaaagagtaatctcctgtctcgatttactcgaaatgagtttaatctggaaagcaagagcaccattggagtagagtttgcaacaagaagcatccaggttgatggaaaaacaataaaggcacagatatgggacacagcagggcaagagcgatatcgagctataacatcagcatattatcgtggagctgtaggtgccttattggtttatgacattgctaaacatctcacatatgaaaatgtagagcgatggctgaaagaactgagagatcatgctgatagtaacattgttatcatgcttgtgggcaataagagtgatctacgtcatctcagggcagttcctacagatgaagcaagagcttttgcagaaaagaatggtttgtcattcattgaaacttcggccctagactctacaaatgtagaagctgcttttcagacaattttaacagagatttaccgcattgtttctcagaagcaaatgtcagacagacgcgaaaatgacatgtctccaagcaacaatgtggttcctattcatgttccaccaaccactgaaaacaagccaaaggtgcagtgctgtcagaacatctaaggcatttctcttctcccctagaaggctgtgtatagtccatttcccaggtctgagatttaaatatatttgtaattcttgtgtcacttttgtgttttattacttcatacttatgaatttttccatgtcctaagtcttttgattttagctttataaaatcatccacttgtcccgaatgactgcagctttttttcatgctatggcttcactagccttagtttaataaactgaatgtttggattcctcagttattgtttacttttcatcatggaagcctgtcactgtatgtaggacataatagaacttgatcacttgaagctcagacctattggtcttgatcaaatcaaactaagaagaccttagaaataagctaccattttgccacagagcagcttataggtaatacactcttctctcagtgcagtgtacatttccacaaatctaagaattgccctataaacatagcaggattttgagagcttgaaaattttccattattctggacatgaatttctaaaatgccttaataggtttatgtagttgagtaaattttgttttttaatttttgtaagcatcaaagttgattagagaggggggcactttttctggagaattctcttagtaaacacaaaagattgttacggtttcattagtagtatggttgtggggccataagttaaacagtgctgcctggtaggctgggaactgaagagacttgtggtattccatctcgggtgcctctgttggcaatgatcaggcagcccaaaagatttaaatgatctataataatttccaagcggtagattatgtggcattttattgctcaggcaataattggtttaatgctggtagtgtcaaattttgaagtgttaattttgtcttagaaccttccagtaagtgaaatacaacctagttttatcaccatatccaccagcaggcatggataattattttaacaatgctaatatttgagttttgcagtatattatagaatatagtccagttaaatctttggtttcagtatgtctgaagagtacagtgagaggttaatttctgctcaagtggtaccacttaaaggcatgtattcttttagtatgtaaaatgaaatagtaccttgagtttaaatagaatgcatttaggcattgtagagatctgaaatagttttcttccactacattgttgaaatcaatgaagcaattagtttctcattcagaaatgtgcacactaatatttagttttgctttctcgtggataatattaagcacttactctgcagtttcctggaagttgtgtcaactgcagtgatactattcaggatggtgggaaatccccaaaaatatgtatgtgtgggcttgcttagattactatatttcatagttaatcttttgtctcttgcggtgctcatgatgtgtggggcacacggaaggcattgctgtagtcagtcattttggttttcttctatagccattttattattttagtgtattagttatgaagataatattatctatttgtaaattgctactttgtattttatgcatgctctgtaatttgatttttttttagttattgatttggattatattcacattctaataaacagttatagggggatta

SEQ ID NO: 608 - DNA, 1195 bp, human
cacgaggcggattcttggcgccggagaagaggcagggtcaccctctctccacgtcagagacctgactgtggagatggcggctcagaagataaacgaggggctggaacacctcgccaaagcagagaaatacctgaaaactggttttttaaaatggaagccagattatgacagtgccgcttctgaatatggaaaagcagctgttgcttttaaaaatgccaaacagtttgagcaagcaaaagatgcctgcctgagggaagctgttgcccatgaaaataatagggctctttttcatgctgccaaagcttatgagcaagctggaatgatgttgaaggagatgcagaaactaccagaggccgttcagctaattgagaaggccagcatgatgtatctagaaaacggcaccccagacacagcagccatggctttggagcgagctggaaagcttatagaaaatgttgatccagagaaggctgtacagttatatcaacagacagctaatgtgtttgaaaatgaagaacgcttacgacaggcagttgaattactaggaaaagcctccagactactagtacgaggacgtaggtttgatgaggcggcactctctattcagaaagaaaaaaatatttataaggaaattgagaattatccaacttgttataagaaaacaattgctcaagtcttagttcatctacacagaaatgactatgtagctgcagaaagatgtgtccgggagagctatagcatccctgggttcaatggcagtgaagactgtgctgccctggaacagcttcttgaaggttatgaccagcaagaccaagatcaggtgtcagatgtctgcaactcaccgcttttcaagtacatggacaatgattatgctaagctgggcctgagtttggtggttccaggagggggaatcaagaagaaatcacctgcaacaccacaggccaagcctgatggtgtcactgccacggctgctgatgaagaggaagatgaatactcaggaggactatgctagtattttgcttgctgaaaagaaaagggaaacaaaggtaaaatcctgacatgccatttcaaggacttgggaatagattagggatatccgtacttcattacagtcatgattttggatcctaataaagactagtttttagttaccatcttcccaaatcaaaaaaaaaaaaaaaaaaaaaaaaaaaaa

SEQ ID NO: 609 - DNA, 3497 bp, human
cggacgcggccgccgccgtcgccgccatctgtcacctccactccggcatcagcagccagtcgcccgtgtcccgcctgtctcctcggcggagcctgctgcccgtcctgccacctctctgctctgttcttgtctctgccttcattcccgaatggatctggtaggagtggcatcgcctgagcccgggacggcagcggcctggggacccagcaagtgtccatgggctattcctcaaaatacaatatcttgttctttggctgatgtaatgagtgaacagctggccaaagaattgcagttagaagaagaagctgccgtttttcctgaagttgctgttgctgaaggaccatttattactggagaaaacattgatacttccagtgaccttatgctggctcagatgctacagatggaatatgacagagaatatgatgcacagcttaggcgtgaagaaaaaaaattcaatggagatagcaaagtttccatttcctttgaaaattatcgaaaagtgcatccttatgaagacagcgatagctctgaagatgaggttgactggcaggatactcgtgatgatccctacagaccagcaaaaccggttcccactcctaaaaagggctttattggaaaaggaaaagatatcaccaccaaacatgatgaagtagtatgtgggagaaagaacacagcaagaatggaaaattttgcacctgagtttcaggtaggagatggaattggaatggatttaaaactatcaaaccatgttttcaatgctttaaaacaacatgcctactcagaagaacgtcgaagtgcccgcctacatgagaaaaaggagcattctacagcagaaaaagcagttgatcctaagacacgtttacttatgtataaaatggtcaactctggaatgttggagacaatcactggctgtattagtacaggaaaggagtctgttgtctttcatgcatatggagggagcatggaggatgaaaaggaagatagtaaagttatacctacagaatgtgccatcaaggtatttaaaacaacccttaatgaatttaagaatcgtgacaaatatattaaagatgatttcaggtttaaagatcgcttcagtaaactaaatccacgtaagatcatccgcatgtgggcagaaaaagaaatgcacaatctcgcaagaatgcagagagctggaattccttgtccaacagttgtactactgaagaaacacattttagttatgtcttttattggccatgatcaagttccagcccctaaattaaaagaagtaaagctcaatagtgaagaaatgaaagaagcctactatcaaactcttcatttgatgcggcagttatatcatgaatgtacgcttgtccatgctgacctcagtgagtataacatgctgtggcatgctggaaaggtctggttgatcgatgtcagtcagtcagtagaacctacccaccctcacggcctggagttcttgttccgggactgcaggaatgtctcgcagtttttccagaaaggaggagtcaaggaagcccttagtgaacgagaactcttcaatgctgtttcaggcttaaacatcacagcagataatgaagctgattttttagctgagatagaagctttggagaaaatgaatgaagatcacgttcagaagaatggaaggaaagctgcttcatttttgaaagatgatggagacccaccactactatatgatgaatagcactaatacccactgcttcagtgttaacacagcagtgattgtcagctgccaatagcaaatgaagttatgggtgacttgaaataccaaaacctgaggagtgggcaatggtgcttctgtgcttttcccccttgtaacccatgtgccagatgtgtggaatttttagctcagcattgagagaataaaatgtcactacctctcatcttatgaacaggataatataattctttaacagctataggttatctggctgaagtagacctaattttatgtgacttgtggtgtaaaatgtcttgatgataatttttaaaacttgggtaacacttccaaatatgggaggaaaggacagatgtgtttacaagggaggattttacaacatacttgctttattcacctccctgttttgtgttgcgtctttccttgaatattttattggcccagagttagcctttctcaattatgtttccagactgtggccgtgattctaaaggaaaatgtgtgctctttagtgggtagaacaaatggaaatttggtttcagaatggctgacagaaatcgacataagtcatgtaatttttgttgatatatcatgaaaatgaacagaattctttttccatacttatatctaagaaaaggcatcataggtttctgaaagagataactatataacagctttttaactatccagtcaactttcagcttttctacatttaggtaaaatggttaggatataactcatggtgtggctaatctacatttatcaataaaatgtaaattatctgaaaggacagaatataagatttaaccatgtttgacgtattttaatttagttaatgaagcaaaattcagtttatatttcactagaactgtgtacttgattgattttcagagaaatatcacaaattagaaatattaaatctaaggatgaaaggtatatataaaacaatttgggggccaggcacgatggctcaaacctgtaatcccagcactttgggagaccaaggcgggtggatcacttgaggtcaggagttcaagaccagcctgggcaacatggcgaaaccctgtctctactaaaaatacaaaaattagccgggtgtggtggcacttctctgtaatctcagcttctcaggaggctgagacaggagaatcgcttgaacccgggaggcagaggttgcagtgagctgagatcatgccactgcactccggcctaggtgacagagggaaactccatctccaggaaaaaaaaaaaaaaacccaatttggataccaaattaatcaactaatttgagctatctggccttactcttagtagtttttagtacgtgctggacaccacttttaaaaagcaatcactgtgctagaaaagtatattggctttgttaggattaaagttcattaacttcaatgtaatcatgcctcctattactgaagtcagattggaaccactaaagatccaaactttctgtctggtaatagaaagtaaaaatctagacatcatttacatttgagaagctgtttttaacattattttaaaatgccaaatatgttctttctagaaaaatatttatttttgtttttgttggatagcttttaattacatttcagagaggtgtaattttgggtagatgctcattacatttttgaaaggtttatgattccaaaataaagatttatatgactggtgatactggctttacagaaatttcagagaactaatttttaaaatctttagcatttaaaactttttttgttttgttttctgacatattctgacaaagagcagcaaaccactg

SEQ ID NO: 610 - DNA, 1610 bp, human
gcctgggctgcggctgtcatggacgcctgggtccgcttcagtgctcagagccaagcccgggagcggctgtgtagggccgcccagtatgcttgctctcttcttggccatgcgctgcagaggcatggagccagtcctgagttacagaaacagattcgacaactggagagccacctgagccttggaagaaagcttctacgcctgggtaactcagcagatgcccttgagtcagccaaaagagctgttcacctatcagatgttgtcctgagattctgcatcactgttagtcacctcaatcgagccttgtacttcgcctgtgacaatgtcctgtgggctggaaagtctggactggctccccgtgtggatcaggagaagtgggcccagcgttcattcaggtactatttgttttccctcatcatgaatttgagccgtgatgcttatgagattcgcctactgatggagcaagagtcttctgcttgtagccggcgactgaaaggttctggaggaggagtcccaggaggaagtgaaactgggggacttgggggaccagggactccaggaggaggtctgccccaactggctctgaaacttcggctgcaagtcctgctcctggctcgagtccttagaggtcatcccccacttctgctagacgtggtcagaaatgcctgtgatctcttcattcctctggacaaactaggcctctggcgctgtggccctgggattgtggggctttgtggcctcgtgtcctccatcctgtctattctcaccctaatctatccctggctacgactcaagccctgaccttccggtacaggataaggaggggacctgaattggtgagatggaatcttagatcgtcccccatgtgccagcctcattcgaattctactctttggttaaagttagaaattcagagatttaggggtggaggaagagctttggggaagatgaggtaaggaaagatgactcgtgaagttaataggatgtctctaatttctagatgtgcctgagcttctgttcttttcctctttctttgtgtctctcttgaatatatttactttgtgtctcttaactctgtttaaggttctgtgtctatgcatctctctctttcttttttcaaccttctcattctcctatccagggatttaatcagcagaattactttttgataggggaggtataaggtttggcctgtaaggttctaactgccttcttttttctcacagaggtggcttatggcagatttttcctccttcaaactccaaacataatttttaagactatgtgccagtggactcttcccttatatctctgcaccacaagttgttggatgtttcctcttcctcccttatgtctacctcaccaacctcgctcatcatttggcccttatccttccttgtacacctaccttcagatttctgcttacactttgatttcagagctttattccccagtctgttcttactcctttgtcgcttatccagaatgatgctatgtgtagcatcttgctgtaaatcctgtacaatgattctgtgtaaatagctgtggcctatgccaataatgaagagcaagcctttcaggtaagcaaattaaagttcagtttgctcatcgac

SEQ ID NO: 611 - DNA, 2339 bp, human
ggcgtcccccgtagcagcgcaggccgggaagcttctgcgagccctagcgctgcggccccgcttcctggcggccgggtcccaggcagtttaattaacctccagaagatggctgaacctgcaggaataccagagcaagaaactgatgtctgacaacggagtgagagttcaaagattctttgtagcagacactgcaaatgaagctctcgaggctgctaagagactaaatgcaaaagaaattgttttaaaagcccagatcttagctggaggaagaggaaaaggtgtcttcaatagtggtttgaaaggaggtgttcatttaacaaaagaccctaatgttgtgggacagctggctaaacagatgattgggtacaatctagcgacaaaacaaactccaaaagaaggtgtgaaagttaacaaggtgatggttgctgaagccttggatatttccagagaaacctacctggcaattctgatggaccggtcctgcaatggccccgtgctggtgggcagcccccaggggggcgtcgacattgaagaggtggctgcttcaaacccggagctcatttttaaggagcaaattgacatttttgaaggaataaaggacagccaagctcagcggatggccgaaaatctaggcttcgttgggcctttgaaaagccaggctgcagatcaaattacgaagctgtataatctcttcctgaaaattgatgctactcaggtggaagtgaatccctttggtgaaactccagaaggacaagttgtctgttttgatgccaagataaactttgatgacaacgcagaattccgacaaaaagacatatttgctatggacgacaaatcagagaatgagcccattgaaaatgaagctgccaaatatgatctaaaatacataggactagatgggaacattgcctgctttgtgaatggtgctgggctcgccatggctacttgtgatatcattttccttaatggtgggaagccagccaacttcttggatcttggaggtggtgtaaaggaagctcaagtatatcaagcattcaaattgctcacagctgatcctaaggttgaagccatccttgtcaatatatttggtggtatcgtcaactgtgccatcattgccaatgggatcaccaaagcctgccgggagctagaactcaaggtgcccctggtggtccggcttgaaggaaccaacgtccaagaggcccagaagatactcaacaacagcggactccccattacttcagccattgacctggaggatgcagccaagaaggctgtggccagtgtggccaagaagtgatgtctttgtcctgatccaatggagaaagaaagccatttttccataaaaagggatggttcatcattgtgaaagaaatggttatctcattggggaagaaaaggggagggggaaggcaagaatcactgaaaaatcttaaatctgtgttttctggaataagatatctagacagcctaaatctgattttagtctttataaaaataatatcttgtgttctcatacttttctgtcactgtaagcctgcccagtaggcagtgttttgcagactttggggagtggtctatgtggccaaatattgtgtgtatagacagaatttgaaatcaagtcctgcttcatttacaagaattttggtgggcatcgaatcctacataatgaaaaagaaaaacagaccatttaaaaactcagacaagattatatttaatatattaattactaaaaaggcacaagattacactgaacatattagctactaaaaaggcactgctaagacattcaagcaaatagctattacacactactgcagattttacaggtttctaattctaacatatgtttgaaaaatccgtgagtattccaaaatatatttaataatggaatatctgcattaatataccatccatgtgtttttaccatttgccttaatattgaatatactgtttacctcacactaaaaagaaaaccagaagccttatttgtgattttgggagtggaagcttccatttttgtgtcaaaaatgaatcctgattcttatggaaatctctgttattaagatatttcaagatgagacaacactgaagatcaaattgtgtttagtatcactatcttctctcctcgtttctctcttactcctcatcctcccagaatctaccagtttatggtagaaagatgggaaccttatttgaatgtgtttttttttttccatgatgtccaattttgttgtgggaaaggatttggataaaatttttgtttaaattttggtagatttttatctatacaaatttaaataaaattatgttttgtaagctgaaaaaaaaaaaaaaaaaaa

SEQ ID NO: 612 - DNA, 2178 bp, human
ccgcctgtcgcctgtgcgcctgcgcgcggcgccgaggggacggggtccgactcagaaatggcggcctccatgttctacggcaggctagtggccgtggccacccttcggaaccaccggcctcggacggcccagcgggctgctgctcaggttctgggaagttctggattgtttaataaccatggactccaagtacagcagcaacagcaaaggaatctctcactacatgaatacatgagtatggaattattgcaagaagctggtgtctccgttcccaaaggatatgtggcaaagtcaccagatgaagcttatgcaattgccaaaaaattaggttcaaaagatgtcgtgataaaggcacaggttttagctggtggtagaggaaaaggaacatttgaaagtggcctcaaaggaggagtgaagatagttttctctccagaagaagcaaaagctgtttcttcacaaatgattgggaaaaaattgtttaccaagcaaacgggagaaaagggcagaatatgcaatcaagtattggtctgtgagcgaaaatatcccaggagagaatactactttgcaataacaatggaaaggtcatttcaaggtcctgtattaataggaagttcacatggtggtgtcaacattgaagatgttgctgctgagtctcctgaagcaataattaaagaacctattgatattgaagaaggcatcaaaaaggaacaagctctccagcttgcacagaagatgggatttccacctaatattgtggaatcagcagcagaaaacatggtcaagctttacagcctttttctgaaatacgatgcaaccatgatagaaataaatccaatggtggaagattcagatggagctgtattgtgtatggatgcaaagatcaattttgactctaattcagcctatcgccaaaagaaaatctttgatctacaggactggacccaggaagatgaaagggacaaagatgctgctaaggcaaatctcaactacattggcctcgatggaaatataggctgcctagtaaatggtgctggtttggctatggccacaatggatataataaaacttcatggagggactccagccaacttccttgatgttggtggtggtgctacagtccatcaagtaacagaagcatttaagcttatcacttcagataaaaaggtactggctattctggtcaacatttttggaggaatcatgcgctgtgatgttattgcacagggtatagtcatggcagtaaaagacttggaaattaaaatacctgttgtggtacggttacaaggtacacgagtcgatgatgctaaggcactgatagcggacagtggacttaaaatacttgcttgtgatgacttggatgaagctgctagaatggttgtaaagctctctgaaatagtgaccttagcgaagcaagcacatgtggatgtgaaatttcagttgccaatatgatctgaaaacccagtggatggctgaaggtgttaaatgtgctataatcattaagaatactgtgttctgtgttattgttctttttctttttagtgtgtggagattgtaattgccatctaggcacacaaacatttaaaaggatttggactgcatttaattgtaccattcagaatggactgtttgtacgaagcatgtataatgcagttatcttctttctttcgtcgcagccagtcttttttgcttctcctacaaaacgtaacttgcaatttgccagtttattattgttggatacaaagttcttcattgataagagtcctataaataagataaatacgaagataaagctttattctttagtgttaaaatacagtatatctaataactagcctcattagtagagcagtatattaaaacaatgttttatgtaaaaagtgtttatcttcagcaccaaatacatgataaatgtatcaatcactatttataaacagagctttcaaacactcctcagaatattcttctaagtattttgatgaagtaactttgtaattatttgaacattgttttaatcattaggaaacactgattaactgcaagtcttcatgattctgtcatattaagaaacacctgtaggtttgcttcaaataaaggcatatataccaaggacttacagacaaaattaagaatgtcaatttaagttaataaaaatctcccaatatgaaaaaaaaaaaaaaa

SEQ ID NO: 613 - DNA, 1989 bp, human
gcggccgccgggactcttcctggagacaccgccatggccgggctatcccgcgggtccgcgcgcgcactgctcgccgccctgctggcgtcgacgctgttggcgctgctcgtgtcgcccgcgcggggtcgcggcggccgggaccacggggactgggacgaggcctcccggctgccgccgctaccaccccgcgaggacgcggcgcgcgtggcccgcttcgtgacgcacgtctccgactggggcgctctggccaccatctccacgctggaggcggtgcgcggccggcccttcgccgacgtcctctcgctcagcgacgggcccccgggcgcgggcagcggcgtgccctatttctacctgagcccgctgcagctctccgtgagcaacctgcaggagaatccatatgctacactgaccatgactttggcacagaccaacttctgcaagaaacatggatttgatccacaaagtcccctttgtgttcacataatgctgtcaggaactgtgaccaaggtgaatgaaacagaaatggatattgcaaagcattcgttattcattcgacaccctgagatgaaaacctggccttccagccataattggttctttgctaagttgaatataaccaatatctgggtcctggactactttggtggaccaaaaatcgtgacaccagaagaatattataatgtcacagttcagtgaagcagactgtggtgaatttagcaacacttatgaagtttcttaaagtggctcatacacacttaaaaggcttaatgtttctctggaaagcgtcccagaatattagccagttttctgtcacatgctggtttgtttgcttgcttgtttacttgcttgtttaccaatagagttgacctgttattggatttcctggaagatgtggtagctacttttttcctattttgaagccattttcgtagagaaatatccttcactataatcaaataagttttgtcccatcaattccaaagatgtttccagtggtgctcttgaagaggaatgagtaccagttttaaattgcccattggcatttgaaggtagttgagtatgtgttctttattcctagaagccactgtgcttggtagagtgcatcactcaccacagctgcctcctgagctgcctgagcctggtgcaaaaggattggcccccattatggtgcttctgaataaatcttgccaagatagacaaacaatgatgaaactcagatggagcttcctactcatgttgatttatgtctcacaatcctgggtattgttaattcaacatagggtgaaactatttctgataaagaacttttgaaaaactttttatactctaaagtgatactcagaacaaaagaaagtcataaaactcctgaatttaatttccccacctaagtcgagacagtattatcaaaacacatgtgcacacagattattttttggctccaaaactggattgcaaaagaaagaggagaagaatattttgtgtgttcctggtattcttttataagtaaagtttacccaggcatggaccagcttcagccagggacaaaatcccctcccaaaccactctccacagctttttaaaaatacttctactcttaacaattacctaaggcttcctcaactgccccaaatctcttaatagcttctagtgctgctacaatctaagtcaggtcaccagagggaagagaacatggcattaaaagaatcacatcttcagaagagaagacactaatattattacccatatacatgatttcagaagatgacataagattcctcttaaagaggaaatgtcaggaatcaagccactgaatccttaaagagaaaagttgaatatgagtcattgtgtctgaaaactgcaaagtgaacttaactgagatccagcaaacaggttctgtttaagaaaaataatttatactaaatttagtaaaatggacttcttattcaaagcatcaataattaaaagaattattttaaaaaaaaaaaaaaa

SEQ ID NO: 614 - DNA, 1955 bp, human
gcggcggccgcgggcggcgggcggcggaggtgcggggcctgctcccgccggcaccatggccaagaccgtggcctatttctacgaccccgacgtgggcaacttccactacggagctggacaccctatgaagccccatcgcctggcattgacccatagcctggtcctgcattacggtctctataagaagatgatcgtcttcaagccataccaggcctcccagcatgacatgtgccgcttccactccgaggactacattgacttcctgcagagagtcagccccaccaatatgcaaggcttcaccaagagtcttaatgccttcaacgtaggcgatgactgcccagtgtttcccgggctctttgagttctgctcgcgttacacaggcgcatctctgcaaggagcaacccagctgaacaacaagatctgtgatattgccattaactgggctggtggtctgcaccatgccaagaagtttgaggcctctggcttctgctatgtcaacgacattgtgattggcatcctggagctgctcaagtaccaccctcgggtgctctacattgacattgacatccaccatggtgacggggttcaagaagctttctacctcactgaccgggtcatgacggtgtccttccacaaatacggaaattacttcttccctggcacaggtgacatgtatgaagtcggggcagagagtggccgctactactgtctgaacgtgcccctgcgggatggcattgatgaccagagttacaagcaccttttccagccggttatcaaccaggtagtggacttctaccaacccacgtgcattgtgctccagtgtggagctgactctctgggctgtgatcgattgggctgctttaacctcagcatccgagggcatggggaatgcgttgaatatgtcaagagcttcaatatccctctactcgtgctgggtggtggtggttatactgtccgaaatgttgcccgctgctggacatatgagacatcgctgctggtagaagaggccattagtgaggagcttccctatagtgaatacttcgagtactttgccccagacttcacacttcatccagatgtcagcacccgcatcgagaatcagaactcacgccagtatctggaccagatccgccagacaatctttgaaaacctgaagatgctgaaccatgcacctagtgtccagattcatgacgtgcctgcagacctcctgacctatgacaggactgatgaggctgatgcagaggagaggggtcctgaggagaactatagcaggccagaggcacccaatgagttctatgatggagaccatgacaatgacaaggaaagcgatgtggagatttaagagtggcttgggatgctgtgtcccaaggaatttcttttcacctcttggttgggctggagggaaaaggagtggctcctagagtcctgggggtcaccccagggcttttgctgactctgggaaagagtctggagaccacatttggttctcgaaccatctacctgcttttcctctctctcccaaggcctgacaatggtacctattagggatggagatacagacaaggatagctatctgggacattattggcagtgggccctggaggccagtccctagccccccttgccccttatttcttccctgcttccctcgaacccagagatttttgagggatgaacgggtagacaaggactgagattgcctctgacttcctcctcccctgggttctgacttcttcctccccttgcttccagggaagatgaagagagagagatttggaaggggctctggctccctaacacctgaatcccagatgatgggaagtatgttttcaagtgtggggaggatatgaaaatgttctgttctcacttttggctttatgtccattttaccactgtttttatccaataaactaagtcggtattttttgtacctttaaaaaaaaaaaaaaaaaaaa

SEQ ID NO: 615 - DNA, 1817 bp, human
ggcacgagctgaattgcgcgtggtggccatggcggccagcggggctgtggaaccagggcccccgggggctgccgtcgccccgtcgcccgccccggccccgccgcctgcccctgatcacctgttccggcccatcagcgccgaggacgaggagcagcagcccaccgagatcgagtcgctatgcatgaactgttactgcaatggcatgacgcgcctcctgctcaccaagattcccttcttcagagaaataatagtgagctccttttcctgcgagcactgtggctggaacaacacggagatccagtcggcaggcaggatccaggaccagggagtgcgctacactttgtctgtcagggctctggaggacatgaacagagaagtggtgaagactgactctgctgccacaaggattcctgagctagattttgaaattcctgcctttagccagaaaggagctctgaccactgttgaaggattgatcacccgtgctatctctggcctggagcaggaccagcctgcacgaagggcaaacaaagatgctacagctgaaagaattgatgagttcattgtcaaactgaaggagctaaagcaagtagcctcccctttcactctgatcattgatgatccctcagggaacagttttgtggaaaacccacatgctcctcagaaagatgatgccctggtgatcacacactacaaccggacccgacagcaggaagagatgctggggcttcaagaagaagcaccagcagagaagccagaagaggaagatctcagaaatgaagtgctccagttcagcacaaactgcccagaatgcaatgcccccgctcagaccaacatgaagctagtacaaatccctcactttaaggaggttatcatcatggctaccaactgcgagaactgtgggcatcggaccaatgaggtgaaatctggaggagcagtagaacccttgggcaccaggatcaccctccacatcacagatgcctcagatatgaccagagacctcctcaagtctgagacttgcagtgtggaaatcccagagctagaatttgaactgggaatggcagtcctcgggggcaagttcaccacactggaagggctgctgaaagacatccgggaactggtgaccaaaaatcctttcacactgggcgacagttccaatcctggacagacggagagactacaggagtttagccagaagatggaccagatcatcgaaggtaacatgaaggcccactttattatggatgatccagcaggaaacagttacttgcagaatgtgtatgcgcctgaagatgatcctgagatgaaggtggagcgttacaagcgcacctttgaccaaaatgaggagctagggctcaatgacatgaagacagagggctatgaggcaggcctggctccgcaacggtagcagtgggtggctcaagggccagcctccagcgctgctctttctgtaggttatttattagtattggatgaaggcgaaggctgggagtgtctttcccaccagcccttgcccatggtggggaggacatctggtttgagtcagagatctgtgcacactttttaaacagcttgtgatgcaagtgtgagcctattgtgttacttgaccttattttggaagttttgaattggcctaggaggaaacccagaaatgaaccaggggtatgtcatcacttttttcatatcaagtcctcaccctccttccacataatgctttatcctttaaggttggaactttgaagttggagaaggtggaataaagttacacctggaaaaaaaaaaaaaaaaaaaaaaaaaaaaaaaaaaaaaaaaaaaaa

SEQ ID NO: 616 - DNA, 2843 bp, human
gcttccacatgtgtcaagcggctggctcagcccagagtccctgtctcccgcccgccggcccgagccgccgcccctcccccgcctcccgtgcgcccgggacaatcctcgccttgtctgtggcgccggcatctggagctttctgtagcctccggatacgcctttttttcagggcgtagccccagccaagctgctccccgcggcggccgcacagcagcccgagcgccccctttccggagctcccctccggagctgggatccaggcgcgtagcggagatcccaggatcctgggtgctgtctgggcccgctccccaccatgacctcctcggggcctggaccccggttcctgctgctgctgccgctgctgctgccccctgcggcctcagcctccgaccggccccggggccgagacccggtcaacccagagaagctgctggtgatcactgtggccacagctgaaaccgaggggtacctgcgtttcctgcgctctgcggagttcttcaactacactgtgcggaccctgggcctgggagaggagtggcgagggggtgatgtggctcgaacagttggtggaggacagaaggtccggtggttaaagaaggaaatggagaaatacgctgaccgggaggatatgatcatcatgtttgtggatagctacgacgtgattctggccggcagccccacagagctgctgaagaagttcgtccagagtggcagccgcctgctcttctctgcagagagcttctgctggcccgagtgggggctggcggagcagtaccctgaggtgggcacggggaagcgcttcctcaattctggtggattcatcggttttgccaccaccatccaccaaatcgtgcgccagtggaagtacaaggatgatgacgacgaccagctgttctacacacggctctacctggacccaggactgagggagaaactcagccttaatctggatcataagtctcggatctttcagaacctcaacggggctttagatgaagtggttttaaagtttgatcggaaccgtgtgcgtatccggaacgtggcctacgacacgctccccattgtggtccatggaaacggtcccactaagctgcagctcaactacctgggaaactacgtccccaatggctggactcctgagggaggctgtggcttctgcaaccaggaccggaggacactcccgggggggcagcctcccccccgggtgtttctggccgtgtttgtggaacagcctactccgtttctgccccgcttcctgcagcggctgctactcctggactatccccccgacagggtcacccttttcctgcacaacaacgaggtcttccatgaaccccacatcgctgactcctggccgcagctccaggaccacttctcagctgtgaagctcgtggggccggaggaggctctgagcccaggcgaggccagggacatggccatggacctgtgtcggcaggaccccgagtgtgagttctacttcagcctggacgccgacgctgtcctcaccaacctgcagaccctgcgtatcctcattgaggagaacaggaaggtgatcgcccccatgctgtcccgccacggcaagctgtggtccaacttctggggcgccctgagccccgatgagtactacgcccgctccgaggactacgtggagctggtgcagcggaagcgagtgggtgtgtggaatgtaccatacatctcccaggcctatgtgatccggggtgataccctgcggatggagctgccccagagggatgtgttctcgggcagtgacacagacccggacatggccttctgtaagagctttcgagacaagggcatcttcctccatctgagcaatcagcatgaatttggccggctcctggccacttccagatacgacacggagcacctgcaccccgacctctggcagatcttcgacaaccccgtcgactggaaggagcagtacatccacgagaactacagccgggccctggaaggggaaggaatcgtggagcagccatgcccggacgtgtactggttcccactgctgtcagaacaaatgtgtgatgagctggtggcagagatggagcactacggccagtggtcaggcggccggcatgaggattcaaggctggctggaggctacgagaatgtgcccaccgtggacatccacatgaagcaggtggggtacgaggaccagtggctgcagctgctgcggacgtatgtgggccccatgaccgagagcctgtttcccggttaccacaccaaggcgcgggcggtgatgaactttgtggttcgctaccggccagacgagcagccgtctctgcggccacaccacgactcatccaccttcaccctcaacgttgccctcaaccacaagggcctggactatgagggaggtggctgccgcttcctgcgctacgactgtgtgatctcctccccgaggaagggctgggcactcctgcaccccggccgcctcacccactaccacgaggggctgccaacgacctggggcacacgctacatcatggtgtcctttgtcgacccctgacactcaaccactctgccaaacctgccctgccattgtgcctttttagggggcctggcccccgtcctgggagttgggggatgggtctctctgtctccccacttcctgagttcatgttccgcgtgcctgaactgaatatgtcaccttgctcccaagacacggccctctcaggaagctcccggagtccccgcctctctcctccgcccacaggggttcgtgggcacagggcttctggggactccccgcgtgataaattattaatgttccgcagtctcactctgaataaaggacagtttgtaaaaaaaaaaaaaaaaaa

SEQ ID NO: 617 - DNA, 1721 bp, human
caccagcacagcaaacccgccgggatcaaagtgtaccagtcggcagcatggctacgaaatgtgggaattgtggacccggctactccacccctctggaggccatgaaaggacccagggaagagatcgtctacctgccctgcatttaccgaaacacaggcactgaggccccagattatctggccactgtggatgttgaccccaagtctccccagtattgccaggtcatccaccggctgcccatgcccaacctgaaggacgagctgcatcactcaggatggaacacctgcagcagctgcttcggtgatagcaccaagtcgcgcaccaagctggtgctgcccagtctcatctcctctcgcatctatgtggtggacgtgggctctgagccccgggccccaaagctgcacaaggtcattgagcccaaggacatccatgccaagtgcgaactggcctttctccacaccagccactgcctggccagcggggaagtgatgatcagctccctgggagacgtcaagggcaatggcaaagggggttttgtgctgctggatggggagacgttcgaggtgaaggggacatgggagagacctgggggtgctgcaccgttgggctatgacttctggtaccagcctcgacacaatgtcatgatcagcactgagtgggcagctcccaatgtcttacgagatggcttcaaccccgctgatgtggaggctggactgtacgggagccacttatatgtatgggactggcagcgccatgagattgtgcagaccctgtctctaaaagatgggcttattcccttggagatccgcttcctgcacaacccagacgctgcccaaggctttgtgggctgcgcactcagctccaccatccagcgcttctacaagaacgagggaggtacatggtcagtggagaaggtgatccaggtgccccccaagaaagtgaagggctggctgctgcccgaaatgccaggcctgatcaccgacatcctgctctccctggacgaccgcttcctctacttcagcaactggctgcatggggacctgaggcagtatgacatctctgacccacagagaccccgcctcacaggacagctcttcctcggaggcagcattgttaagggaggccctgtgcaagtgctggaggacgaggaactaaagtcccagccagagcccctagtggtcaagggaaaacgggtggctggaggccctcagatgatccagctcagcctggatgggaagcgcctctacatcaccacgtcgctgtacagtgcctgggacaagcagttttaccctgatctcatcagggaaggctctgtgatgctgcaggttgatgtagacacagtaaaaggagggctgaagttgaaccccaacttcctggtggacttcgggaaggagccccttggcccagcccttgcccatgagctccgctaccctgggggcgattgtagctctgacatctggatttgaactccaccctcatcacccacactccctattttgggccctcacttccttggggacctggcttcattctgctctctcttggcacccgacccttggcagcatgtaccacacagccaagctgagactgtggcaatgtgttgagtcatatacatttactgaccactgttgcttgttgctcactgtgctgcttttccatgagctcttggaggcaccaagaaataaactcgtaaccctgtccttcaaaaaaaaaaaaaaaaa

SEQ ID NO: 618 - DNA, 690 bp, human
ccgggcgctcctagcggtctcccggcccctgccgccctgccactatgtcccgccgctctatgctgcttgcctgggctcttcccagcctccttcgactcggagcggctcaggagacagaagacccggcctgctgcagccccatagtgccccggaacgagtggaaggccctggcatcagagtgcgcccagcacctgagcctgcccttacgctatgtggtggtatcgcacacggcgggcagcagctgcaacacccccgcctcgtgccagcagcaggcccggaatgtgcagcactaccacatgaagacactgggctggtgcgacgtgggctacaacttcctgattggagaagacgggctcgtatacgagggccgtggctggaacttcacgggtgcccactcaggtcacttatggaaccccatgtccattggcatcagcttcatgggcaactacatggatcgggtgcccacaccccaggccatccgggcagcccagggtctactggcctgcggtgtggctcagggagccctgaggtccaactatgtgctcaaaggacaccgggatgtgcagcgtacactctctccaggcaaccagctctaccacctcatccagaattggccacactaccgctccccctgaggccctgctgatccgcaccccattcctcccctcccatggccaaaaaccccactgt

SEQ ID NO: 619 - DNA, 843 bp, human
gggcgggtcttcttccttctcgcctaacgccgccaacatggtgttcaggcgcttcgtggaggttggccgggtggcctatgtctcctttggacctcatgccggaaaattggtcgcgattgtagatgttattgatcagaacagggctttggtcgatggaccttgcactcaagtgaggagacaggccatgcctttcaagtgcatgcagctcactgatttcatcctcaagtttccgcacagtgcccaccagaagtatgtccgacaagcctggcagaaggcagacatcaatacaaaatgggcagccacacgatgggccaagaagattgaagccagagaaaggaaagccaagatgacagattttgatcgttttaaagttatgaaggcaaagaaaatgaggaacagaataatcaagaatgaagttaagaagcttcaaaaggcagctctcctgaaagcttctcccaaaaaagcacctggtactaagggtactgctgctgctgctgctgctgctgctgctgctgctaaagttccagcaaaaaagatcaccgccgcgagtaaaaaggctccagcccagaaggttcctgcccagaaagccacaggccagaaagcagcgcctgctccaaaagctcagaagggtcaaaaagctccagcccagaaagcacctgctccaaaggcatctggcaagaaagcataagtggcaatcataaaaagtaataaaggttctttttgacctgttgacaaatgtatttaagcctttggatttaaagcctgttgaggctagagttaggaggcagattgatagtaggattataataaacattaaataatcaaaaaaaaaaaaaaaaaaaa

SEQ ID NO: 620 - DNA, 1244 bp, human
gcacgaggaaaatggcgctagctcggaagctaccgaggtgctaggagttgccgaagcaagtccggaagctaccgagcgagtccggaagttgccgaaagggagcagcggggaaggaggatggcggatatcatcgcaagactccgggaggacgggatccaaaaacgtgtgatacaggaaggccgaggagagctcccggactttcaagatgggaccaaggccacgttccactaccggacgctgcacagtgacgacgagggcaccgtgctggacgacagccgggctcgtggcaagcccatggagctcatcattggcaagaagttcaagctgcctgtgtgggagaccatcgtgtgcaccatgcgagaaggggagattgcccagttcctctgtgacatcaagcatgtggtcctgtacccgctggtggccaagagtctccgcaacatcgcggtgggcaaggaccccctggagggccagcggcactgctgcggtgttgcacagatgcgtgaacacagctccctgggccatgctgacctggacgccctgcagcagaacccccagcccctcatcttccacatggagatgctgaaggtggagagccctggcacgtaccagcaggacccatgggccatgacagacgaagagaaggcaaaggcagtgccacttatccaccaggagggcaaccggttgtaccgcgaggggcatgtgaaggaggctgctgccaagtactacgatgccattgcctgcctcaagaacctgcagatgaaggaacagcctgggtcccctgaatggatccagctggacaagcagatcacgccgctgctgctcaactactgccagtgcaagctggtggtcgaggagtactacgaggtgctggaccactgctcttccatcctcaacaagtacgacgacaacgtcaaggcctacttcaagcggggcaaggcccacgcggccgtgtggaatgcccaggaggcccaggctgactttgccaaagtgctggagctggacccagccctggcgcctgtggtgagccgagagctgcgggccctggaggcacggatccggcagaaggacgaagaggacaaagcccggttccgggggatcttctcccattgacaggagcacttggccctgccttacctgccaagcccactgctgcagctgccagcccccctgcccgtgctgcgtcatgcttctgtgtatataaaggcctttatttatctctcaaaaaaaaaaaaaaaaaaaaaaaa

SEQ ID NO: 621 - DNA, 4018 bp, human
gttccgcccgccgctcttccagctgagactcggcagcggcggtcggagcggctgccacgccgcacctgcccgcgagggggcgcgccaggcccaggccgcagccgactgccgcgctctctgtccccgccctccgccatccccggactgcgctcacctgtctgggccgctggcctgggaggcgggggccggcgggagccaagccgaggaaagggcggagcggctctccgggcgcgtcatcggagcaccatggcggagctaggagctggcggcgacggccacaggggcggcgacggcgcagtgcgaagcgaaacagcacccgacagctacaaagtgcaagataagaaaaatgcctccagccgccctgcctctgcaatttcaggacaaaataacaaccactcaggaaataaaccagaccctccgcctgtgttacgtgttgatgaccggcagcggctggcccgggagcgacgtgaggaacgggagaaacagctagctgcaagagaaatagtgtggttagaaagagaagagcgagccaggcagcactacgagaagcacctggaagagcggaagaagaggttggaggagcagaggcagaaggaggagcggaggagggctgctgtggaggagaagcggaggcagagacttgaggaggacaaagaacgccacgaagctgttgtacggcgcacaatggaaaggagccagaagccaaaacagaagcataaccgttggtcgtggggaggctctctccatgggagccctagcatccacagtgcagatccagacaggcggtcagtttccaccatgaatctttcgaaatatgttgatcccgtcattagcaagcggctctcctcttcatctgcaactttactaaattctccagatagagctcgccgcctgcagctcagcccatgggagagcagcgttgttaacagactcctgacgcccacacattcgttcctggccagaagtaaaagcacagctgccttgtctggagaagcagcatcttgcagccccatcatcatgccctacaaagctgcacactctagaaattcgatggatcgaccaaaactctttgtaacaccacctgagggctcttctcgcaggaggatcattcatggcacagcgagctataaaaaagaaagagagagagaaaatgtactcttcctcacatctggcacccgaagggctgtatctccatctaatcccaaagcaagacaaccagctcgctcccgactttggcttccgtccaagtctcttcctcatttgcctggcacacccagaccgacatcctccttgccacccggctcagtcaaagctgctcctgctcaggtccggcccccatcccccggcaacatccgccctgtcaagagggaagtcaaagtggagcctgagaagaaagatcctgagaaggaacctcagaaagttgccaatgagccctcactaaagggcagagcacctttagtgaaggtagaagaagccacagttgaagagcggacacctgctgaaccagaagttggccctgctgctccagccatggccccagctccagcctcggccccagctccagcctcggccccagctccagccccggtccccaccccagccatggtctcagccccgtcatccactgtgaatgccagtgcttctgttaagacttctgcaggcaccaccgacccagaggaggccacaaggcttctagctgagaagaggcggctggcccgagagcagagagaaaaggaagaaagggagaggagggagcaggaagagcttgaaagacaaaagagagaggaattggctcaacgtgtggctgaagagaggacgactcgccgtgaggaggagtcgcgcaggctggaagccgagcaggcccgggagaaggaggagcagctgcagcggcaggcggaggagcgggcgctgcgcgagcgggaggaggcagagcgcgcccagaggcagaaagaagaagaagctcgcgttcgtgaagaagcagagagggtccggcaggaacgagagaagcatttccagagagaagagcaagagcgcctggagagaaagaagcgacttgaggagattatgaaaagaaccaggagaacagaagctacagataagaaaaccagtgatcagagaaacggtgatatagccaagggagctctcactggaggaacagaggtgtctgcacttccatgtacaacaaacgctccgggaaatggaaagccagttggcagcccacatgtggttacctcacaccagtcaaaagtgacagtggagagcactcccgatttggaaaaacaaccaaatgaaaatggtgtatctgttcagaatgaaaattttgaagaaattataaacttacccattggatctaaaccatccagattagatgtcaccaacagtgagagcccagaaattcctttgaatccaattttggcctttgatgatgaagggacacttgggcccctgcctcaggtagatggtgttcagacacagcagactgcagaagttatatgagtgtttcttctgaagaaccaaagctgaaatttaatgagaatttctacaattaatggaattcctttcctgctataaaggagcatcccctccacccgttttctagagttcttgaccatcattttgaaaagatttattaaaactagctaaagacaacagactggatagcttttctaataattttcatcaataggaaaaaagaaatacgtctcattcttcaatactttaaaatggctttttccagtgtgctccttcttagcaatcaatatttttctgcattctttaaaagacaagagaatttggttataaaagaaatgggctgactaggcatgatttttttggtcttaaaagcttaacatgtaaaattggcaaaaaaaattttttaccttttataatacttgaaaaataagtacctctttgttctacaagtagaatgaataggagaagagtttaagcctgtttttttaaaatattattgcaaagagctctatttgtagaagcaaattataggcagattaccaggttcttataaatacagcttgtacatggacattctgcaaacccagctgtcacatttttcttgcaactccttttgcaaaagcagactaaaatgttttaaaatgtgaaaaaacattattttttcaaagcaagaaaataatttactgccctcttacataatgtatttataaagtttttccagataaactaatcaaataaattagaataatgtgacaacattacaaatttaatttgttagctgcattccttctgatgttaccacgatagaatgttactgatgattcagggctatttctgaagtctgtatgttgctgctgtccccagtgatggtggacttatctttgccttacctgatcacaaattatgttggggaaaataaagatttaatatttctttaaatagaaaaagaatttggttttgctcgtttaagagcaatgagaaaatgatggaatgttgactgtgtttggcacacaggacacggaccttcatggaagtccttgctctgcgtggcatctgtcagcttttcacctttcattcttattcttcacttttgctgctgagcctagctgtacaaacttgcactttcatttgctaatataaattcagttttattttaccattttagagactactaatgattaaatgtagaaggagagggtgcacatgtttttatgtggagtgtttaaaagataaatttataccactgtaatgtgcagcttttattaaaagagaaattggttgaactgctaggttgaatgagagacttcatctattggactattttttttaatccaggcatatggtctttagtaatggcttgtaatttgtgaaaacattaatttgggggttttccctgttttcagttgtccatgtacacatagtcattatattagaaaagaaagctgttcaacaaacttgtttaatttgtttaaatcaacatagcatgaaacaccaaataaaatgtttgacatagttttaaaaaaaaaaaaaaaaaaaaaaaaaaaaa

SEQ ID NO: 622 - DNA, 1953 bp, human
gatctttggtccttctgttacccagctcctggaggcagtggctgtagcagcccttgctgctccacaccatggccacctgctggcaggccctgtgggcctatcgctcctacctgatcgtgttcttcgtgcccattctcctgctgcctctgcccatcctcgtccccagtaaggaggcctactgcgcgtatgccatcatcctcatggcgctcttctggtgcactgaggccctgcccctggccgtcactgccctcttccccttaatcctgttccctatgatgggcatcgtggatgcctctgaggttgccgtcgagtatcttaaggactccaacctcctgttcttcggggggctgctggtggccatcgcggtggaacactggaacctgcataaacgcatcgccctccgtgtcctcctcatcgttggggtgcggcctgccccgctaatcctgggcttcatgctggtcacggccttcctgtccatgtggatcagcaacacggccacctcagccatgatggtgcccatcgcacatgccgtcctggaccagctgcacagctcgcaagccagcagcaacgtcgaggagggcagcaacaaccccaccttcgagctccaggaaccaagtccccagaaggaggtgaccaagcttgataatgggcaggccctccctgtcacgtctgcctcttcggaggggagggcacatctcagccagaagcatctccacctcacccagtgcatgagcctgtgcgtgtgctactccgccagcatcgggggcatcgccacgctgactggcaccgcacccaacctggtgctgcaaggccagatcaactcgctcttcccccaaaacggcaacgtggtgaacttcgcctcctggttcagcttcgccttccccaccatggtcatcttgctgctgctggcctggttgtggctgcagatcctcttcctgggcttcaacttccggaagaactttggcattggggaaaagatgcaggagcaacagcaggcagcctactgcgtcatccagaccgagcacaggctgctgggccccatgacctttgcagaaaaggccatcagcatcctattcgtcatcctggtgctgctctggttcacccgggagccgggcttttttcttggctggggcaatttggcttttcccaatgccaagggggagagcatggtgtccgatgggacagtggccatcttcatcggcataattatgttcatcataccctccaagttcccagggctgacccaggacccagaaaacccagggaagctgaaggcccctcttggcctcctcgactggaagacggtgaaccagaagatgccgtggaatatcgtgttattgctgggtggtggctatgccctggccaagggcagtgagcgatcgggcctgtcagagtggctgggaaacaagctgaccccactgcagagtgtgccagctccagccattgccatcatcctctccctcctggtggccaccttcaccgagtgcactagcaacgtggccaccactacgatcttcctgcccatcctagcctccatggcccaggccatctgcctccaccctctctacgtcatgctcccctgcactctggccacctccctggccttcatgttgcctgtggccaccccgcccaatgccatcgtcttctctttcggggacctcaaagtgttggatatggcccgggcaggattcctcctcaacatcattggagtcctgatcatcgcactggccatcaacagctggggcatccccctcttcagcctgcactctttcccctcctgggcacagtccaacaccacagcccagtgcctgccaagcctggccaacaccaccacaccaagcccctaggctggggcacagcctggccatgcccaggaagacccaccccattcccactcctctgagcccggaggggacaccccaagctccaagctccaagctccaggccggaatt

SEQ ID NO: 623 - DNA, 2415 bp, human
gtccggcagccgctgctgctgctgctgctgctgctgccgccgccgccgccgccgtccctgcgtccttcggtctctgctcccgggacccgggctccgccgcagccagccagcatgtcggggatcaagaagcaaaagacggagaaccagcagaaatccaccaatgtagtctatcaggcccaccatgtgagcaggaataagagagggcaagtggttggaacaaggggtgggttccgaggatgtaccgtgtggctaacaggtctctctggtgctggaaaaacaacgataagttttgccctggaggagtaccttgtctcccatgccatcccttgttactccctggatggggacaatgtccgtcatggccttaacagaaatctcggattctctcctggggacagagaggaaaatatccgccggattgctgaggtggctaagctgtttgctgatgctggtctggtctgcattaccagctttatttctccattcgcaaaggatcgtgagaatgcccgcaaaatacatgaatcagcagggctgccattctttgaaatatttgtagatgcacctctaaatatttgtgaaagcagagacgtaaaaggcctctataaaagggccagagctggggagattaaaggatttacaggtattgattctgattatgagaaacctgaaactcctgagcgtgtgcttaaaaccaatttgtccacagtgagtgactgtgtccaccaggtagtggaacttctgcaagagcagaacattgtaccctatactataatcaaagatatccacgaactctttgtgccggaaaacaaacttgaccacgtccgagctgaggctgaaactctcccttcattatcaattactaagctggatctccagtgggtccaggttttgagcgaaggctgggccactcccctcaaaggtttcatgcgggagaaggagtacttacaggttatgcactttgacaccctgctagatgatggcgtgatcaacatgagcatccccattgtactgcccgtctctgcagaggataagacacggctggaagggtgcagcaagtttgtcctggcacatggtggacggagggtagctatcttacgagacgctgaattctatgaacacagaaaagaggaacgctgttcccgtgtttgggggacaacatgtacaaaacacccccatatcaaaatggtgatggaaagtggggactggctggttggtggagaccttcaggtgctggagaaaataagatggaatgatgggctggaccaataccgtctgacacctctggagctcaaacagaaatgtaaagaaatgaatgctgatgcggtgtttgcattccagttgcgcaatcctgtccacaatggccatgccctgttgatgcaggacactcgccgcaggctcctagagaggggctacaagcacccggtcctcctactacaccctctgggcggctggaccaaggatgacgatgtgcctctagactggcggatgaagcagcacgcggctgtgctcgaggaaggggtcctggatcccaagtcaaccattgttgccatctttccgtctcccatgttatatgctggccccacagaggtccagtggcactgcaggtcccggatgattgcgggtgccaatttctacattgtggggagggaccctgcaggaatgccccatcctgaaaccaagaaggatctgtatgaacccactcatgggggcaaggtcttgagcatggcccctggcctcacctctgtggaaatcattccattccgagtggctgcctacaacaaagccaaaaaagccatggacttctatgatccagcaaggcacaatgagtttgacttcatctcaggaactcgaatgaggaagctcgcccgggaaggagagaatcccccagatggcttcatggcccccaaagcatggaaggtcctgacagattattacaggtccctggagaagaactaagcctttggctccagagtttctttctgaagtgctctttgattaccttttctatttttatgattagatgctttgtattaaattgcttctcaatgatgcattttaatcttttataatgaagtaaaagttgtgtctataattaaaaaaaaatatatatatatacacacacacatatacatacaaagtcaaactgaagaccaaatcttagcaggtaaaagcaatattcttatacatttcataataaaattagctctatgtattttctactgcacctgagcaggcaggtcccagatttcttaaggctttgtttgaccatgtgtctagttacttgctgaaaagtgaatatattttccagcatgtcttgacaacctgtactcttccaatgtcatttatcagttgtaaaatatatcagattgtgtcctcttctgtacaattgacaaaaaaaaaaaaaaaaaaaaaaaa

SEQ ID NO: 624 - DNA, 2558 bp, human
agccccgccccgctcgctggcctgccctcctcttgctaccctcccggcgcagagaaccccggctgctcagcgcgctccgcggtcatggagatccccgggagcctgtgcaagaaagtcaaactgagcaataacgcgcagaactggggaatgcagagagcaaccaatgtcacctaccaagcccatcatgtcagcaggaacaagagaggtcaggtggtggggaccagaggtggctttcgtggttgcacagtttggctaacaggcttgtctggagcgggaaagactactgtgagcatggccttggaggagtacctggtttgtcatggtattccatgctacactctggatggtgacaatattcgtcaaggtctcaataaaaatcttggctttagtcctgaagacagagaagagaatgttcgacgcatcgcagaagttgctaaactgtttgcagatgctggcttagtgtgcatcacaagtttcatatcaccttacactcaggatcgcaacaatgcaaggcaaattcatgaaggtgcaagtttaccgttttttgaagtatttgttgatgctcctctgcatgtttgtgaacagagggatgtcaaaggactctacaaaaaagcccgggcaggagaaattaaaggtttcactgggatcgattctgaatatgaaaagccagaggcccctgagttggtgctgaaaacagactcctgtgatgtaaatgactgtgtccagcaagttgtggaacttctacaggaacgggatattgtacctgtggatgcatcttatgaagtaaaagaactatatgtgccagaaaataaacttcatttggcaaaaacagatgcggaaacattaccagcactgaaaattaataaagtggatatgcagtgggtgcaggttttggcagaaggttgggcaaccccattgaatggctttatgagagagagggagtacttgcagtgccttcattttgattgtcttctggatggaggtgtcattaacttgtcagtacctatagttctgactgcgactcatgaagataaagagaggctggacggctgtacagcatttgctctgatgtatgagggccgccgtgtggccattcttcgcaatccagagttttttgagcacaggaaagaggagcgctgtgccagacagtggggaacgacatgcaagaaccacccctatattaagatggtgatggaacaaggagattggctgattggaggagatcttcaagtcttggatcgagtttattggaatgatggtcttgatcagtatcgtcttactcctactgagctaaagcagaaatttaaagatatgaatgctgatgctgtctttgcatttcaactacgcaacccagtgcacaatggacatgccctgttaatgcaggatacccataagcaacttctagagaggggctaccggcgccctgtcctcctcctccaccctctgggtggctggacaaaggatgacgatgttcctttgatgtggcgtatgaagcagcatgctgcagtgttggaggaaggagttctgaatcctgagacgacagtggtggccatcttcccatctcccatgatgtatgctggaccaactgaggtccagtggcattgcagagcacggatggttgcaggagccaacttttacattgttggacgagaccctgctggcatgcctcatccagaaacagggaaggatctttatgagccaagtcatggtgccaaagtgctgacgatggcccctggtttaatcactttggaaatagttccctttcgagttgcagcttacaacaagaaaaagaagcgtatggactactatgactctgaacaccatgaagactttgaatttatttcaggaacacgaatgcgcaaacttgctcgagaaggccagaaaccacctgaaggtttcatggctcccaaggcttggaccgtgctgacagaatactacaaatccttggagaaagcttaggctgttaacccagtcactccacctttgacacattactagtaacaagaggggaccacatagtctctgttggcatttctttgtggtgtctgtctggacatgcttcctaaaaacagaccattttccttaacttgcatcagttttggtctgccttatgagttctgttttgaacaagtgtaacacactgatggttttaatgtatcttttccacttattatagttatattcctacaatacaattttaaaattgtctttttatattatatttatgcttctgtgtcatgattttttcaagctgttatattagttgtaaccagtagtattcacattaaatcttgctttttttccccttaaaaaaagaaaaaaattaccaaacaataaacttggctagaccttgttttgaggattttacaagacctttgtagcgattagattttttttctacattgaaaatagaaactgcttcctttcttctttccagtcagctattggtctttccagctgttataatctaaagtattcttatgatctgtgtaagctctgaatgaacttctttactcaataaaattaattttttggcttcttaaaaaaaaaaaaaaaaa

SEQ ID NO: 625 - DNA, 2330 bp, human
gtgagcgtgtgtgcgtgcgtctactttgtactgggaagaacacagcccatgtgctctgcatggacgttactgatactctgtttagcttgattttcgaaaagcaggcaagatgtccagcacaccacatgaccccttctattcttctcctttcggcccattttataggaggcatacaccatacatggtacagccagagtaccgaatctatgagatgaacaagagactgcagtctcgcacagaggatagtgacaacctctggtgggacgcctttgccactgaattttttgaagatgacgccacattaaccctttcattttgtttggaagatggaccaaagcgatacactatcggcaggaccctcatcccccgttactttagcactgtgtttgaaggaggggtgaccgacctgtattacattctcaaacactcgaaagagtcataccacaactcatccatcacggtggactgcgaccagtgtaccatggtcacccagcacgggaagcccatgtttaccaaggtatgtacagaaggcagactgatcttggagttcacctttgatgatctcatgagaatcaaaacatggcactttaccattagacaataccgagagttagtcccgagaagcatcctagccatgcatgcacaagatcctcaggtcctggatcagctgtccaaaaacatcaccaggatggggctaacaaacttcaccctcaactacctcaggttgtgtgtaatattggagccaatgcaggaactgatgtcgagacataaaacttacaacctcagtccccgagactgcctgaagacctgcttgtttcagaagtggcagaggatggtggctccgccagcagaacccacaaggcaaccaacaaccaaacggagaaaaaggaaaaattccaccagcagcacttccaacagcagcgctgggaacaatgcaaacagcactggcagcaagaagaagaccacagctgcaaacctgagtctgtccagtcaggtacctgatgtgatggtggtaggagagccaactctgatgggaggtgagtttggggacgaggacgaaaggctaatcactagattagaaaacacgcaatatgatgcggccaacggcatggacgacgaggaggacttcaacaattcacccgcgctggggaacaacagcccgtggaacagtaaacctcccgccactcaagagaccaaatcagaaaaccccccaccccaggcttcccaataagatgatcggcaccagaatccactgtcaataggcccgtgggtgatcattacaattgcaaatctttacttacaggagaggaaacagaagagataaaaacttttccatgcaaatatctatttctaaaccacaatgatctgattttctttcttctttctttttttctaattgagaggattattcccagtaagcttccatgaccctttcttggaggccttcacaggtaatacagatactggcactgattgtaattaaaatgagagaaaactctagcgcatcttctggcacggttttaacaacgtgtttgtgttgaatttcctttttatgcatcaaacgaaggccatattgtccataaatgctcagtgctcaggatctcattaatatgccgaacctaactacagatgactttttaatattgtaaaatattttctgctttttgacttgcatctgagagtttcttgtttcagtaaaaaaagaaaagacaaaaaaatcagctttggaaagtaatttaaatgtaccttattttttttttctttatgttttctttcattgggcaacagctaagagggcccagcaaggtaatttatggttgagctgatgtcaattggttcttgtcttgagtcgactcaatttagcccaagtgctgaaacaagaaatgtcatttttttcatcaaagacaccagggcagatttttaagtaaagaaagacaattggacccttaagaatttatgcatttgtaaagttgctgttgatccaaatattttcaagccatgtaatccattggttttgtgggcagtttaataaacctgaacctttgtgtgttttctaattgtacctgagttgaccatcctttctttttatagtatatttcttgtatgatattttgtaaagctctcacctggttcttttatggggacttttcgtttttgggcaactccagtgtatttatgtgaaactttataagagaattaatttttccatttgcatattaatatgttcctccacacatgtaaaggcacagtggctccgtgtgttaaaaaacagctgtattttatgtatgctttactgataagtgtgccaataataaactgtgttaatgacc

SEQ ID NO: 626 - DNA, 3009 bp, human
gcgcaggcgcggcggccgatgcgagtgtgtatgtgcgggcgagaagatggcggcggcgggggaagcagcgtgagcagccggaggatcgcggagtcccaatgaaacgggcagccatggccctccacagcccgcagtatatttttggagattttagccctgatgaattcaatcaattctttgtgactcctcgatcttcagttgagcttcctccatacagtggaacagttctgtgtggcacacaggctgtggataaactacctgatggacaagaatatcagagaattgagtttggtgtcgatgaagtcattgaacccagtgacactttgccgagaacccccagctacagtatttcaagcacactgaaccctcaggcccctgaatttattctcggttgtacagcttccaaaataacccctgatggtatcactaaagaagcaagctatggctccatcgactgccagtacccaggctctgccctcgctttggatggaagttctaatgtggaggcggaagttttggaaaatgatggtgtctcaggtggtcttggacaaagggagcgtaaaaagaagaaaaagcggccacctggatattacagctatttgaaagatggtggcgatgatagtatctccacagaagccctggtcaatggccatgccaattcagcagtcccgaacagtgtcagtgcagaggatgcagaatttatgggtgacatgcctccgccacttacgcccaggacttgtaacagcccccagaactccacagactctgtcagtgacattgtgcctgacagtcctttccccggagcactcggcagtgacaccaggactgcagggcagccagaggggggccccggggctgattttggtcagtcctgcttccctgcagaggctggcagagacaccctgtcaaggacagctggggctcagccctgcgttggtaccgatactactgaaaaccttggagttgctaatggacaaatacttgaatcctcgggtgagggcacagctaccaacggggtggagttgcacaccacggaaagcatagacttggacccaaccaaacccgagagtgcatcacctcctgctgacggcacgggctctgcatcaggcacccttcctgtcagccagcccaagtcctgggccagcctctttcatgattctaagccctcttcctcctcgccggtggcctatgtggaaactaagtattcccctcccgccatatctcccctggtttctgaaaagcaggttgaagtcaaagaagggcttgttccggtttcagaggatcctgtagccataaagattgcagagttgctggagaatgtaaccctaatccataaaccagtgtcgttgcaaccccgtgggctgatcaataaagggaactggtgctacattaatgctacactgcaggcattggttgcttgcccgccgatgtaccacctgatgaagttcattcctctgtattccaaagtgcaaaggccttgtacgtcaacacccatgatagacagctttgttcggctaatgaatgagttcactaatatgccagtacctccaaaaccccgacaagctcttggagataaaatcgtgagggatattcgccctggagctgcctttgagcccacatatatttacagactcctgacagttaacaagtcaagcctgtctgaaaagggtcgacaagaagatgctgaggaatacttaggcttcattctaaatggacttcatgaggaaatgttgaacctaaagaagcttctctcaccaagtaatgaaaaacttacgatttccaacggccccaaaaaccactcggtcaatgaagaagagcaggaagaacaaggtgaaggaagcgaggatgaatgggaacaagtgggcccccggaacaagacttccgtcacccgccaggcggattttgttcagactccaatcaccggcatttttggtggacacatcaggtctgtggtttaccagcagagttcaaaagaatctgccactttgcagccatttttcacgttgcagttggatatccagtcagacaagatacgcacagtccaggatgcactggagagcttggtggcaagagaatctgtccaaggttataccacaaaaaccaaacaagaggttgagataagtcgaagagtgactctggaaaaactccctcctgtcctcgtgctgcacctgaaacgattcgtttatgagaagactggtgggtgccagaagcttatcaaaaatattgaatatcctgtggacttggaaattagtaaagaactgctttctccaggggttaaaaataagaattttaaatgccaccgaacctatcggctctttgcagtggtctaccatcacggcaacagtgcgacgggcggccattacactacagacgtcttccagatcggtctgaatggctggctgcgcatcgatgaccagacagtcaaggtgatcaaccagtaccaggtggtgaaaccaactgctgaacgcacagcctacctcctgtattaccgccgagtggacctgctgtaaaccctgtgtgcgctgtgtgtgcgcccagtgcccgcttcgtaggacaccacctcacactcacttcccgcctctctttagtggctctttagagagaaactctttctccctttgcaaaaatgggctagaatgaaaaggagatgccttggggttcgtgcacaacacagcttctgttgactctaacttccaaatcaaaatcatttggttgaaacagactgttgcttgattttagaaaatacacaaaaacccatatttctgaaataatgctgattcctgagataagaaagtggatttgatccccagtctcattgcttagtagaataaatcctgcaccagcaacaacacttgtaaatttgtgaaaatgaattttatctttccttaaaaaagaaattttttaatccatcacacttttcttccctaccctttagtttttgataaatgataaaaatgagccagttatcaaagaagaactagttcttacttcaaaaaaaaaaaaaaaaaa

SEQ ID NO: 627 - DNA, 5388 bp, human
ggcggaggtcggcggtcgggtccgtctctgcccgcggctgtggcggcgccggcggatccagccttagcggttcctctctgggcggcggcggcggcggctcggttgacgcctcctccgccagctgagcccgcgggagcccaggacgccgcttccccgcccatccccgctccccgaggccggccgcctggtcatggcgcagccgggcccggcttcccagcctgacgtttctcttcagcaacgggtagcagaattggaaaaaattaatgcagaatttttacgtgcacaacagcagcttgaacaagaatttaatcaaaagagagcaaaatttaaggagttatatttggctaaagaggaggatctgaagaggcaaaatgcagtattacaagctgcacaagatgatttgggacaccttcgaacccagctgtgggaagctcaagcagagatggagaatattaaggcgattgccacagtctctgagaacaccaagcaagaagctatagatgaagtgaaaagacagtggagagaagaagttgcttcacttcaggctgttatgaaagaaacagttcgtgactatgagcaccagttccaccttaggctggagcaggagcgaacacagtgggcacagtatagagaatccgcagagagggaaatagctgatttaagaagaaggctgtctgaaggtcaagaggaggaaaatttagaaaatgaaatgaaaaaggcccaagaggatgctgagaaacttcggtccgttgtgatgccaatggaaaaggaaattgcagctttgaaggataaactgacagaggctgaagacaaaattaaagagctggaggcctcaaaggttaaagaactgaatcattatctggaagctgagaaatcttgtaggactgatctagagatgtatgtagctgttttgaatactcagaaatctgttctacaggaagatgctgagaaactgcggaaagaattgcatgaagtttgccatctcttggagcaagagcgacaacaacacaaccagttaaaacatacgtggcagaaggccaatgaccagtttctggaatctcagcgtttactgatgagagacatgcagcgaatggagattgtgctaacttcagaacagctccgacaagttgaagaactgaagaagaaagatcaggaggatgatgaacaacaaagactcaataagagaaaggatcacaaaaaagcagatgttgaggaagaaataaaaataccagtagtgtgtgctttaactcaagaagaatcttcagcccagttatcaaatgaagaggagcatttagacagcacccgtggctcagttcattccttagatgcaggcttgctgttgccatctggagatcctttcagtaaatcggacaatgacatgtttaaagatggactcaggagagcacagtctacagacagcttgggaacctcgggctcattgcaatccaaagctttaggctataactacaaagcaaaatctgctggaaacctggacgagtcagattttggaccactggtaggagcagattcagtgtctgagaactttgatactgcatcccttgggtcactccagatgccaagtgggtttatgttaaccaaagatcaggaaagagcaatcaaggcgatgacaccagaacaagaagagacagcgtccctcctctccagcgttacccagggcatggagagtgcctatgtgtcccctagtggttatcgtttagttagtgaaacagaatggaatctcttgcagaaagaggtacataatgctggaaataaacttggtagacgttgtgatatgtgttccaattacgaaaaacagttacaaggaattcagattcaggaggctgaaacgagagaccaggtgaaaaaactacagctgatgctaaggcaagctaatgaccagttagagaagacaatgaaagataagcaggagctggaagacttcataaagcaaagcagcgaagattcgagtcaccagatctctgcactcgtcctaagagcccaggcctccgagatcttacttgaagagttacagcaggggctttcccaggcaaagagggatgttcaggaacagatggcggtgctgatgcagtcacgggaacaggtttcagaagagctggtgaggttacagaaagataatgacagtctccagggaaagcacagcctgcatgtgtcattacagcaagcagaagacttcatcctcccagacactacagaggcactgcgggagttggtattaaaataccgcgaggacatcattaatgtgcggacagcagcagaccacgtagaagaaaagctgaaggctgagatacttttcctaaaagagcagatccaagcagaacagtgtttaaaagaaaatcttgaagaaactctgcaactagaaatagaaaactgcaaggaggaaatagcttctatttctagcctaaaagctgaattagaaagaataaaagtggaaaaaggacagttggagtccacattaagagagaagtctcaacagcttgagagtcttcaggaaataaagatcagtttggaagagcagttaaagaaagagactgctgctaaggctaccgttgaacagctaatgtttgaagagaagaacaaagctcagagattacagacagaattagatgtcagtgagcaagtccagagagattttgtaaagctttcacagacccttcaggtgcagttagagcggatccggcaagctgactccttggagagaatccgggcaattctgaatgatactaaactgacagacattaaccagcttcctgagacatgacaccctcatggcaggattctagcctgcactttgggtttttaactcatctttagagcaacagtaattattatttaactcttaactgaagaaagagaagtcacaacaaaaggaagactggagaaatgcttacttctagagggagaagactgtgcggcacaggaaacagcaaacagcggggtgatctgcagcccagagaccttcaaatgcgaacactataaactccaggcttgattccaacaggcgtgggatcagatttggtgatggaaaaagcgctgtttccttgcctgctttctccaagacagattttcggaacacatttccctaccctaaagcgacatcccagtagtgtttggaattttctgttcatagatattggaagagagaatttgctttatctgttgtctagagctcatcagtaacagtattcagttagcagacagaagtgtagtatgctgtatgaatattttatattaaaatatgaaggtttgagagcaggccattggctactgactgtatttcccttgctcagtacatttttgttttccttttaccattttatcttgctttggaggaccttaaatgctactgaaacttacctgagaaccataggactgtggcaaacaaaaccaattcatgaagtgaattaatgatgaggatctgaaaacttggctggggctatatatactggaagttgaaggttaaaggaaaagcacaagaaactttggaagcactttttctgcatacttagatgatcttcatgggcccacaggtaccaggataaagccgaactggtaccatctactcttttgaagtgttttagtctagttattggatcagtgaaaaacattagtatacgtttttaaataggctaatttttcaacttggatcattaggcttacgtactacttgtttcaaatgtgtcaaatacaaaaatggtaactaggttgacagatactttgtatttttcttttgaattcagacctggaatgtaagtaagtgacaatgcttatggaaagccagttagttagaattggaaatctgtcttgtcattttacaagcattagattcctttcctgtgtgaagaaagcctcagtgaaacaggtctttgccataactttatgaagtgctacagaaagcacaaagaattgattcatgttcatcaatacctgctgagagtactgtcccaggaatatccagtggatggattcatcatccaggaggttcaaaagtaagatggttttcaaatcatttttgagactggttgcataacagcagggtacctgaaagagccttctgggagttagtgaactaggtagattgttttgttcacataacgccaccatcaacttaaagtgaattgtctttgttataaatgaggtcactatggacttaccctaaagatcttctgtacttctgtcttccataggacaaatgataagtactacatacctcatctcttgggttattattgtagtcttgcattcatgattatgaatttaaaaataaataccaattatggaaatagtactaaaggcttgccgcgcatgaaacattaattggtttaaagtccctttataaagagtgctacatggtttagataaaggaaacatataactattgagttacaggggattttattaattttaaaatgcaatcaatttaaattatgtaggtttaagactagtcccttggataagccccaagcgaatttgtcttcagattattaaaattagtgctgtaaatcagggtgggcaattcacagcctttctgaactgactgaactagagcttgcagtgaagtgttctgctgagactgagcaccttacagatatttttctccagaagatggtgctgggtaataaaatcatcacaattagggaatggttagtggtctctactgtggcaaatgccaactgttggaattcactttattgtagaaaaacccaaactgagactcttaagttttgtttagcaatgtgtttctggtatgaaacaaactactgtgtcactgtccaggtaggaaacaattctttcaactgggttttcagcataaatgggaactgatgtagaaggcaggatttagcccttctaggcaaaagaaaagctcagttgggtttcacgagtgttcctgtgcttatattcagtctgtgcctacatgttctcatgcatgtctaacctgatttacctcttacctgtaacctaccttatcatgtggcttttaattggcagtcactcgccatttctaagcagatatagtactacctttcagaactcacattggcaagtgtaaaaagatgacttaaggtgaagtgaggacaaaatcacattctgcatactaacctatttttttctccctttaaggtgctaaacttgcacctcatgtccactcagtaacaagtattgggacgtagagcacagcctcactcagctctgaaaggtaatacagcctgtgaggaagtgagccagcagtggcctttgcaattgtggatcttaagctctgctctcagcagatttcaggtgtaaccatttgttaactgtactgaaggtgtgtcctcaagaagaaagtgttcaaattaaaaaagctgctgccaagtaaaaaaaaaaaaaaaa

SEQ ID NO: 628 - DNA, 825 bp, human
ccagcaggcatgcctccttggtctcatgttgaccttagagtttgggattctggaattcgatccttcatggataggcagctggacacagaggtcgtgggtgagctggaggagcaggcccggatgtgagctgttctccatagtggtgttcggctccatcgtgaacgagggctacctcaacagcgcctccgagggggaggagttctgcatctacaaccgcaaccccaacgcctgcagctatggcgtggccgtgggcgtgctcgccttcctcacctgcctgctgtacctggccctggacgtgtacttcccgcagatcagcagcgtcaaggaccgcaagaaagccgtcctgtccgacatcggtgtctcggccttctgggctttcctctggttcgtgggattctgctacctggccaaccagtggcaggtctccaagcccaaggacaacccactgaacgaagggacggacgcagcccgggccgccatcgccttctcctttttctccatcttcacctggagcctgaccgcagccctggccgtgcggagattcaaggacctaagcttccaggaggagtacagcacactgttccctgcctcggcacagccgtaggcctccccggcttgcagaggccggcagccctgtatcacccctggcagtgaggtggcaggagcagcctagtgccagaaatgtccaagatgccagggcatgcagggcagtggaaggctggcttgaggaaccaattcaggttctccactgactcattcattccttcaccgcctccttcattgattcttcatgcgttcattcattcagtaaacatttattgagca

SEQ ID NO: 629 - DNA, 4136 bp, human
gaggagaagtggcgtcgagtccggccgggcagtagaggaaattgcggtagtgaccctcgggcctcgccatgaagagccgctttagcaccattgacctccgcgccgtactcgcggagctgaatgctagcttgctaggaatgagagtaaacaatgtttatgatgtggataataagacataccttattcgtcttcaaaaaccggactttaaagctacacttttacttgaatctggcatacgaattcatacaacagaatttgagtggcctaagaatatgatgccgtctagttttgccatgaagtgccgaaaacatttgaagagtcggagattagtcagtgcaaaacagcttggtgtggatagaattgtagattttcaatttggaagtgatgaagctgcttaccatttaatcattgagctctatgatagggggaacattgttcttacagattatgagtacgtaattttaaatattctaaggtttcgaactgatgaggcagatgatgttaaatttgctgttcgtgaacgctatccacttgatcatgctagagctgctgaacctttgcttactttggaaaggttgactgaaatagtagccagcgcacctaagggtgaactactgaagagggtgcttaacccattacttccctatggaccagctctcattgaacactgtcttttagaaaatggattctcgggtaatgtcaaagtggatgaaaaacttgaaactaaagatattgaaaaagtacttgtttctctgcagaaagcagaagactatatgaaaacaacatccaacttcagtgggaagggatatatcattcagaaaagagaaataaaaccatgcttggaagcagataaaccagttgaagacatactgacgtatgaggaatttcatcctttcttgttttctcaacattcacaatgtccatatatagaatttgaatcatttgacaaggcggtggatgaattttattccaagatagaaggccagaaaattgacttaaaagctttacaacaggaaaagcaagcattgaagaaattagataatgttcgaaaggatcacgaaaacagattggaagctcttcagcaggctcaggaaatagacaaactgaaaggagagctcatagaaatgaacctacaaatagttgacagagccattcaggtagttcgaagtgctttagctaaccagatagattggacagaaattgggttaattgtgaaagaagcccaggctcaaggagaccctgttgcaagtgcaatcaaagaattaaaactacaaacaaaccatgttacaatgctgctaagaaatccatacttgttatcagaggaggaagatgatgatgttgatggtgacgtcaatgttgagaaaaatgaaactgaaccaccaaaaggaaaaaagaaaaaacaaaagaataaacagctgcagaagcctcagaaaaataagcccttacttgtagatgttgatctcagcttgtcagcatatgccaatgccaaaaagtattatgatcacaagagatatgctgctaagaaaacacaaaagactgttgaagctgctgagaaggcattcaagtcagcagaaaagaaaacaaagcaaacattaaaagaagttcagactgttacctctattcaaaaagcaagaaaagtatattggtttgagaaatttctgtggttcattagctcagagaactatctaattataggtggacgagatcagcaacagaatgaaataattgtgaaaagatacttgacaccaggagacatttatgtacatgctgatcttcatggagctactagctgtgtaattaagaatccaacaggagaacccatccccccacggaccttgactgaagctggcacaatggcactttgctacagtgctgcttgggatgcacgagttatcactagtgcttggtgggtgtaccatcatcaggtatctaaaacagcaccaactggagaatatttgacaacaggaagcttcatgataagaggaaaaaagaattttcttcctccctcatatctaatgatggggtttagcttcctttttaaggtagatgagtcttgtgtttggagacatcagggtgaacgaaaagtcagagtacaggatgaagacatggagacactggcaagttgtacaagtgaactcatatcagaagaaatggaacaattagatggaggtgacacgagcagtgatgaggataaagaagaacatgaaactcctgtggaagtagaactcatgactcaggttgaccaagaggatatcactcttcagagtggcagagatgaactaaatgaggagctcattcaggaagaaagctctgaagacgaaggagaatatgaagaggttagaaaagatcaggattctgttggtgaaatgaaggatgaaggggaagagacattaaattatcctgatactaccattgacttgtctcaccttcaaccccaaaggtccatccagaaattggcttcaaaagaggaatcttctaattctagtgacagtaaatcacagagccggagacatttgtcagccaaggaaagaagggaaatgaaaaagaaaaaacttccaagtgactcaggagatttagaagcgttagagggaaaggataaagaaaaagaaagtactgtacacattgaaactcatcagaacacaagcaaaaatgttgcggctgtgcagccaatgaaacgaggacaaaagagtaaaatgaaaaaaatgaaagaaaaatacaaagaccaggatgaagaagaccgtgaacttatcatgaagttgctggggtctgcaggttcaaacaaagaagaaaaagggaagaaggggaagaaaggaaaaacaaaggacgaacctgtgaagaaacagccccagaaacctagaggtggacagagggtctctgacaacattaagaaagaaactccgttccttgaggttataactcatgagttacaagactttgctgtagatgatccacatgatgacaaggaagagcaagatctggatcaacagggaaatgaggaaaacctatttgattctttgacaggccagccacatcctgaagatgtactactgtttgccattccaatatgtgccccttacaccaccatgacaaactacaaatataaagtgaaacttactcctggagtgcagaaaaagggaaaagctgcaaaaacagccttgaatagtttcatgcattccaaagaagcaacagcaagagaaaaagacttattccgcagcgtaaaggacacagatttatcaagaaacattcctggcaaagtgaaagtgtctgcacccaatcttctgaacgtaaaaaggaaatagctgaaatgaaattctaaaatatttgagaagagccaattttatagccttttggaagttcaaagatgaaagcaccatgtatcaggatttccgcattataaaaatgaactaaacattgccttgctatattcaccaaaaggacttacttcttgttttttcccagttttatatagaggaaacactgtctatgataggatttccaaaagtatttgtggacagttaaatgctaattaatatacatctgtagttattctacattttcttgaaatttgggaggttaataccaagtattcatttcatgatgtaaagaaactgaacagtgaagtggcttgattgcttaaactattgacttggtaagtctactgtatataacatctaatatatatattacaggccaaatgaactaaacattgccttgctatattcaccaaaaggacttaattcttgtttttttcccagttttatatagaggaaacactatgataggatttcctaaagtatttgtggacagttaaatgctaattatatacatctgtagttattctacattttcttgaaatttgagaggttaataccaagtattcatttcatgatgtaaagaaactgaacagtgaagtggcttgattgcttaaactattgacttggtaagtctactgtatataacatctaatatatatatattataggccagctacaaggggtttaaatatttaggattgtgtcttgaaaactaagtattggagtggattttcttctgctttcattgatacttgtcagaaaaaaatattagaccaaaatgtaaaatataagtaataattctcatgaaaaaaaaaaaaaaaa

SEQ ID NO: 630 - DNA, 3686 bp, human
ctgggttgtgtcgccgcggtaggcgctgcgctctgagcgcagcgcaggccccgtaccgaccgcccgcccgccctctgtccgcgatggaggtgccggccgcgggtcgcgttcctgccgagggcgccccgacggcggctgtggccgaggtgcgctgcccggggcccgcgccgctgcgcctgctggagtggagggtggcggcgggcgcggccgtgcgcatcggctcggtgctggccgtgttcgaggccgccgcctccgcgcagtccgccggggcctctcagtcccgtgtagcctccgggggctgcgtgcgccccgcgcggccggaacgcaggctgaggtcggagcgcgcgggcgtggtgcgggagctgtgcgcgcagccgggccaggtggtcgccccaggagcggttctggtgaggttggaaggatgcagccacccggttgtcatgaaaggcctgtgtgctgaatgtggccaagacctcacccagttgcagagtaagaacgggaagcagcaggtgccgctgtccacggcgaccgtgtccatggtgcacagcgtgccggagttgatggtgagctccgagcaagctgaacagctgggaagagaagaccagcagcgactgcaccgaaaccggaagctggtgctcatggtggacttggaccagacgttgattcacacaaccgagcagcactgtcagcagatgtcgaataaaggcatctttcacttccagctgggccggggtgagcccatgctgcacacgcgcctgcgtccacactgcaaggacttcctggagaagatcgccaagctgtacgagctgcacgtcttcaccttcggcagccggctgtacgcacacaccatcgcaggctttttagaccccgagaagaagcttttttctcaccgaatattatcaagggatgaatgtattgacccattttctaaaacgggaaaccttagaaatctctttccttgtggagactccatggtttgcattattgatgatcgaaaagatgtctggaagtttgcccccaatctgataactgtgaagaaatatgtatacttccagggcacgggtgatatgaatgcgccccctgggtcccgagaatctcagacgagaaagaaagtaaatcattctcgaggcactgaggtctcagagccatctccgcccgtgagagaccctgagggggtaacgcaggcccctggagtggagcccagcaatggcctggagaagcctgcacgggagctgaacggcagcgaggccgccaccccgcgggactcaccccgccccgggaagccagacgagagggacatctggccccctgcccaggcccccaccagcagccaagagctggcaggcgctcctgagccccagggatcctgtgcgcagggtggccgggtggcaccgggacagcggcctgcccagggtgccacgggcactgacctggactttgacttatccagcgacagcgagagcagcagtgagtccgagggcacgaagtcctcctcctccgcctctgatggcgaaagcgaggggaaaagaggccggcagaagccgaaggctgccccagagggagccggggcgctggcacagggcagttccctggagccggggcggcctgcagcaccgagtctccccggagaggccgagcctggcgcgcatgccccggacaaggagcctgagctgggtgggcaggaggagggcgagcgggatggcctctgcggcctgggcaacggctgtgccgacaggaaggaggcggagaccgagtcacagaacagcgagctgtcgggggtcactgcgggtgagtccctggaccagagcatggaggaggaggaggaggaggacacggatgaggatgaccacctcatctacctggaggagatcctggtccgtgtacacactgactactatgccaagtatgaccgctacctcaacaaggagatcgaggaggcgccggacatccgcaagatcgtgccggagctcaagagcaaggtgctggcagacgtggccataattttcagtgggctacacccgacaaacttcccgatagagaagacgcgggagcattaccacgccacggcgctgggagcgaagatcctcactcggctggtgctgagccccgacgcccctgacagggccacgcacctgatcgccgcgcgagctggcacagagaaggtgctgcaggcacaggagtgcggacacctgcacgtggtcaaccctgactggctgtggagctgcctggagcgctgggacaaggtggaggagcagctcttcccgctcagggacgatcacaccaaggcacagagggagaacagccctgcggcctttcccgaccgggagggtgtgccccccaccgccttgttccacccgatgccggttcttcccaaggcccagcctggccccgaggttcggatctacgactccaacacggggaagctcatcaggacgggcgcccgggggcccccagcaccctccagctccctacccatccgccaggagccctcttccttcagagcggttccgccaccccagccgcagatgtttggtgaagagctgcctgacgctcaggacggagagcagcctggcccttctagaagaaagcgacagcccagtatgtctgagacaatgccgctgtacactctttgtaaggaggatttagagagtatggacaaagaggtggacgacatccttggagaaggcagcgacgacagcgacagcgagaagaggaggcctgaggagcaggaggaggagccccagccccggaagccagggacccgcaggggagcggacgctcgggcacctgcgtccagcgagaggagcgcggcagggggccgggggcccagaggccacaagaggaagctgaatgaagaggacgccgccagcgagtccagcagggagtccagcaacgaggacgagggcagcagctccgaggccgacgagatggccaaggcgctggaggcggagctcaacgacctcatgtgagcgcgggcagcgggcagggactgaagcctgaccgacctccagcagcactcggacgtccccggaccagccctcagtctcggtccacgctgctttcttcccaaaggacatgtatatttgcagagctccacatacagaaacacattattttgcagaaataggtgtttttaagaagttttactacaggaatgtctacttttgtaagtgacaggtgttaaaggcccaggtgtgctgtgccaaagagctcagcagaggctcacgtggcccaggctggtgcgccccgctgtctcggtaaggggcgggttggtgtgtttccccttgtgtaccagagcacattccttaggggacggctttgggggtcccacgagacatggactaggagtttaagcaggacagtgtgcgtgcacgagctccgagcccagcacagacatgcctggaacccccgccgcctgctgctccctcctagggaacccatttccggggaacgccgtgactgtcgggcagcctggagcttcctgcagcctcctacgcagggtccacgccacgtggcctgggctgccatcctgccgtcctcccactggcatcctggcaagggggcgttgcttttcctgggcggccttttatgtcttggagacacctgatgtaaagtttctgtaaatctatttcatatctgacccaccaaacagatttctctttaataaaaatcctttttgtaagttc

SEQ ID NO: 631 - DNA, 1026 bp, human
gagagctggctgcgccgagccccctgcgcgctgcacatggggcgcctgacggaagcggcggcagcgggcagcggctctcgggctgcaggctgggcagggtcccctcccacgctcctgccgctgtctcccacgtcccccaggtgcgcggccaccatggcgtccagcgacgaggacggcaccaacggcggcgcctcggaggccggcgaggaccgggaggctcccggcaagcggaggcgcctggggttcttggccaccgcctggctcaccttctacgacatcgccatgaccgcggggtggttggttctagctattgccatggtacgtttttatatggaaaaaggaacacacagaggtttatataaaagtattcagaagacacttaaatttttccagacatttgccttgcttgagatagttcactgtttaattggaattgtacctacttctgtgattgtgactggggtccaagtgagttcaagaatctttatggtgtggctcattactcacagtataaaaccaatccagaatgaagagagtgtggtgctttttctggtcgcgtggactgtgacagagatcactcgctattccttctacacattcagccttcttgaccacttgccatacttcattaaatgggccagatataatttttttatcatcttatatcctgttggagttgctggtgaacttcttacaatatacgctgccttgccgcatgtgaagaaaacaggaatgttttcaataagacttcctaacaaatacaatgtctcttttgactactattattttcttcttataaccatggcatcatatatacctttgtttccacaactctattttcatatgttacgtcaaagaagaaaggtgcttcatggagaggtgattgtagaaaaggatgattaaatgatctctgcaaacaaggtgctttttccagaataaccaagattacctgagtccaagttttaataacaagaataaacaactttgtgaaatatcaaaaaaaaaaaaaaaaaaaaaaaaaaaaaa

SEQ ID NO: 632 - DNA, 5535 bp, human
gaaccatttgaatgagaggaggggatcacgggtagagtgggctccaggaggtagggcgagcagggtgtgacgggggccagactcttgagccagtacatatccagccatactcatggaccccagtgatttccccagtccatttgacccattgaccctgccagagaagcccctggctggagacctaccagtagacatggaatttggagaggatctactggaatcccagactgccccaactcgaggatgggccccccctggcccttctccatcctcgggagccctggacctgcttgatacccctgctggcctggaaaaagaccctggagtcctggatggagccactgagttgctggggctgggggggctgctctataaagccccctctcccccggaggtggaccacggtcctgagggaaccctggcatgggatgcaggagatcagaccctagagcctggaccagggggccagacccctgaggtggtaccacctgatccaggggctggggcaaattcctgttcacctgaggggctactagagcctttggctccagattctccaataacactgcagtccccacatattgaagaggaggagaccacctccatagctactgcaagaaggggctcccctgggcaggaggaggagcttccccaagggcagccacagagcccaaatgccccgcctagcccttcagtgggagagactctgggggatggaatcaacagttctcagaccaaacctgggggctctagcccccctgcacatccttccttgccaggagatggcctgactgcgaaggcgagtgagaagccgcctgaacggaagagaagcgagcgcgttaggagagcagaacctccaaaacctgaggttgtagattccactgagagcattccagtgtcagatgaggattctgatgccatggtagatgaccccaatgatgaggactttgtgccattccggccccggcgctctcctcgcatgtccctacgctcaagtgtgtcacaaagggccgggcgctctgcagtgggcaccaagatgacttgtgcacattgccggacaccactgcagaaggggcagactgcctatcagcgcaaggggctgcctcagctcttctgctcgtcatcctgcctcaccactttctccaagaagccctcgggcaaaaagacctgtaccttctgcaagaaggagatctggaacaccaaggactcggttgtggcgcagactggttctggaggctccttccatgagttctgcacatccgtctgtctctccctgtatgaggcccagcagcagcgcccgatcccccagtctggggatcccgccgacgctactcgctgcagcatatgccagaagactggagaggtcctgcacgaggtcagcaatggcagcgtggtacaccggctctgcagcgattcttgcttctccaaattccgggccaacaagggactgaaaaccaactgttgtgaccagtgtggggcttacatctacaccaagaccgggagtcctggccctgagctcctcttccacgagggccaacaaaagcggttctgcaacacaacctgcttgggggcgtacaagaagaaaaacacacgtgtgtacccatgtgtctggtgcaagaccctgtgtaagaactttgagatgctatcacatgtggatcgtaatggcaagaccagcttgttctgttccctgtgctgtaccacttcttacaaagtgaagcaggcagggctcactggccctccccgaccctgcagcttctgccgccgcagcctctctgacccctgttactacaacaaggttgaccgcacagtctaccagttctgcagccccagctgctggaccaagttccagcgcacaagccctgaggggggcattcacctgagctgtcactactgtcacagcctcttcagtggcaagcctgaggtcttggactggcaggaccaagtgttccagttctgctgccgtgattgctgtgaggacttcaagcggcttcggggtgtggtgtcccagtgtgagcactgtcggcaggagaaactcttgcatgagaaactccgattcagcggagtggagaaaagcttctgcagcgaaggctgtgtgctgctgtacaaacaggacttcactaagaagctgggcttgtgctgtatcacttgtacttactgctcccagacctgccagcgcggagtcaccgagcaactggatggcagcacctgggacttctgcagtgaggactgtaagagcaagtacctgctgtggtactgcaaggctgcccggtgccatgcgtgtaagcgccaggggaagctgctggagaccatccactggcgtgggcagatccgtcatttctgcaaccagcagtgtcttctgcgtttctatagccagcagaaccaacccaacctggatacccagagtgggcccgagagcctcctgaacagtcagtctcctgagtcaaaaccccagacaccctctcaaaccaaagtggagaacagcaacacagtgaggaccccagaggaaaatgggaatttgggcaagatccctgtgaagacccgatcagctcccactgctcccacccctccacccccaccacccccagcaacaccccgcaaaaacaaggctgccatgtgtaagccactgatgcagaatcggggcgtctcctgcaaggtggagatgaagtccaaaggaagtcaaacagaagagtggaagccacaggtgatcgtgctgcccatcccagtgcccatcttcgtgccagtgcctatgcatctgtactgccagaaagtcccggtgcctttctcgatgcctatcccggtgcctgtgcccatgttcttgcccactaccttggagagcacagacaagattgtagagaccattgaggagctgaaggtgaagatcccttccaaccccttggaggccgacatcctggctatggcagaaatgattgcagaggctgaggagttagacaaggcctcatctgacctttgtgatcttgtgagcaaccagagtgcagagggactcctggaagactgtgacctgtttgggcctgctcgagatgatgtcctggccatggcagtcaagatggccaatgtcttggatgagcctgggcaagacttggaggcagacttccctaagaatcctctggacattaatcccagtgtagacttcctctttgattgtggcctggtagggcctgaggatgtgtctactgaacaagaccttccccgaaccatgaggaagggtcaaaagcggctggtgctttccgaaagctgctcccgggactccatgagcagtcagcctagttgtaccgggctcaactattcatatggtgtcaatgcttggaagtgctgggtgcagtcaaaatatgccaatggagaaaccagcaagggtgatgagctgcgctttggccccaaacccatgcgtatcaaagaggatattctcgcctgctcagctgctgagctcaactacggtctggcccagtttgtgagagaaatcactcggcccaatggtgaacgatatgaacctgacagtatctactatttgtgtcttggcatccagcagtacttgctggaaaataaccggatggtgaacattttcacggacctttactacctgacttttgttcaagaactcaacaagtctctgagtacctggcagcccacactcctccccaacaatacggtgttctctcgagtggaggaggagcacctctgggagtgtaagcaactgggggtctactcgccctttgtcctcctcaacaccctcatgttcttcaacactaagttttttgggctgcagacagctgaggaacacatgcaactctccttcaccaatgtggtgcggcagtcccgcaagtgtaccacccctcggggcaccaccaaggtggtgagcatccgctactatgccccagtccgccagaggaaagggcgagacacgggtcctggaaaacggaagagagaagatgaagcccctatcttagagcagcgtgagaaccgcatgaatcccctccgctgccctgtcaagttctatgaattctatctctcaaaatgtcctgaaagcctccggactcgcaacgatgtgttctacctgcaacctgaacggtcctgcatcgccgagtcacctctctggtattctgtgatccccatggaccgcagcatgttggagagcatgctcaatcgcatcctggctgtgcgcgagatttatgaggaactgggtcgtcctggggaggaagacctggactgagctcgtgtgccatccatatccatctttcacatcaatgtctgtcctgtggccatgtccctcagggtgacaggcccaggaaccaatgctactcattctgaagggccctgactgctcctttccgctcacccattccctgccttctctaggaaccctggcttttatcttcttccgtaccacttgacaaccatggggccctggtcttctgtactcaggggctggtctcccagtgatgggcaaaagccagcttgcccgttttctttatgcttcagagtaaacccctccttctgggtccagactctgggtggagtgttaatagctctggtgatcctgttggctttgggtttcctgacccatcccgcataggtagagcctcttgttcctaggcatgacctagggaaaaacccagctgccttctctgccctgtgcccactcccttctctactcttccccagcaccatgccaaaaggtcttatctgaaaggtaagaaataaacaatgaaagcgatgaggggaccatttacataaaacacagagcttagacactcttcccctcctatgaaataattggttgttggcaccatctcaccaccgcatatccctcaccccctcggcaagcaccaatccttggtgctgccgtttttaaaatcttccaaatgcctttttttcctcagaggcagagaatgactaagtacggggagcagactcctgttgtgcagactcctgtccccttggtttctgtgtttgtctctctgccatcttaggttgccatgagccatggtgtcaacatgcttagccccctctgtaactgcctccctttagttcaatggacagacctcccaaggcaaaaactaccttctgacttgggttgaggctgggttcccctctattgttcccctatcataagagctaggccaagcctatgggaccttgagtcatgcaggatgggatctgtggtcaaaggacaggcgaggagctgtgggcgcagggcctgccgccactgcctacatcttctctcttccccatcttgcattggaggtcccagaaaacaattagcttctggcaaagggggtacccacttctttccctgttgactttgctgtttcccaggctcctttttgtgtttttataactgtcaccagttagccactgtttaaattgtatatattgttctgaggcgcctggcctgtcccttcagtgagccatgcccacccttgtgttgtagtgagaagctgttgtcacgactaaccttctgtctctgaaattgtttgtttcaaataaagagttaaaattgtcaaaaaaaaaaaaaaaaaa

SEQ ID NO: 633 - DNA, 3608 bp, human
gcggccgcttccccccggccgggcccccgccgccccgcggtccccagagcgccaggcccccggggggagggagggagggcgccgggccggtgggagccagcggcgcgcggtgggacccacggagccccgcgacccgccgagcctggagccgggccgggtcggggaagccggctccagcccggagcgaacttcgcagcccgtcggggggcggcggggagggggcccggagccggaggagggggcggccgcgggcacccccgcctgtgccccggcgtccccgggcaccatgctgtccaactcccagggccagagcccgccggtgccgttccccgccccggccccgccgccgcagccccccacccctgccctgccgcaccccccggcgcagccgccgccgccgcccccgcagcagttcccgcagttccacgtcaagtccggcctgcagatcaagaagaacgccatcatcgatgactacaaggtcaccagccaggtcctggggctgggcatcaacggcaaagttttgcagatcttcaacaagaggacccaggagaaattcgccctcaaaatgcttcaggactgccccaaggcccgcagggaggtggagctgcactggcgggcctcccagtgcccgcacatcgtacggatcgtggatgtgtacgagaatctgtacgcagggaggaagtgcctgctgattgtcatggaatgtttggacggtggagaactctttagccgaatccaggatcgaggagaccaggcattcacagaaagagaagcatccgaaatcatgaagagcatcggtgaggccatccagtatctgcattcaatcaacattgcccatcgggatgtcaagcctgagaatctcttatacacctccaaaaggcccaacgccatcctgaaactcactgactttggctttgccaaggaaaccaccagccacaactctttgaccactccttgttatacaccgtactatgtggctccagaagtgctgggtccagagaagtatgacaagtcctgtgacatgtggtccctgggtgtcatcatgtacatcctgctgtgtgggtatccccccttctactccaaccacggccttgccatctctccgggcatgaagactcgcatccgaatgggccagtatgaatttcccaacccagaatggtcagaagtatcagaggaagtgaagatgctcattcggaatctgctgaaaacagagcccacccagagaatgaccatcaccgagtttatgaaccacccttggatcatgcaatcaacaaaggtccctcaaaccccactgcacaccagccgggtcctgaaggaggacaaggagcggtgggaggatgtcaaggggtgtcttcatgacaagaacagcgaccaggccacttggctgaccaggttgtgagcagaggattctgtgttcctgtccaaactcagtgctgtttcttagaatccttttattccctgggtctctaatgggaccttaaagaccatctggtatcatcttctcattttgcagaagagaaactgaggcccagaggcggagggcagtctgctcaaggtcacgcagctggtgactggttggggcagaccggacccaggtttcctgactcctggcccaagtctcttcctcctatcctgcgggatcactggggggctctcagggaacagcagcagtgccatagccaggctctctgctgcccagcgctggggtgaggctgccgttgtcagcgtggaccactaaccagcccgtcttctctctctgctcccacccctgccgccctcaccctgcccttgttgtctctgtctctcacgtctctcttctgctgtctctcctacctgtcttctggctctctctgtacccttcctggtgctgccgtgcccccaggaggagatgaccagtgccttggccacaatgcgcgttgactacgagcagatcaagataaaaaagattgaagatgcatccaaccctctgctgctgaagaggcggaagaaagctcgggccctggaggctgcggctctggcccactgagccaccgcgccctcctgcccacgggaggacaagcaataactctctacaggaatatattttttaaacgaagagacagaactgtccacatctgcctcctctcctcctcagctgcatggagcctggaactgcatcagtgactgaattctgccttggttctggccaccccagagtgggagaggctgggaggttgggaggctgtggagagaagtgagcaaggtgctcttgaacctgtgctcattttgcaattttatcagtaatttgacttagagtttttacgaaacctcttttgttgtccttgccccactcctctccaccagacgccttcctctctggatactgcaaaggcttgtggtttgttagagggtatttgtggaaactgtcatagggattgtccctgtgttgtcccatctgccctccctgtttctccacaacagcctggggttgtccccgctggctcacgcgttctgggagctcaaggccaccttggaggaggatgccacgcacttcctctctcggagccctcagacatctccagtgtgccagacaaataggagtgagtgtatgtgtgtgtgtgtgtgtgtgtgtgtgcacacgtgtgtatgagtgcgcagatctgtgcctgggatcgtgcatttgaggggccaggggcaggcagggctgcagagggagacggccctgctggggcttaggaaccttctcccttcttgggtctgccctgcccatactgagcctgccaaagtgcctgggaagcccacccagattctgaaacaggccctctgtggcctgtctctattagctgggttccgggaggcagagaggagtgaccgggcactggcactgcgatcaggaagactggacccccagcccccagggcccccctccccccacttagtgctggtcctaggtcctctgaggcactcatctactgaatgacctctctacttccccttcttgccattattaacccatttttgtttattttccttaaatttttagccatttctccatgggccaccgcccagctcatgtaggtgagcctgggcagcttctgttggcagagcttttgcatttcctgtgtttgtcctgggttctggggcatcagccagctaccccttgtgggcaaaggcagggccacttttgaagtcttccctcagatttccattgtgtggcctggtgggtcagggggagtctttgcaccaaagatgtcctgactttgcccccttgcccatcagccatttgccatcaccccaaacaactcagcttcggggccggtgaggggaggggcctcccccagcacagatgaggagcagctggggtaggctgtctgtgccatggccccccactcccccttcccttggagggagaggtggcaggaatacttcacctttcctctccctcaggggcaggtggtggaggggcgcccagggtcgtctttgtgtatgggggaaggcgctgggtgcctgcagcgcctcccttgtctcagatggtgtgtccagcactcgattgttgtaaactgttgttttgtatgagcgaaattgtctttactaaacagatttaatagttaaaaaaaaaaaaaaaaaaa

SEQ ID NO: 634 - DNA, 1086 bp, human
atgaatgaatccaggtggactgaatggaggatcctgaacatgagcagtggcattgtgaatgcgtccgagcgtcactcctgcccacttggatttggccactacagtgtggtggatgtctgcatcttcgagacagtggttattgtgttgctgacatttctgattattgctgggaatctaacagttatctttgcctttcattgtgctccactgttacatcattatactaccagctatttcattcagacgatggcatatgctgatcttttcgttggagttagctgcttggttcctactctgtcacttctccactactccacaggtgtccacgagtcattaacttgccgggtttttggatatatcatctcagttctaaaaagtgtttctatggcatgtcttgcttgcatcagtgtggatcgttatcttgcaataaccaagcctctttcctacaatcaactggtcaccccttgtcgcttgagaatttgcattattttgatctggatctactcctgcctaattttcttgccttccttttttggctgggggaaacctggttaccatggtgacatttttgaatggtgtgccacgtcttggctcaccagtgcctattttactggctttattgtttgcttactttatgctcctgctgcctttgttgtctgcttcacctacttccacattttcaaaatttgccgtcagcacaccaaagagataaatgaccgaagagcccgattccctagtcatgaggtagattcttccagagagactggacacagccctgaccgtcgctacgccatggttttgtttaggataaccagtgtattttatatgctgtggctcccctatataatttactttcttctagaaagctcccgggtcttggacaatccaactctgtccttcttaacaacctggcttgcagtaagtaatagtttttgtaactgtgtaatatacagcctctccaacggcgttttccggctaggcctccgaagactgtttgagacaatgtgcacatcctgtatgtgtgtgaaggatcaggaagcacaagaacccaaacctaggaaacgggctaattcttgctccatttga

SEQ ID NO: 635 - DNA, 691 bp, human
ggcggaggcggggtttcagtggcttctggtgctctagggtgagctctgcccggctgcagggatggcggggaggggtaagctcatcgcagtgatcggagacgaggacacggtgactggtttcctgctgggcggcataggggagcttaacaagaaccgccatcccaatttcctggtggtggagaaggatacaaccatcaatgagatcgaagacactttccggcaatttctaaaccgggatgacattggcatcatcctcatcaaccagtacatcgcagagatggtgcggcatgccctggacgcccaccagcagtccatccccgctgtcctggagatcccctccaaggagcacccatatgacgccgccaaggactccatcctgcgcagggccaggggcatgttcactgccgaagacctgcgctaggggactcctcatagccctcagcccttccctcgtttccaggcctctccccaggcttgccatcagccttctttactttttgagcctctgatttccaattccctgctccttcccactccattaagaggctaggtgaggcgcttctaggttgctggggctctgctggttaaggaacaggaagcctgaccatctccctccactacctcttccctgtgctgttacacagtgtcattgttgatgttaaattaaagtcatattcttgcttctctccag

SEQ ID NO: 636 - DNA, 2743 bp, human
ggggggcacaggggagactaaaaaggccagggaagttggcctgccggaagttcccagggagaaggcagcgcgttgtacccgagttacctgtagtcaaccacagtctgaaaatattaaggtattttaagacagaaagagagagaggagagaaaccgcattcacaaaaaagaaatcctctttttagaacatctcttggtggtaccatcagaaatgtcttccttaagtggaaaagtccaaaccgttttgggccttgtagagccaagcaaactgggccgtaccctgacccatgaacacctggccatgacctttgactgctgttactgtccacctcccccgtgccaggaagctatttccaaagaacctatcgtgatgaaaaatttatattggattcagaaaaacgcctattcccataaagaaaaccttcaattaaatcaggagacagaagccataaaggaagaactgttgtattttaaagctaatggtggaggggctttggtggaaaacacaaccactgggattagccgagacacacagacgttgaagaggcttgcagaagagactggcgtccatatcatatctggagccgggttttatgtggatgcaactcactcctcagagaccagggccatgtcagtggagcagcttaccgatgtccttatgaatgaaattctccatggagctgatggaaccagtatcaagtgtggcattattggagaaattggttgctcctggcctttgactgagagtgaaagaaaggttctccaggccacagctcatgcccaggctcagcttggttgtcctgttattatccatcctggacggagctccagggcaccatttcagattatccgaatattgcaagaagcaggcgcagacatctccaaaacagtcatgtcacacctggataggactattcttgataagaaagagctcttggagtttgctcaacttggctgctacttggaatatgatctctttggtactgaactacttcattaccaactcggcccagatattgacatgcctgatgataacaaaagaattagaagggtgcgtctcctggtggaagagggctgtgaagatcgaattctggtagcacatgacatacatacgaaaacccggctgatgaaatatggaggtcacggctattctcatatactcaccaatgttgttcctaaaatgttgctgagaggcataactgagaatgtgcttgataagattctaatagagaaccctaagcaatggctaactttcaaataggatggttgcttatgaattcacaccttgagtataaaacttgcagagaacattcagcgatttccagtccactgtgagatattaatcagttacctaggactaatgacagatcatttccttctgatgagaactaggagggtttgccttctctgagaccagctattacaactgtgcctctagggagttactcagcctaattgagccctattattttaacttaacaaaataaatacagaagtacctatttctaaacaatgatttaaagtctatatcccctaagcggagttgttgtttttctccctaatctatcagctgcactacttgagaaaatttaaagtgtttctagttaaattatttccttcttgagcgatctaatgtttcttgtaatattgatgatcctactaattatcctgctgttctttaattaatgcttaatgaataatatggcactgtaaaatagcttctgcaacaagggaagttaaattttgagacttttttccccaaaggatactgactgtaatacaattaccaattcacaatgataaaaatattttgaaaggttaattttatactgtccacctatctatatattcttctactgaaatgattttgatatctttggctttccggtatctatttttgccatacattttgctgttttgcaaagtttgtataagaacacataacactactgaattataaaaattcaatcataaaagtcaaaatatattacataatatagtttaatgaatcattacatttataataacaaaggccacaatttaattaattggtaagatataatgcaaaaaaaaaaagagaaatgtttgccttatgtatattccctttatttcctttaccttttgtttttccttggacctaaacagagaaaataatgcttatgtatctgaagaaaaggtcagatctattggaaatgacagcccgatacttgagcctcctctttaaaaggtatccagccctgatattttgtgtaaataaaatgtttttaaaacctgttagttaaaacacttaggtgatgggcactgctgcttataaattcatcttttggttgaatcctcactatgctatttggtacctaaaaatattctccaaacccttgctgccagttcctctttgataaatatatagttaattcgaaataaaatccattgcaattcatttatgagttatcttacatatcacaaagaccaattagaattagtcattattcttgatgaagagtctgtttttaatcataaaaatcatgacagttactcagacccaggcatttcaacagagctaacaccaccttcagataggcacaccatgcataactcttgggaagttgagctttgctaaataaaagatatttctgctgatcaaagatgatcaagctttctgtgtattggaacagaaagtaacaaagaggaatgagccaggagaacaaactaattccaaaaaaaaaaaaaaaaaaaaaaaaaaaaaa

SEQ ID NO: 637 - DNA, 6371 bp, human
tagtgaatggtagtgtctagaaagggtatgtcccttcaagagagaggtgccaatgtccaaccggcctaataacaatccaggggggtcactgcgacgttcacagaggaacactgccggggcccaaccacaagacgactcaataggaggaagaagctgcagttcatcatctgctgtgatagttccacaaccagaggatccagacagagccaatacttcagaaagacaaaaaacggggcaggtgcctaagaaagacaattctcgaggagtgaagcgcagtgctagtccagactacaacaggaccaattctcctagctctgcaaaaaaaccaaaagcacttcagcatactgaatctccctcagaaacaaataagccacatagtaagtcaaagaagagacatttagaccaggagcaacaactgaaatctgcacaatcaccatcaacaagcaaggctcataccaggaagagtggggccactggcggttcacggagtcagaaaagaaaaaggacagagagttcttgtgtaaagagtggctccgggtctgaatcaactggtgcagaagagagatctgcgaaacctaccaagctggcttcaaaatcagccacctcagccaaagctgggtgtagcaccatcactgattcttcttctgctgcctctacttcctcctcgtcttctgctgtagcctcggcctcctccactgtaccaccaggtgccagagtgaaacaaggaaaagatcagaacaaggccaggcgttcccgttcagcgtccagtcccagccccagaagaagtagcagggaaaaggaacagagtaaaactggtggctcttcaaaatttgattgggctgctcgtttcagccctaaagttagccttcctaaaacaaaactgtctcttccagggtcttctaagtcagagacatcaaaacctggaccttctggattacaggccaaattagcaagtttaagaaaatctacgaagaaacgcagtgagtctccacctgctgagctccccagtttgaggcggagcacacgccaaaagaccacgggctcctgtgctagtaccagtcggcgaggctctggcctgggcaaaagaggagcagctgaagctcgtcgacaggagaaaatggcagaccctgaaagcaaccaggaggcagtaaattcttcagctgctcggacagatgaagctccccaaggagctgcaggggctgttggcatgaccacctctggggagagtgaatcagatgattccgagatgggacgtttgcaagctttgttagaggcaaggggtcttccccctcacctatttggtcctcttggtcctcggatgtcacagcttttccatagaacaattggaagtggagctagttctaaggcccagcagctactacaaggattgcaagccagtgatgaaagtcaacagcttcaggcagttattgagatgtgtcagttactggtcatgggaaatgaggagacactgggagggtttcctgtcaagagtgttgttccagctttgattacgttacttcagatggagcacaattttgatattatgaaccatgcttgtcgagccttaacatacatgatggaagcacttcctcgatcttctgctgttgtagtagatgctattcctgtctttttagaaaagctgcaagttattcagtgtattgatgtggcagagcaggccttgactgccttggagatgttgtcacggagacatagtaaagccattctacaggcgggtggtttggcagactgcttgctgtacctagaattcttcagcataaatgcccaaagaaatgcattagcaattgcagctaattgctgccagagtatcacgccagatgaatttcattttgtggcagattcactcccattgctaacccaaaggctaacacatcaggataaaaagtcagtagaaagcacttgcctttgttttgcacgcctagtggacaacttccagcatgaggagaatttactccagcaggttgcttccaaagatctgcttacaaatgttcaacagctgttggtagtgactccacccattttaagttctgggatgtttataatggtggttcgcatgttttctctgatgtgttccaactgtccaactttagctgttcaacttatgaaacaaaacattgcagaaacgcttcactttctcctgtgtggtgcctccaatggaagttgtcaggaacagattgatcttgttccacgaagccctcaagagttgtatgaactgacatctctgatttgtgaacttatgccatgtttaccaaaagaaggcatttttgcagttgataccatgttgaagaagggaaatgcacagaacacagatggtgcgatatggcagtggcgtgatgatcggggcctctggcatccatataacaggattgacagccggatcattgagcaaatcaatgaggacacgggaacagcacgtgccattcagagaaaacctaacccgttagccaatagtaacactagtggatattcagagtcaaagaaggatgatgctcgagcacagcttatgaaagaggatccggaactggctaagtcttttattaagacattatttggtgttctttatgaagtgtatagttcctcagcaggacctgcggtcagacataagtgccttagagcaattcttaggataatttattttgcggatgctgaacttctgaaggatgttctgaaaaatcatgctgtttcaagtcacattgcttccatgctgtcaagccaagacctgaagatagtagtgggagcacttcagatggcagaaattttaatgcagaagttacctgatatttttagtgtttacttcagaagagaaggtgtaatgcatcaagtaaaacacttagcagaatcagagtctttgttgacaagtccaccaaaggcatgtacgaatggatcgggatccatgggatccacaacttcagtcagcagtgggacagccacagctgccactcatgctgcagctgacttgggatcacccagcttgcagcacagcagggatgattctttagatctcagccctcaaggtcgattaagtgatgttctaaagagaaaacgactgccaaaacgagggccaagaaggccaaagtactcacctccaagagatgatgacaaagtagacaatcaagctaaaagccccaccactactcagtcacctaaatcttctttcctggcaagcttgaatccaaaaacatggggaaggttaagtacacagtccaacagcaacaacattgagccagcacggactgcgggaggtagtggccttgccagggctgcctcaaaggataccatctccaataatagagaaaaaattaaaggttggattaaggagcaggcacataaatttgtagaacgttatttcagttctgagaatatggatggaagcaaccctgcattgaatgtccttcagagactttgtgctgcaaccgaacaactcaacctccaggtggatggtggagctgagtgccttgtagaaatccgtagcatagtctcagagtcagatgtttcatcatttgaaatccaacatagtggatttgtgaagcagctgttgctttatttgacatctaaaagtgaaaaggatgctgtgagcagagagatcagattaaagcgatttcttcatgtatttttttcttctccacttcctggagaagagcccattggaagagtggaaccagtgggtaatgcacctttgttggcattagttcacaagatgaacaactgcctcagccagatggaacaatttccagtcaaagtacatgatttccctagtggaaatgggacaggaggcagcttttctctcaacagaggatcacaggctttaaaatttttcaacacacatcaattaaaatgccagttacaaaggcatccagactgtgcaaatgtgaagcagtggaagggtggacctgtcaagattgaccctctggctttggtacaagccatcgagagataccttgtagttagagggtatggaagagtaagagaagatgatgaagacagcgatgacgatggatcagatgaggaaatagatgagtctctggctgctcagttcctaaattcaggaaatgtaagacacaggctgcagttttatattggagaacatttgctgccgtataacatgactgtgtatcaggcagtacggcagtttagtatacaggctgaagatgaaagagaatccacagatgatgagagcaatcctctaggcagagctggtatttggacaaagactcatacaatatggtataaacctgtgagagaggatgaagaaagtaataaagattgtgttggtggtaaaagaggaagagcccaaacagctccaacgaaaacttcccctagaaatgcaaaaaagcatgatgagttatggcacgatggagtgtgcccatcagtatcaaatcctttagaagtttacctcattcccacaccacctgaaaatataacatttgaagacccgtcattagatgtgatccttcttttaagagttttacatgctatcagtcgatactggtattacttgtatgataatgcaatgtgcaaggaaattattccaactagtgaatttattaacagtaagttaacagcaaaagcaaataggcaacttcaagatcctttagtaatcatgacaggaaacatcccaacatggcttactgagctaggaaaaacctgcccatttttctttccttttgatacccggcaaatgcttttttatgtaactgcatttgatcgggaccgagcaatgcaaagattacttgataccaacccagaaatcaaccagtctgattctcaagatagcagagttgcacctagattggatagaaaaaaacgtactgtgaaccgagaggagctgctgaaacaggcggagtctgtgatgcaggacctcggcagctcacgggccatgttagaaatccagtatgaaaatgaggttggtacaggtcttgggcctacactggagttttatgcgcttgtatctcaggaactacagagagctgacttgggtctttggagaggtgaagaagtaactcttagcaatccaaaagggagccaagaagggaccaagtatattcaaaacctccagggcctgtttgcgcttccctttggtaggacagcaaagccagctcatatcgcaaaggttaagatgaagtttcgcttcttaggaaaattaatggccaaggctatcatggatttcagattggtggaccttccccttggcttacccttttataaatggatgctacggcaagaaacttcactgacatcacacgatttgtttgacatcgacccagttgtagccagatcagtttatcacctagaagacattgtcagacagaagaaaagacttgaacaagataaatcccagaccaaagagagtctacagtatgcattagaaaccttgactatgaatggctgctcagttgaagatctaggactggatttcactctgccagggtttcccaatatcgaactgaagaaaggagggaaggatataccagtcactatccacaatttagaggagtatctaagactggttatattctgggcactaaatgaaggcgtttctaggcaatttgattcgttcagagatggatttgaatcagtcttcccactcagtcatcttcagtacttctacccggaggaactggatcagctcctttgtggcagtaaagcagacacttgggatgcaaagacactgatggaatgctgtaggcctgatcatggttatactcatgacagtcgggctgtgaagtttttgtttgagattctcagtagttttgataatgagcagcagaggttatttctccagtttgtgactggtagcccaagattgcctgttggaggattccggagtttgaatccacctttgacaattgtccgaaagacgtttgaatcaacagaaaacccagatgacttcttgccctctgtaatgacttgtgtgaactatcttaagttgccggactattcaagcattgagataatgcgtgaaaaactgttgatagcagcaagagaagggcagcagtcgttccatctttcctgatcatagcaagaaatgcagtgtctgcctgttacagcaaaagaaacaaatcatgatttcttttctaatgttatcacctgagtcaaggaaacatgttacgccttcttgttgtaggaaaaacggcttgcagattataaagagacatttggttgatattcattaatggccccatggacttaaagtgatcaggccctaaaacgttgttgtgatgaggtttctttagcaagttcttgtttaaattatcatttatttgatgagtgaagtttttaacatgctttgctgtgtgaaatttaaaaaagggatgtttttccaggctggaacaataaatgtggctgtgcagttt

SEQ ID NO: 638 - DNA, 2040 bp, human
ggacgtggggcttttgcagctcagctggttccggctggggaagatggcggtggctggggcggtgtccggggagccgctggtgcactggtgcacccagcagttgcggaagactttcggcctggatgtcagcgaggagatcattcagtacgttttgtcaattgagagtgctgaagagatacgagaatatgttactgatctcctccagggaaatgaaggcaaaaaaggtcaattcatagaagaacttataaccaaatggcaaaagaatgatcaggagttgatttcggatcctttgcagcagtgcttcaaaaaagatgaaattttagatgggcagaaatcaggcgaccatctaaagcggggtaggaagaaagggagaaacagacaggaagttcctgcatttactgaacctgacacgactgcagaggttaaaacaccttttgatttggccaaggcacaagagaacagcaactccgtaaagaagaagacaaagtttgtcaatttatacacaagagagggacaggacaggcttgcagtcctgctccctggtcgtcacccttgtgattgcctgggccagaagcacaagctcatcaataactgtctgatctgtgggcgcattgtctgtgaacaagaaggctcaggcccttgcttattctgtggcactctggtgtgtactcatgaggaacaagatattttacagcgtgactcaaacaagagccagaaactgctaaagaaactcatgtcaggagtggagaattctggaaaggtggacatctctaccaaggaccttcttcctcatcaagaattgcgaattaagtctggtctggagaaggctatcaagcataaagacaaactgttagagtttgacagaactagtattcgaaggacccaagtcattgatgatgagtcagattactttgccagtgattctaaccaatggttgtccaaacttgagcgggaaaccttgcagaagcgagaggaggagctgagagaacttcgacacgcctctcgactttctaagaaggtcaccattgactttgcaggaaggaagatcctggaagaagaaaattcactagcagagtatcatagcagactagatgagacaatacaggccattgccaatggaaccttgaaccagccactgaccaaattggatagatcttctgaagagcctttgggagttctggtaaatcccaacatgtaccagtcccctccccagtgggttgaccacacaggtgcagcctcacagaagaaggctttccgttcttcaggatttggactagagttcaactcatttcagcaccagctgcgaatccaggatcaagaatttcaggaaggctttgatggtggctggtgcctctctgtacatcagccctgggcttctctgcttgtcagagggattaaaagggtggagggcagatcctggtacaccccccacagaggacgactttggatagcagccacagctaaaaaaccctcccctcaagaagtctcagaactccaggctacatatcgtcttcttcgtgggaaagatgtggaatttcctaatgactatccgtcaggttgtcttctgggctgtgtggacctaattgactgcttgtcccagaagcaatttaaggagcagtttccagacatcagtcaagaatctgattctccatttgttttcatctgcaaaaatcctcaggaaatggttgtgaagtttcctattaaaggaaatccaaaaatctggaaattggattccaagatccatcaaggagcaaagaaggggttaatgaagcagaataaagctgtctgacccaggagaaaaggaactatacagcatagtggagttttgtgtactaaaattgctatctactggtcctttggaattgaagtagtagaaacctaaaggcttggcgtcaggcttgaatatctcagaacttaaactcttaccaaaatctgtatatttttcttaaggagtgggattcctactttatgtaatggggtcgaaatctttgaacacattatttataaaaacctgtttaaaaattctaaaaaaaaaaaaaa

SEQ ID NO: 639 - DNA, 2863 bp, human
ggagttcgcgcgacgaccgcggggtcggcgggcggggcgaggccctggacggcggcggcagtggggctcctccttctgtttcccagaccgagagccgcgccggcaccatgtcagcttaccctaaaagctacaatccgttcgacgacgacggggaggacgaaggcgcccggccggccccttggagggacgcccgagacctccccgacgggcccgacgcgcccgcggacaggcagcagtacttgcggcaggaggtcctccgcagggctgaggccacggccgccagcaccagcaggtccctggccctcatgtacgagtccgagaaggttggggtcgcctcttccgaggagctcgcccgtcagcgaggagtcctggagcgcacagagaagatggtggacaagatggaccaagatttgaagatcagccagaaacacatcaatagcattaagagcgtgtttggggggctggtcaattacttcaaatccaaaccagtagagaccccacctgaacagaatggcaccctcacctcccagcccaacaacagattgaaagaagctataagtacaagtaaagaacaggaagcaaagtaccaggccagccacccaaaccttagaaagctggatgatacagaccctgtccccagaggggctggttctgccatgagtactgatgcttacccaaagaacccacaccttcgagcctatcaccagaagatcgacagcaacctagatgagctgtccatgggactgggtcgtctgaaggacatagccctggggatgcagacagaaattgaggagcaagatgacattcttgaccggctgacaaccaaagtggacaagttagatgtcaacataaaaagcacagaaagaaaagttcgacaactctgaagacagacggatttccactctattgtgatgaaaagatttgaaagatctttttttgaacttccaagaaatttcatttactattttagtatgtaaattaatgtgtgtttgcaaatgttataatagagtaggtcttaagacatttttgctgttataaggaagtgtttgtcccacattttcctagggttaacacctcaccaagttcttccagcaaaatgcttattagagtttttgtctgagcacagtagcctggccctgcatatcttgggcgtttgattaccatgctggaataagaagagttgcatttctcattttaatgagcatatggaaagatgggaacagaatttcagtcttgcagccatgagcctctatttctcattcctaagccttaccatgagtcagagtgttaagggggcctgtgagccagtcgtttggtggaggagggtccttcccacacctttgtttaggagtcatcattcacacacacacacacacacacacacacacacacacacacactctgagcacattatctgtgattctttcatcctcccagaaaggatcagtgttagaatgggaaatagagtgtgccatcttgctcttttgttggcagatgtccccgcttccctccagccccccatccttggcatgtatattagtaggagggcttcacaccagcactgctcactgcgactcctggaaatgtgtggggaattgggtgagcccctcttccccacgtgctcccatctgtaactctccatctgtgatttgcaacaggtcttccactggctcgaggctgcgaggctgaccgacaggggcgcccaatagagtttgtgggaatggagtattgcacagatgcagctgcacaatggtcttcctccacccctctgggaatcaccattaggcaggcctcagtagggcaaaatgtttatttggtaccgggggtctcctgacctgtctagcattcccacccactcttctgcacttcttgcaaggtaacttgaatcatcacttatttctctgccacctggttttaggactggcactctataaatgacgctgactttgtatagaaggattttgctaagggggcaaaaagcccagataccattttaactggcccagctcattttctcctttcattttacaaaagaaatcatgcagaagcatcaattaaaactgatttatttatgttggtacatccaacaaaatagttggagccacaaggcccttgtctttttaaaaaaacaaaatattttgaagatggtgaaagtgactgattttaataatgagataggtcacttaaaataacagtgcctttgaccttaaaacatggcactggcccatgtgacctttgccatttcccagtacttccctttacagtctgcagcctataaacagtggtgtctcaaagcaaaggaaacctccacaagtgctgcaacagtgcattagtttttatgtagcaatttgtttataaaaattcccatcccataatgcatgaccttcctaaaaatacccacagcctccataggcaaggtgagctttctgtgctacccactggttagattccagccacctcagggattctgatccatgtcattaacgaccatcccagggtgtgagggcctgattaaagcttatcgaactagacatttgtttattagatgagctcggcattattattttctcaataactggtagaagggaaattttaaacataacactcaacccaaacaaaactacttcgtgaggctttcagcaaaaaggctgcttaaaagcatgaacccgggatgcagagcagcttttgtgcacggttccacttactgtaattgtttctggttctttcctctaacaccttccatgtatgtcaactttttatcaccgtcaggcatagactcgtggagattagtcattatagctcagacctaagctaattatttaaaataaatacatgtaaaggccactgccacattctcagcaga

SEQ ID NO: 640 - DNA, 3332 bp, human
gggaactcttagctgagcaggcgagagcatcatggataccgacttatatgatgagtttgggaattatattggaccagagcttgattctgatgaagatgatgatgaattgggtagagagaccaaagatcttgatgagatggatgatgatgacgacgacgatgacgtaggagatcatgacgatgaccaccctgggatggaggtggtgctgcatgaggacaagaagtactacccaacagccgaggaggtgtatggtcctgaggtggagaccatagttcaagaggaagacactcagcctctcacagaacccattattaagccagtgaaaaccaagaaattcactctgatggagcagacattacctgttacggtgtatgagatggatttcttggcggatctgatggataactcagagctcatcagaaatgtgaccctttgtggacatctccaccatggcaagacatgttttgtggattgtttaattgaacagactcacccggaaatcagaaagcgctatgaccaagatctgtgctatactgacatcctcttcacagagcaagagagaggtgtaggcatcaaaagcactcctgtgacagtggtcttgccagacaccaaaggaaaatcttatctcttcaatatcatggacactccaggacatgtgaatttctctgatgaggtcacagctggcttgcgcatctcagatggagtggtccttttcattgatgctgctgagggggtgatgctgaacacagagcggctgatcaagcatgcggtgcaggagaggctggcagtcactgtgtgcatcaacaagattgaccggctgatcctggagctgaagctgcctccaactgatgcttattacaagctgcgccacattgtggatgaggtcaatggattaataagcatgtattccactgatgagaacctgatcctttccccactcctgggtaacgtctgcttctccagctcccagtacagcatctgcttcacgctggtctcctttgccaagatctatgccgacacctttggtgacattaattaccaagaatttgctaaaagactctggggtgacatctacttcaaccctaagacgcgaaagttcaccaaaaaggccccaactagcagctcccagagaagtttcgtggagtttatcttggagcctctttataagatcctcgcccaggttgtaggtgacgtggacaccagcctcccacggaccctagacgagcttggcatccacctgacgaaggaggagctgaagctgaacatccgccccttgctcaggctggtctgcaaaaagttctttggcgagttcacaggctttgtggacatgtgtgtgcagcatatcccttctccaaaggtgggcgccaagcccaagattgagcacacctacaccggtggtgtggactccgacctcggcgaggctatgagtgactgtgaccctgatggccccctgatgtgccacactactaagatgtacagcacagatgatggagtccagtttcacgcctttggccgggtgctgagtggcaccattcatgctgggcagcctgtgaaggtactgggggagaactacaccctggaggatgaggaagactcccagatatgcaccgtgggccgcctttggatctctgtggccaggtaccacatcgaggtgaaccgtgttcctgctggcaactgggttctgattgaaggtgttgatcaaccaattgtgaagacagcaaccataaccgaaccccgaggcaatgaggaggctcagattttccgacccttgaagttcaataccacatctgttatcaagattgctgtggagccagtcaacccctcagagctgcccaagatgcttgatggcctgcgcaaggtcaacaagagctatccatccctcaccaccaaggtggaggagtctggcgagcatgtgatcctgggcactggggagctctacctggactgtgtgatgcatgatttgcggaagatgtactcagagatagacatcaaggtggctgacccagttgtcacgttttgtgagacggtggtggaaacatcctccctcaagtgctttgctgaaacgcctaataagaagaacaagatcaccatgattgctgagcctcttgagaagggcctggcagaggacatagagaatgaggtggtccagattacgtggaacaggaagaagctgggagagttcttccagaccaagtacgattgggatctgctggctgcccgttccatctgggcttttggccctgatgcgactggccccaacattctggtggatgatactctgccctctgaggtggacaaggctcttcttggttcagtgaaggacagcatcgttcaaggtttccagtggggaaccagggagggccccctctgtgatgaattgattcggaatgtcaagtttaagatcctggatgcggtggttgcccaggagcccctgcaccggggcgggggccagatcatccccacagccaggagagtcgtctactctgccttcctcatggctactcctcgtctgatggagccttactactttgtagaggtccaggcccctgcagattgcgtctctgcagtttataccgtcctggccaggcgcagggggcacgtgactcaggatgcacccatcccaggctcccctctgtacaccatcaaagcttttatcccggccatcgactcttttggctttgagactgatctccggactcacacccagggacaagccttttctctgtctgtcttccaccactggcagattgtgcctggtgatcccctggacaagagcattgtcatccgccccttggagccacagccagctcctcacctggcccgggaattcatgatcaaaacccgccgtaggaagggcctcagtgaagatgtgagcatcagcaaattcttcgatgatcctatgttgctggaacttgccaaacaggatgttgtgctcaattaccccatgtgagtgcgtggactcctgggagctcctgctccctacagtgggctgcaactcctgtacttgaagctgagacctcatatgacgtggccttcgtgttgtcagagagtgtctggaagctgctgttgccatcttgaacaactcaccaacctccaacccagagccccagtgagagaggagcatttggcctcctgcttccttctgtggcctctgccgggctccattcccaaggaaaagagaggagcttgggctcacagaaagagaaggggatgaaaccccaaggggccctatctttgggatttacatggaattttattttctacaagtttgaccttagccatggtttgcaagtgaacagaacattctgacctcaaaaaaaaaaaaaaaaaaa

SEQ ID NO: 641 - DNA, 1600 bp, human
gccgccgctgaagccaccgccgggtgcccagcgccgccgccgcccccgagctcccccgcgcccctgcccgcgggcggccggtgggcagcgggcgccatggccgcgccggagccgctgcggccgcgcctgtgccgcttggtgcgcggagagcagggctacggcttccacctgcacggcgagaagggccgccgcgggcagttcatccggcgcgtggaacccggttcccccgccgaggccgccgcgctggctggggaccgcctggtcgaggtcaacggcgtcaacgtggagggcgagacgcaccaccaggtggtgcaaaggatcaaggctgtggaggggcagactcggctgctggtggtggaccaggagacagatgaggagctccgccggcggcagctgacctgtaccgaggagatggcccagcgagggctcccacccgcccacgacccctgggagccgaagccagactgggcacacaccggcagccacagctccgaagctggcaagaaggatgtcagtgggcccctgagggagctgcgccctcggctctgccacctgcgaaagggacctcagggctatgggttcaacctgcatagtgacaagtcccggcccggccagtacatccgctctgtggacccgggctcacctgccgcccgctctggcctccgcgcccaggaccggctcattgaggtgaacgggcagaatgtggagggactgcgccatgctgaggtggtggccagcatcaaggcacgggaggacgaggcccggctgctggtcgtggaccccgagacagatgaacacttcaagcggcttcgggtcacacccaccgaggagcacgtggaaggtcctctgccgtcacccgtcaccaatggaaccagccctgcccagctcaatggtggctctgcgtgctcatcccgaagtgacctgcctggttccgacaaggacactgaggatggcagtgcctggaagcaagatcccttccaggagagcggcctccacctgagccccacggcggccgaggcaaggagaaggctcgagccatgcgagtcaacaagcgcgcgccacagatggactggaacaggaagcgtgaaatcttcagcaacttctgagccccttcctgcctgtctcgggaccctgggacccctcccgcacggaccttgggcctcagcctgccccgagctcccccagcctcagtggactggagggtggtcctgccattgcccagaaatcagccccagccccggtgagcccccatcctgcccctgcccaccaggtactgggggcctgtggcagcaagatagggggagagagacccagagatgtgagagagagtcagagacagagacagagagagagagagagagacacagagagagacagagagagagcgagcgagcgcgcggcagccgcggggcgagggcctttgctgctctgccggggcctgctgactgaaaggaatttgtgtttttgctttttttccaaaaagatctccagctccacacatgtttccacttaataccagagaccccccccttcccctcccccttcccctcccccttgggacgcgctctaaataattgcaataaaacaaacctttctctgc

SEQ ID NO: 642 - DNA, 1285 bp, human
tcccccatcccagcccgccccctcggccgctccgcgtccctggcgtgactcggcactgagagtcccgggagaagactcggcggtcgcacctcttctgtccaggcctcggccttcctgagcatctctccttcctctcccagatcgtcttctccttcagtttcaaagccagtggcgtcgcggccaccctgccgggctctctgtgaggatggtgggggtgaagcccgtcgggagcgacccggatttccagccagagctgagcggcgcgggctccagactcgccgtggtcaagttcaccatgagagggtgtgggccatgtttgaggattgccccagcattcagttctatgagtaataaatatccacaggctgttttcttggaagtcgatgtacatcagtgtcagggaacagctgccaccaacaatatatcagcaacacctacatttttgttttttcgaaacaaagtgagaattgatcaatatcaaggagcagatgctgtgggattagaagaaaaaatcaagcagcacttagaaaatgaccctggaagcaatgaggacacagatattccaaaaggctatatggatttaatgccttttattaacaaagctggttgtgaatgtcttaatgaaagtgatgagcatggatttgacaactgtttacgaaaagacacaaccttcttggaatctgactgtgatgaacagctgcttattactgtggcattcaatcaacctgttaagctttattccatgaaatttcaagggccagataatggtcagggccctaaatatgtaaaaatttttatcaacctaccccgatctatggattttgaagaggcagaaagaagtgaaccaactcaagctctggaactgacagaggatgatattaaagaagatggcattgttccacttcgttatgttaagtttcagaatgttaacagtgtaactatatttgttcagtcgaatcaaggtgaagaggaaacaacaagaatttcatattttacttttattggtactccagtccaggcaacaaatatgaatgacttcaaacgagtagttggcaaaaaaggagaaagccactaaggtacaaaagacactggacaaccatattgcaatcagatctacagctcctggataattgcttgattctcgccagagactgtcaatgtttcattcattgccattaccaataaatcattgcttttgttcagatggtatcactagtgtttccattgtaatcttgacacatgcaattgtaaataaaagtcaccacttttgccaagcttaaaaaaa

SEQ ID NO: 643 - DNA, 6138 bp, human
acttccggttgctgtgctgagtcggaagtgggaacccttcggccgctgagattctgtcgtgtcgtcgctgctggcacttcaggctctgcctctcccactaggtctggatggaggataccttaaagtgaaatgacagaccaggagaataacaacaacatctcaagtaacccctttgctgctctttttggctccctggctgatgccaaacagtttgcggcaatccaaaaagagcagctgaagcaacaatctgatgaactcccagctagcccagatgactcggataatagcgtgtcagagagcctggatgaattcgattactctgtggctgagattagccgctcattccgatcacagcaggaaatatgtgagcaactcaacatcaatcacatgatccaaaggatcttccttattactctggacaacagtgatcccagcttgaaaagcgggaatggcatccctagccgttgtgtgtatttggaagaaatggcagtagagctagaagatcaagactggcttgatatgagcaatgttgagcaggccctcttcgctcgcttattacttcaagatccaggcaaccacttaattaacatgacttcttctacaacgctaaatctctctgctgatcgagatgcaggagagaggcacattttttgttacctttactcctgcttccagagagccaaggaagagattaccaaagttccagagaacctgctaccctttgcagtgcagtgcagaaacctcactgtgtccaatacccgaacagttcttctcaccccagagatctatgttgaccaaaacatccatgagcaactggtagatttgatgttagaagccatccagggagcccgtgagtacatgaacaagatctattttgaagatgtaactgagtttctggaagaggtcattgaagccttgatattggatgaggaagttagaacatttccagaagtcatgattccagtgtttgatattttattgggccgaataaaagatctagagctctgtcagatccttttgtatgcatatctggatattcttctctatttcactaggcaaaaagatatggcaaaggtttttgtagaatacattcagcccaaggaccctaccaatgggcaaatgtaccagaagaccttgctgggagtaattctgagtatctcctgcttattaaagactccgggtgttgtagaaaatcatggctactttttgaatccatctcgttccagcccccaggagatcaaagtacaggaggccaacatccatcagttcatggctcagttccacgaaaagatctaccagatgctgaagaacttactccagctctctccagaaaccaaacactgtatcttgtcctggcttggaaactgtttgcatgcaaatgcaggccgcaccaagatttgggccaatcagatgccagaaatctttttccaaatgtatgcctcagatgctttctttctgaatctgggtgctgctctcctgaagctatgccagccattttgcaaacccagatcctctcggctcctcacctttaatcccacatactgtgccctcaaggagttgaatgatgaagaacgaaaaattaaaaatgtacacatgagaggtttggacaaagaaacctgtttgatcccagctgtgcaggagccgaagtttccacagaactacaaccttgtaacagagaaccttgctctgacagagtacaccttgtacttgggatttcacaggttgcatgatcagatggtaaaaatcaaccaaaatctgcatcggctgcaggttgcctggcgggatgctcagcaaagttctagccctgctgctgacaatcttcgtgagcagtttgaacgactgatgaccatctatctttctaccaagactgccatgacagagccacaaatgctacaaaactgcctaaacttgcaggtgtccatggctgttctactggttcaactggccataggcaatgagggctcacagccaatagagctaacctttcctttgccagatggctacagctctttggcttatgtgccagaattttttgcagataacctgggtgattttctcatttttctccgccgctttgccgatgacattttggagacatcagcagattccctggagcatgtccttcactttatcaccattttcactggaagcatagaaagaatgaagaatccccacctgagggccaaactagcagaggtgttggaagcagtgatgccccacctggatcagaccccaaatcccttggtatccagtgtgttccaccggaaacgtgtgttctgcaactttcagtatgcaccccaacttgcagaggctctaatcaaggtttttgtggacatcgaatttacaggagacccccatcaatttgaacagaagtttaattaccgccgtcccatgtatcctatcctaagatacatgtgggggacagatacctatcgggagagcattaaggatttggctgactatgcctctaagaatttagaagccatgaatcccccacttttcctccgctttcttaacctgctaatgaatgatgccatcttccttttggatgaagccatacagtatttgagcaagataaagattcagcaaattgagaaggatcgaggtgaatgggatagtctgactccagaagcccgccgagaaaaggaggctggcctacagatgtttggacagctggcacgtttccataacatcatgtccaatgaaacaatcggtacccttgcctttctcacatcagagatcaagtcactctttgtgcatcccttcctggctgagcgcatcatctccatgttgaactacttcctgcaacacctggttggccccaagatgggtgccttaaaagtcaaggacttcagcgaatttgacttcaaaccccagcagcttgtatcagatatctgcactatctacttaaatcttggggatgaggagaatttctgtgccactgtgcccaaggatggacgttcctattccccaactctctttgcacagacagttcgagtcttgaagaaaataaataagcctgggaatatgattatggctttcagcaacttggcagagagaatcaagtctcttgcagacctccaacaacaggaagaggaaacctatgcagatgcctgtgatgagttcctggatcccattatgagcacactgatgtgtgaccctgtggtgctgccatcttccagagtcactgtggatagatccaccattgcaagacatttgctcagtgaccaaacagatccctttaaccgtagtcccctcaccatggaccagatccggccaaacacagaactaaaagaaaaaatccaacggtggcttgcagagaggaaacaacaaaaggagcaacttgaatagatactgtgaactaaccaaaccaaaaccaaccccagagtgcagataaacaattgtttgtggtttctctctttctggttctgttccttttctttcttcttttctttttcttttttttttttttttttactaaattagagaactgctcttgctgaaattatgatagttaagattcctaagaacttgacaatgctcccctggcttgcaggaaattatacttattatagcatcaccaagtttagaaatcatcactaattttcaccctctgttgtctcttcatattcttcttccttttcctaaatgaaattatattatttcaactactaaaacttcccgccaccctgctatttctcttccaattactgttcaaacatttttggtgagtgctgcttttataaatatgtgatgtcacatatttcagtgacagctgatgttatcagaaaaatcctgttatcctgtgtatttactagtcctcatgatctagacttaaccccttttctgtgttacagagtaacttcacataaaagcagatacctttaagtttgtgtagacttctgaataagatgatagacgagaattttttttaaaaaaggaatttaaaggaatcttgtgcaacttctgttgatagctcttaattttgttatacagtctttttaatgaggattggtagggcaatcctaccaattgatgggggtgaggagactgttgggcccttattctcttatgaaaatctgtttctacaaggactaggcctaagtagatttaggcaacgggtatcatatccatgaaaaatgtcattttaagacactaatatcaacagtatatctcagtgtgtgagatatataaatacacatacaccccatgtgcttttttgttggtttagtgtaaactgagtaccactttatattttctcttccatagtgagatgtatgcagtatgtggccatgtttactaacatactcattcttcacaaaattctgagattataaaatgtatatagttaatatttgtttgagcttgtgacctgacttctaagagctacttctaacacagccttaggtcttcaattaacaaagtaggaagttgagcacaaccttgtccacagccattttaaatatccacttagccctgtgtagttggtaggtggacaccactttcataagtgaacttgagctcactactcaattgtgcagcttaatatgctgactagggacattcccctatggattatctttatatcactgtctttctaagcccagagatgtcataagtgacaagaaaagtgataggatcaagaaatgggtgtcactgcttcatttggaacatgttattaactatggtctctttcaaataaatagtagttttatatttcaacacaagttgctataagcagtccttgatgggtttttgattgcatcagctggaaagcctcaaatctaagagggcttcccatcctagatataaaataggtgttgcctattgctgtgcttataaaatgaaaaaggaaattgaggacacttttgcaaatgccagaatgtaagattcattcagtgtgctccctgggcctttatggcatgggttgacaggatttgtttattttctaaaattagcttcattcaatatttatcatcctcctttccctctctgagaatgaactatgtataaaataagcttctgcctatttgcatttatcttccaaacccaatctagtaggatgttctcattttaaaaacgaggggaaaagaccagagtttttcaggagaaaactggaggaaaatgggcacaaaaactcagaaggcagctattcccagcagcttcctagttaacaacccccatgctgcctccagtctttgtctgtattcttctgtatttaaccttcagattgtaagccttttctggcaagcttttcttctttttttaaactcttttcctgaaactttttatgaatggctatggcaccattaatgctgctgaatatctttaaactctgcacaagcaagtgtgtagcttaaggccactactggtaaggaaaccaagtgtcctctgtgccttttttctttctgtgaagtaatttaagaatatccaaaaaaattagactttaaaaagttatcttggtacaacaccgtgtgtatatacacttggaagcttaaaaaggtgttttgtctggaacttagaagcagctctaaatctagtagagcagactttctaacatacctagttttgtgtattggctttgctggagtatgatagcaaaatgaagactcttttactcagctctggtattgctcataacttaccaagaggctaatactaaacttggaaaattgtttaagtatgttttatcaagcagtctgggttttgttttttaatatactttttaatggatatgtgaaaactgaaggaaatgttaaaggttttttaatggtgcaagtgaaggtgccagttgctatttgatatcacactctacaaaagcttcattactttatttgatggtggttgctaagcagccattgcacagagcataagtctactgggtgcctttacatgccagaggctgatgctgcactgttgatgtcatgtgaggaaataatgcacatgctctaactgctcaacaggaaatgaacctagaaacagaaaatgaaaaggttgattgaaataaaacttgatcaacgcgactgtattttgaaacattccaggaaggttacttcttgtcaaacttgcctggcagtgtttgttcaaaacttgtatttaataaatgaacatctgacttacaaaaaaaaaaaaaaaaaa

SEQ ID NO: 644 - DNA, 6103 bp, human
atccggggcagcggggaatggctgagccaggggttcgccgcccccgccgccgccgccgccgccgccgccgccgccgccgcccgctttcggctcgggcctcaggaccgtagcatcctgagacattttgaattgacacttctcaagatttgactggatcagagttcatcatgtcaaagttgaaaagctcagagtcagtcagggtggtggttcgctgtcggcccatgaatggcaaggaaaaggctgcttcgtatgacaaagtggtggatgtggatgttaagctggggcaggtgtctgtgaagaaccccaaagggacggcccatgaaatgcccaagaccttcacctttgatgccgtctatgactggaatgccaagcagtttgaactgtacgatgagacgttccgaccacttgttgactctgtcctgcaaggtttcaatggaaccatttttgcctatggacaaactgggacaggaaaaacctacaccatggaaggaatccgtggtgaccctgaaaaaagaggagtcattcctaactcatttgaccatatcttcacccacatctctcgatcccagaatcaacaatacctggtcagggcttcttacttagagatctaccaggaggagatccgagatttgctctcaaaggatcagaccaaaaggcttgagctcaaagagaggcctgacacaggagtgtatgtgaaagacctgtcttcctttgtcaccaagagtgtgaaggagatagagcatgtgatgaatgtggggaaccagaaccgttctgtcggtgctaccaacatgaacgagcacagctcgcgttctcatgcaattttcgttatcactattgagtgcagcgaggtgggcctcgatggtgaaaaccacatccgtgtaggaaaattgaaccttgtagatcttgctggcagcgaacggcaagccaagaccggcgcacaaggggagagattaaaagaagctaccaagatcaacctctccctttccgctttgggtaatgtcatctctgctctagtggacggcaaaagcactcacattccatatcgggactcaaagcttaccaggctcctccaagattcccttggtggcaatgccaagactgtgatggtggccaacgtggggcctgcctcttacaacgtagaagagactctgaccactctgcgatatgccaaccgtgccaaaaacattaagaacaaaccaagggtcaatgaggaccccaaggatgccctccttcgagaattccaggaagagattgctcggctcaaggcccagctggaaaaacggtccattggtaggaggaagaggcgagagaagcggagggaaggtggtggcagtggtgggggtggggaagaggaggaggaggagggagaagagggtgaggaggaaggggatgataaggatgattactggcgggaacagcaagaaaaactggagattgagaagcgggccattgtagaggatcacagcttggttgcagaggagaagatgaggctgctgaaggagaaagagaaaaagatggaggacctgcggcgggagaaggatgctgccgagatgctgggcgccaagatcaaggccatggagagtaagttgcttgttggaggaaaaaatatagtagatcatacgaatgaacagcagaaaatcctggagcagaaacgacaggaaattgcagagcagaaacgtcgagaaagagaaatccagcaacagatggaaagtcgagatgaggagaccttggaacttaaagagacatacagctcattgcagcaagaggtggacatcaagaccaaaaaactcaaaaagctcttctccaagcttcaggcagtgaaggctgagatccatgacctccaagaagaacacatcaaggagcgccaagagctagagcagactcagaatgagctcaccagggagctgaaactcaagcatcttattatagaaaactttatccctctggaagaaaaaagtaaaattatgaatagagccttctttgatgaagaggaagatcattggaaactacatcctataaccagactggagaaccagcagatgatgaagcggccagtctcagccgtgggatataagagaccattgagccagcacgcaagaatgtccatgatgattcgtccagaggcccgatatagggcagaaaacattgtgctgttagagctggacatgcccagccggaccaccagagactatgagggtccagccattgcccccaaggtccaggctgcattggatgcggctctgcaggatgaagatgagatacaggtggatgcatcatcatttgaaagcactgcaaataagaaatccaaggccaggcctaaaagtggaaggaagtcgggatcctcctcctcttcctcaggaacccctgcatctcagctttatccacagtctcgggggctggttccaaagtaaagccagcttctcctctcccagggcggaaacagcatttgccttctgagagaagagactagcaaaaagctgcagagaggattcggcccaaactcagaactgttcccctgaggagaagcggtggcctctttgcagatcaaccaacttaatctggttgaacgtgctgttcctaatctggcactcagcccctctgggaaacatcttttaattagcatctcagaaatgcatgggtaaggtaaagtgcgatagttcaagtggaaagcaagagaatgaccagtgaccttgcttccttcccccttgccttcttctcccccttcccctgtgctccctttctctcctctctccttttctagcctgttctttacatggggctcccttcttgttgaacaatagggcagaatcaggagtcaccttagcaggaccacatctttggagcctcgggataaaatgacagtgaggttgaaaagtgaaaaccctagaacttgaataggtgcctgttcttgtagggagaaatgagaaatcgcatttggatccaggccccaggtgggcaccatcagcagtcttgcttccatgcacctcagtaagaagtggatctgcctttgggacctgctcagtgaggaaatctcttccaatttctgcttctgaatgattcaatgttgggagcaatagaaataacattccctttgccttctctgagtgtttagggaaatagcttctttaaaacctcaaaaccatgaccatcctgtcaaagacctaagtctgtaagctggtgccatgtccatacaccatgtcactttactcttcatttgtcaccatcttttcccatgcacgcatactctgaacatccttgtgtgggcccatcctctgcatccagagcatgctctgcagtgggcctgttttgtggaagaaaggaggctgtctctgccttctctgatgggactggagttgagggaaggagctgtattgtggcacttctgaattccccgttttgttccatattggtatagagagcagaagagtagctaggcagatgcagagatggagacatgagactcagtgcagtgggcagggaagacataacagatggaagcaaaggaatcctgcctgccttcagcagagaattcaccgaatcctagaactgtggctccctccaggcagagcctaagatgctggtgaagaatagctgtgtgattgaataggctcaaaggagagttcagaattcccatttacatattactagtttggtttgtaagttttagttccttgtattattgagattcagagcttcattttatgttggtcattaggtgaatattactcattttccctcaagagaagctcataagtgtgtgtgggtgtgagagcacgatggtgcctgtgttctgtgaatgtgtccatatgtgtctgtaagagagacagagaccaagaacttgcccaattttagaaatacactaatgtgcagttgttgccttttgtctgtattgaaggcccattgaatgactaatccaggctggaagcattcccatgtgggtgtctgagtccatgagccaagcctgaggggacagtgagtctccaggtctgccacactggtgcaccttgctggcacggtgcctcaggaaggtggcgactcaggtgggccttgagttatattttaactcagctgctcagttcccagggcacatttctggatcagaacccatgggaaacaggaggtactaagtgcaatgtcttagcattctgcaaaatggagatctgttgtccagcggcttatctcctttttagtaacccttctttctgaacccagggcccttttcagccttccctcatattttcttgagatcaaactttacttctttcttatttactaagaatttgcctgtttgaataagaacaaaacgctaaggtgggtagcctaagctgattttctgctggttacacgtgtctctcacaccacatttcctcaaagctaatctgaattctgtaggctaaaaatattcatgtagcaaatctgagaattgaaaactgcagataaccggccgggtatggtgactcatgcctgtaatcctagcactttgggaggccgaggtgggtggaccacctgaggttaggacttcaagaccagcctggccaacatggtgaaaccccatctgtactaaaaatacaaaaatttgcctggtgtggtggtgcatgcctctagtcctagctactcgggaggctgaggcacgagaatcacttgaacctgggaggcggaggttgcagtgagtcgagataacactactgcattccagcctgggtgacagagtgagactccacctcaaaaaaaaaaaaaaaaaaaaaaaaaacagaaagaaagaaaaagaaaactgcagataaccctatacattaatactggtatctcgaggtgactcttctgaccaagggtggttaagtgacacatagaacttttctaagagaagacagacaagttgacaggcatgccttgtactcagctgtgttcatgtggtggtctgtggaaagaaaagaagactcatttggaaatgaagctgtccctttccaagcagtctctggtgcttttcttctctcaaaatggatccgataaatatttgaatagagcagattgtagaatgtcgtgctgtcaccagaaagctgctgttttgggttctgcattgagccaaatatgtagaggacctaccaagcccactgagggactaggttttcatgtctctagtcatacctagaatgttctgagccgtctgagggccttcatgccggcagcagctagcaaagccagaaagcaagtctaacaggatctaagatgaccatcaggagaaggagtttgagactgtgtatgcaacccccaatagacccccttttactctgatctggagaatgtatctggcttcatattttcaagtcacatgtctctcagacccctggattcagaacccaaggccacaaatcataggcatgaagcactttcttaagactgacctaacgctggattatttcccgtccaatgcctgcatgctgcttgaattgctccacccacacctccatgaccaagggcgccagagtgctgcaactggggcgtgggccgctctctgcttttcctgtctgactctgacaagtcctccctcactgaatgtagaatcgttgccaagtttctgagaagtgtcgattccctgttaacatggatatcagttctgcctcacatttcccacttgaggttgaggcgtactggagacaacacctcagaccatctgaaccccatcagtggacgaaaatggggctgttaatatactctaaaagccatactaaaaatgctctgagggaactggctaagaatagtgggcctggtgattgtctatcacgcaaggctttgttttgtactgttcagaaatctgtcacctttctgcctgcccttgtttcctgaatgaaatgcttctggggttatttatgaaaggagtgatcctggggcaggcaggaggcagtgggcttcatggctccttgaagttattactgatcttgaccttctctttggctacctttagacaaagaatacgccaatcaatacttggggctctaagttttacaattgatatttatttgtatcatctctttgtctaggaatgtaaaagtgattctaaactaagatgtgtaataaaaatcaatcagatttattgtacctacaaaaa

SEQ ID NO: 645 - DNA, 4930 bp, human
atgctgaagcggaggcggccgctgctcgaggatcaaacagagcatactgaatcagcaggactggctggtggtgcagcagacatcatgagtaagcaccgagaagtctgttccttatcacgtgtgtaaggggaaaaaggtttaaacaagtctcttaagtggtgtttcctcaccgatggagaattacttccaagcagaagcttacaacctggacaaggtgttagatgaatttgaacaaaacgaagatgaaacagtttcttctactttattggatacaaagtggaataagattctagatcccccttctcaccggctgtcatttaaccctactttggccagtgtgaatgaatctgcagtttctaatgagtcacaaccacaactgaaagtcttctccctggctcattcagctcccctgaccacagaggaagaggatcactgtgctaatggacaggactgtaatctaaatccagagattgccacaatgtggattgatgaaaatgctgttgcagaagaccagttaattaagagaaactatagttgggatgatcaatgcagtgctgttgaagtgggagagaagaaatgtggaaacctggcttgtctgccagatgagaagaatgttcttgttgtagccgtcatgcataactgtgataaaaggacattacaaaacgatttacaggattgtaataattataatagtcaatcccttatggatgcttttagctgttcactggataatgaaaacagacaaactgatcaatttagttttagtataaatgagtccactgaaaaagatatgaattcagagaaacaaatggatccattgaatagaccgaaaacagaggggagatctgttaaccatctgtgtcctacttcatctgatagtctagccagtgtctgttccccttcacaattaaaggatgacggaagtataggtagagacccctccatgtctgcgattacaagtttaacggttgattcagtaatctcatcccagggaacagatggatgtcctgctgttaaaaagcaagagaactatataccagatgaggacctcactggcaaaatcagctctcctaggacagatctagggagtccaaattccttttcccacatgagtgaggggattttgatgaaaaaagagccagcagaggagagcaccactgaagaatccctccggtctggtttacctttgcttctcaaaccagacatgcctaatgggtctggaaggaataatgactgtgaacggtgttcagattgccttgtgcctaatgaagttagggctgatgaaaatgaaggttatgaacatgaagaaactcttggcactacagaattccttaatatgacagagcatttctctgaatctcaggacatgactaattggaagttgactaaactaaatgagatgaatgatagccaagtaaacgaagaaaaggaaaagtttctacagattagtcagcctgaggacactaatggtgatagtggaggacagtgtgttggattggcagatgcaggtctagatttaaaaggaacttgcattagtgaaagtgaagaatgtgatttctccactgttatagacacaccagcagcaaattatctatctaatggttgtgattcctatggaatgcaagacccaggtgtttcttttgttccaaagactttaccctccaaagaagattcagtaacagaagaaaaagaaatagaggaaagcaagtcagaatgctactcaaatatttatgaacagagaggaaatgaggccacagaagggagtggactacttttaaacagcactggtgacctaatgaagaaaaattatttacataatttctgtagtcaagttccatcagtgcttgggcaatcttcccccaaggtagtagcaagcctgccatctatcagtgttccttttggtggtgcaagacccaagcaaccttctaatcttaaacttcaaattccaaagccattatcagaccatttacaaaatgactttcctgcaaacagtggaaataatactaaaaataaaaatgatattcttgggaaagcaaaattaggggaaaactcagcaaccaatgtatgcagtccatctttgggaaacatctctaatgtcgatacaaatggggaacatttagaaagttatgaggctgagatctccactagaccatgccttgcattagctccagatagcccagataatgatctcagagctggtcagtttggaatttctgccagaaagccattcaccactctgggtgaggtggctccagtatgggtaccggattctcaggctccaaattgcatgaaatgtgaagccaggtttacattcaccaaaaggaggcatcactgcagagcatgtgggaaggttttctgtgcttcctgctgtagcctgaaatgtaaactgttatacatggacagaaaggaagctagagtgtgtgtaatctgccattcagtgctaatgaatgctcaagcctgggagaacatgatgagtgcctcaagccagagccctaaccctaacaatcctgctgaatactgttctactatccctcccttgcagcaagctcaggcctcaggagctctgagctctccacctcccactgtgatggtacctgtgggagttttaaagcaccctggagcagaagtggctcagcccagagagcagaggcgagtttggtttgctgatgggatcttgcccaatggagaagttgctgatgcagccaaattaacaatgaatggaacttcctctgcaggaaccctggctgtgtcacacgacccagtcaagccagtaactaccagtcctctaccagcagagacggatatttgtctattctctgggagtataactcaggttggaagtcctgttggaagtgcaatgaatcttattcctgaagatggccttcctcccattctcatctccactggtgtaaaaggagactatgctgtggaagagaaaccatcacagatttcagtaatgcagcagttggaggatggtggccctgacccacttgtatttgttttaaatgcaaatttgttgtcaatggttaaaattgtaaattatgtgaacaggaagtgctggtgtttcacaaccaagggaatgcatgcagtgggtcagtctgagatagtcattcttctacagtgtttaccggatgaaaagtgtttgccaaaggatatctttaatcactttgtgcagctttatcgggatgctctggcagggaatgtggtgagcaacttgggacattccttcttcagtcaaagtttccttggcagtaaagaacatggtggattcttatatgtgacatctacctaccagtcactgcaagacctagtactcccaaccccaccttacttgtttgggattcttatccagaaatgggaaactccttgggctaaagtatttcctatccgtctgatgttgagacttggagctgaatatcgactttatccatgcccactattcagtgtcagatttcggaagccattgtttggagagacggggcataccatcatgaatcttcttgcagacttcagaaattaccagtataccttgccagtagttcaaggtttggtggttgatatggaagttcggaaaactagcatcaaaattcccagcaacagatacaatgagatgatgaaagccatgaacaagtccaatgagcatgtcctggcaggaggtgcctgcttcaatgaaaaggcagactctcatcttgtgtgtgtacagaatgatgatggaaactatcagacccaggctatcagtattcacaatcagcccagaaaagtgactggtgccagtttctttgtgttcagtggcgctctgaaatcctcttctggataccttgccaagtccagtattgtggaagatggtgttatggtccagattactgcagagaacatggattccttgaggcaggcactgcgagagatgaaggacttcaccatcacctgtgggaaggcggacgcggaggaaccccaggagcacatccacatccagtgggtggatgatgacaagaacgttagcaagggtgtcgtaagtcctatagatgggaagtccatggagactataacaaatgtgaagatattccatggatcagaatataaagcaaatggaaaagtaatcagatggacagaggtgtttttcctagaaaacgatgaccagcacaattgcctcagtgatcctgcagatcacagtagattgactgagcatgttgccaaagctttttgccttgctctctgtcctcacctgaaacttctgaaggaagatggaatgaccaaactgggactacgtgtgacacttgactcagatcaggttggctatcaagcagggagcaatggccagccccttccctcgcagtacatgaatgatctggacagcgccttggtgccggtgatccatggaggggcctgccagcttagtgagggccccgttgtcatggaactcatcttttatattctggaaaacatcgtataaacagagaagacttcatttttttctgttcagacttgttgcaacagcagtcatacccaaatcatttgcactttaaaactggaagattaagcttttgttaacactattaatggggtggggaatagggtgggagtgggggtttgggagacgggtgggaaagggtggttggggggaccgatgttccataattctaagtcttctatgcattgtccaccaagaagatctgggcagcttctgttcctgcacaacagttatgctatccttgcagctaatccccttctgttactgtttagacaagaattccgctcctctctcaagatttacttatggtcatgtgctcagaaatgctcaaatgggtacaaccatcaccaagggtgggatgggagggcagaggggaaataaaatataaagcatcagttcttgcactctttgtacagaattggtataaaaaggataattccacactgaaaaaaaaaaaaaaaa

SEQ ID NO: 646 - DNA, 2202 bp, human
ggaagtggggagaatcaaggcggggaaatcggactttcgggtcgctgggggcaacgaagcctggagaggccttctttccattcccagaatatgtttgctgctttttcctctccccactggcctaaatggatcgctccgcctgtttcctccccagcacctagggcgcaatggaatattccattgcccctcctgtcctgggtctgtgttgcggggaacgctcgcgcggttgccagagaaagccccggacgtgacggatttgcgcgaccccaagcagcccgcccttccccctcccatccgtcattcccctgcgttctctttcctcacccttccccccgccaccgtgggttccagacttgggataagtaaacagcgggtggagcgaggcctacggacccaggccaggtgggagtctgcactcttcaaggggcctgggctgctgctcacgggtattaaagaactccgcgttgttcatggctgaggcgatgcattaggaagatcctggacctagagaacaagtcccccgaacgctgagttggaggcgggacttcgggtgcgcgttggcgggagcatgctggggctctgggggcagcggctccccgcggcgtgggtcctgcttctgttgcctttcctgccgctgctgctgcttgcagcccccgcgccccaccgcgcgtcctacaagccggtcatcgtggtgcatgggctcttcgacagctcgtacagcttccgccacctgctggaatacatcaatgagacacaccccgggactgtggtgacagtgctcgatctcttcgatgggagagagagcttgcgacccctgtgggaacaggtgcaagggttccgagaggctgtggtccccatcatggcaaaggcccctcaaggggtgcatctcatctgctactcgcaggggggccttgtgtgccgggctctgctttctgtcatggatgatcacaacgtggattctttcatctccctctcctctccacagatgggacagtatggagacacggactacttgaagtggctgttccccacctccatgcggtctaacctctatcggatctgctatagcccctggggccaggaattctccatctgcaactactggcatgatccccaccacgatgacttgtacctcaatgccagcagcttcctggccctgatcaatggggaaagagaccatcccaatgccacagtatggcggaagaactttctgcgtgtgggccacctggtgctgattgggggccctgatgatggtgttattactccctggcagtccagcttctttggtttctatgatgcaaatgagaccgtcctggagatggaggagcaactggtttatctgcgggattcttttgggttgaagactctattggcccggggggccatagtgaggtgtccaatggccggtatctcccacacagcctggcactccaaccgtaccctttatgagacctgcattgaaccttggctctcctgaggatatattcaggggtccccaggaactcctcggtccagagaccaagtggtggccttggaaagcagatgtcaggctttggtgtgcctgtgaccacctcattgctcccatattatcccccatttttagtagagacggggttttagtagagacttggcctcccagaacccccttcctctgctcctccatgaatgacaattccaggcctcccctacctcatgtcctctcatttgggggattgctccgtgctgtccctttctctcaaggccgaagttgggaagtgagaaaccatgtttttaacttgtggctgcttttgctgctgctgctcctccgtatctggctgtatgggtggagaacccaccccctgcccaccacaggggtctccttccaggccactcaggacatttttagcttctctcctccccatgttcccttttttctctaaagtcccctgacatcagccctcccaactcctaagagggactacccatgagagtggggttctgaggctcccctatggggacagttccgttcttgaagtgtcagtgttggggaatatctgtggcctatgaggcccatctcaggtttggggatcccccagtccctatgatcagtgttggagtacccccctgggagagcctagtttctttgaggccccaggccctcttttaactacctttgaataggtgttatccctgtatttatggaaataaagttccatttcctca

SEQ ID NO: 647 - DNA, 645 bp, human
gcgccgccatcgccgtcatgctgggcgccgctctccgccgctgcgctgtggccgcaaccacccgggccgaccctcgaggcctcctgcactccgcccggacccccggccccgccgtggctatccagtcagttcgctgctattcccatgggtcacaggagacagatgaggagtttgatgctcgctgggtaacatacttcaacaagccagatatagatgcctgggaattgcgtaaagggataaacacacttgttacctatgatatggttccagagcccaaaatcattgatgctgctttgcgggcatgcagacggttaaatgattttgctagtctagttcgaatcctagaggttgttaaggacaaagcaggacctcataaggaaatctacccctatgtcatccaggaacttagaccaactttaaatgaactgggaatctccactccggaggaactgggccttgacaaagtgtaaaccgcatggatgggcttccccaaggatttattgacattgctacttgagtgtgaacagttacctggaaatactgatgataacatattaccttattttgaacaagtttccctttattgagtaccaagccatgtaatggtaacttggactttaataaaagggaaatgagtttgaactg

SEQ ID NO: 648 - DNA, 1235 bp, human
gcttctgtactgccaggtccgggtcggcggctgcactgcggatgagaccggtgcgactcatgaaggtgttcgtcacccgcaggatacccgccgagggtagggtcgcgctcgcccgggcggcagactgtgaggtggagcagtgggactcggatgagcccatccctgccaaggagctagagcgaggtgtggcgggggcccacggcctgctctgcctcctctccgaccacgtggacaagaggatcctggatgctgcaggggccaatctcaaagtcatcagcaccatgtctgtgggcatcgaccacttggctttggatgaaatcaagaagcgtgggatccgagttggctacaccccagatgtcctgacagataccaccgccgaactcgcagtctccctgctacttaccacctgccgccggttgccggaggccatcgaggaagtgaagaatggtggctggacctcgtggaagcccctctggctgtgtggctatggactcacgcagagcactgtcggcatcatcgggctggggcgcataggccaggccattgctcggcgtctgaaaccattcggtgtccagagatttctgtacacagggcgccagcccaggcctgaggaagcagcagaattccaggcagagtttgtgtctacccctgagctggctgcccaatctgatttcatcgtcgtggcctgctccttaacacctgcaaccgagggactctgcaacaaggacttcttccagaagatgaaggaaacagctgtgttcatcaacatcagcaggggcgacgtcgtaaaccaggacgacctgtaccaggccttggccagtggtaagattgcagctgctggactggatgtgacgagcccagaaccactgcctacaaaccaccctctcctgaccctgaagaactgtgtgattctgccccacattggcagtgccacccacagaacccgcaacaccatgtccttgttggcagctaacaacttgctggctggcctgagaggggagccgatgcctagtgaactcaagctgtagccaaacagtagagatggagggccgggaagcaaaccgtgccctggtattgtcagacacacccaggcttgatttggatccacaggcagagccaagggaaggtgtgattctctgaggaaagagtgattctgatatatgtacttgtcacattggtgttggacacatttgcgccaaaagtatggtaattctattattaaataattctctgag

SEQ ID NO: 649 - DNA, 3047 bp, human
gatcgccgggggctgacgagtgcaccatggccaccgcggcaacctcacccgcgctgaagcggctggatctgcgcgaccctgcggctcttttcgagacgcatggagcggaggagatccgcgggctggagcgccaggttcgggccgagatcgagcacaagaaggaggagctgcggcagatggtgggcgaacggtaccgcgacctgatcgaggcggccgacaccatcggccagatgcgccgctgcgccgtggggctagtggacgccgtgaaggccaccgaccagtactgcgcccgcctccgccaggccggctcggccgcgccccggccaccgcgggcccagcagccacagcagccatcccaggagaagttctacagcatggctgcccagatcaagctactcttagaaattccggagaagatctggagctcgatggaagcctctcagtgtctccacgccacacagctctacctgctctgctgccacctccacagcctgctccagctggattcttctagttcccgatacagtcccgtcctctcccggtttcctatactcatccggcaggtggcagccgccagccacttccggtcaactattctgcatgaaagcaagatgttgctcaaatgccaaggtgtgtctgaccaagctgtggccgaggccctgtgctctataatgctcttagaagagagttctcctcgccaagccctcacagacttcctgctggccagaaaggcaactattcagaaacttctcaaccagccacaccatggtgctggtatcaaggctcagatttgctcattagtggagttgctggccaccactctgaagcaagctcatgcccttttctacactttgccagaaggactgctgccagatccagccctgccatgtggcttgctcttctctactctggagaccatcacaggccagcatcctgccggaaagggcactggtgtcctgcaggaagagatgaaactctgcagctggtttaaacacctgccagcatccatcgtcgagttccagccaacactccgaacccttgcacatcccatcagtcaggaatacctgaaagacacgctgcagaaatggatccacatgtgtaatgaagacattaaaaatgggatcaccaacctgctcatgtacgtgaagagcatgaagggtctcgcgggaatccgggacgccatgtgggagttacttaccaatgagtccaccaatcacagctgggatgtgctatgtcggcggcttctggagaagccgctcttgttctgggaagatatgatgcagcaactgttccttgaccgattacagactctgacaaaagaaggctttgactccatctccagtagctccaaggagctcttggtttcagctttgcaggaacttgaaagcagcaccagcaactccccttcaaataagcacatccactttgagtacaacatgtcgctcttcctctggtctgagagtcctaatgacctgccttccgatgcggcctgggtcagcgtggcaaaccggggtcagtttgccagtagcggcctctccatgaaagcacaagccatcagcccttgtgtacagaacttctgttctgccctggattctaagctgaaggttaaactagatgacctcctggcttacctcccctctgatgactcatcactgcccaaggacgtttctcccacacaggccaagagttctgcctttgacagatacgcagatgcggggaccgtgcaggagatgctgcggactcagtccgtggcatgcatcaagcacatcgtggactgcatccgggcagagctacagagcattgaagagggtgtgcaagggcaacaggatgccctcaacagtgccaagctgcactcagttcttttcatggccagactctgccagtccctgggagagctgtgcccccatctgaagcagtgcatcctgggaaaatcagagagctcagagaaaccagcaagggagtttagggctctgagaaaacagggaaaggtgaaaactcaggaaatcattcctacacaggccaagtggcaagaggttaaagaagtactcctccagcagagcgtgatgggctaccaggtctggagcagtgcagttgtgaaagttttgattcatggattcacccagtcattacttctagatgatgctggctcagttctggccacagccaccagctgggatgagctagaaattcaggaggaggcagagtctggcagcagtgtcacatccaagatccgactccctgcacagccgtcctggtatgtacagtccttcctgtttagtttatgccaggaaattaatcgggttggaggccatgccttgccaaaggtgacattacaggagatgctgaaaagctgtatggttcaagtagtagctgcctatgagaaactctccgaagaaaaacagattaagaaagaaggtgcatttccagtcacccagaaccgggcgctgcagctgctttatgatctgcgttacctcaacattgttctgacagccaagggtgacgaggtgaagagtggccggagcaagccagactccagaattgagaaagtgactgaccacctggaagccctcattgatccatttgacctggacgttttcacgccacacctcaacagcaaccttcatcgcctggtgcagcgaacttctgttctgtttggattggtgactggtacagagaatcagctcgccccccggagcagtacgttcaactcccaagaaccccataacatcctgccactggcatccagtcagatcaggtttggacttctcccactgagcatgacaagcactcgaaaggctaaatcaaccagaaacatcgaaacaaaagctcaggttgtccccccggcacgctccacagctggtgacccgacagttcctggctccttgttcagacagcttgtcagtgaagaagacaacacgtctgcaccttcattattcaaacttggctggctctctagtatgactaagtaacatggcaacacatctgtctctccctaaataaatactaccacattatttcttctaaaaaaaaaaaaaaaaaaaaaaaaa

SEQ ID NO: 650 - DNA, 2527 bp, human
aggaggtagtgactggcatacatggctcagtttgtccaggtcctggctgaaataggtgactttggtcgcttccagatacagctattgatcctgctgtgtgttctcaacttcctgtctcccttctacttttttgcccatgtcttcatggtcctagatgagccccaccactgtgcagtggcttgggtgaagaaccacactttcaacctgagtgctgctgaacagctggtactgagcgtgcccctggacactgcaggtcacccagagccctgcctcatgttccggccaccccccgccaatgccagcctgcaggacatcctcagccaccgcttcaatgagacgcagccttgtgatatgggctgggaatatcctgagaacaggctcccatccctgaagaatgagttcaacctggtttgtgatcggaagcacctgaaggacaccacacagtcagtgttcatgggtgggctccttgttggcaccctcatgtttgggcccctctgcgaccggattggccgcaaggccacaatcctggcgcagctgctcctcttcaccctcatcggcctggccacagcttttgtgcccagctttgagctctacatggccctgcgctttgctgtggctactgccgtcgctggacttagcttcagcaatgtcaccctactgacagaatgggtggggccctcatggaggacgcaggccgtggtcctggcccagtgcaacttctccctcgggcagatggtgcttgcgggactcgcctacggtttccgcaactggaggctccttcagatcaccggcactgcgcctggcttactgctcttcttctacttctgggctctgccagaatctgcacgttggctcctgacccgtgggaggatggacgaggcgatacaactgatccagaaggcggcctcggtcaataggcggaaactctccccggagctcatgaaccagctggtcccagagaagacaggcccctcagggaatgccctggatctgttcagacacccccagctccggaaggtgaccctgattatcttctgtgtctggtttgtggacagtctggggtactacggcctgagcctccaagtgggggacttcggcctggacgtctatctgacgcagctcatctttggagctgttgaggtgcctgcccgctgttccagcatcttcatgatgcagaggtttggccgcaagtggagccagttggggaccttggtcttgggtggcctgatgtgtatcatcatcatcttcatcccagcagatctgcccgtggtggtcaccatgctggctgtggtggggaagatggccacagctgctgcctttaccatctcctatgtgtactctgccgagcttttccccaccatcctccggcagacaggcatggggctggtgggcatcttctcacggatcgggggcatcctcacaccacttgtgatcctgctgggagagtaccacgctgccctccccatgctcatctacggcagcctccccatcgtggccggcctgctgtgcaccctgctgccagagacccatggccagggcctgaaagacaccctccaggacctggagctggggcctcacccacggtcccccaaatcagtgccctcagagaaggaaacagaggccaagggaagaacttccagcccgggagtggcctttgtgagcagcacatacttctgattgaggtctctaagagctggaccatcagcagcagggagctgcctaaacacctccttggatatggccaggacccacagggacacagggcaagaccagccttgcttatggaggcaggacaccacaatctggcccatggctgtcacctcctgccgagtccaatcccagactgggaaccaccatctgagacaggacctcccggcctccttcacctttctcatctccagagccctgcccccaatactctgtctgggttaggatcttgggtatgtcttggaattaacttgtcctctaacaatcttcatggggtatggctctcttgatctcctcaatctggagtcccctgccctcaaaacacagtgatgttcagaacagaacacaaggtaagccctttccaatttgtgggaacaggaggggagaggaaacaaatgtgaagttgtggactctacccaggcaggtggatgaaaatgctgtggataaaaggaaggttatgattccttctagcggatggaccagattcctctggctaacgtatggccccataggtcactgggtcatacagagagaagattcagttcagcctaaatcaaaacttccaccttgtgttcacttcaaagatggcccaacccccgccctacactcagctcatgcctaacctatgtgtggctcagggaccagcttggggaaggaaaggaggtttgttctgctccccgcctcaccccgcctcctcctgctcatgctcagctgcttctggaccttccagggcccatgcagggtgagggaaagggtagaggtcttttcaccgagctgctgctggttgcagttctttctggtgcacattggctaatgccag

SEQ ID NO: 651 - DNA, 2934 bp, human
aaagtccccggcccgttttcctcctgtgaagacatagctgcgggtggctgtgctggtggcgttcaagatgtcgaccaagaatttccgagtcagtgacggggactggatttgccctgacaaaaaatgtggaaatgtaaactttgctagaagaaccagctgtaatcgatgtggtcgggagaaaacaactgaggccaagatgatgaaagctgggggcactgaaataggaaagacacttgcagaaaagagccgaggcctatttagtgctaatgactggcaatgtaaaacttgcagcaatgtgaattgggccagaagatcagagtgtaatatgtgtaatactccaaagtatgctaaattagaagaaagaacaggatatggtggtggttttaatgaaagagaaaatgttgaatatatagaaagagaagaatctgatggtgaatatgatgagtttggacgtaaaaagaaaaaatacagagggaaagcagttggtcctgcatctatattaaaggaagttgaagataaagaatcagagggagaagaagaggatgaggatgaagatctttctaaatataagttagatgaggatgaggatgaagatgacgctgatctctcaaaatataatcttgatgccagtgaagaagaagatagtaataaaaagaaatctaatagacgaagtcgctcaaagtctcgatcttcacattcacgatcttcatcacgctcatcctccccctcaagttcaaggtctaggtccaggtcccgttcaagaagttcttccagttcgcagtcaagatctcgttccagttccagagaacgttcgagatctcgtgggtcgaaatcaagatccagctccaggtcccacaggggctcttcttccccacgaaaaagatcttattcaagttcatcatcttctcctgagaggaacagaaagagaagtcgttctagatcttcttcatctggtgatcgcaaaaaaagacgaacaagatcacggtcacccgaaagccaggtgattggtgaaaacactaaacaaccctgagcccagggccaacccctacggaacaccactactttacccagacgccacaggtcatcatctggatcatcccattctggttcccgttcaagttcaaaaaagaaataatgtattaaaatttacatcttaaaaaaatccagtacagtgcatgaagcatatttttaaagaagttggtgtcttacttggtcagaagtgctaaatctgctagtagaggtgcatgcctttcattgcttttcaaaacaatacagctgtgtttatttgtgaagttaaaagtaaatagcattttaagccataatgtcccaaaatagatgttctgtcattcattatttacaaccatttgcttcatttaaaaccatttcagctataacaaagtactttgcttcctaatttaaacccatttttgtcatttccaaatacatcctgtccattggctaagacaggattacctaggcttgcctgaactttgggcatggaagaaagactggaaactagttggaaacaacatacttatggaaaagaaagtcagcctttttatgctgttaacagatgtcagagtgattctcaccaaaaaaagttaaactatgttgtaagcagccaactgtaaatgtctattttgaaattccctatgctaagggtgccttagaatcattgtgtctcttttatccagctttacttttttgctccacatttaatgcaaaagaatcttgtgatgtctacaaggagagaagtgggatatattttcctttctgacacataatttggggcaaaaaagaaagtcttaagagtttatcttttctctgctgatacggttgcttgataaagacatctcaaaatgtttaccaatgttttaagaagctttgtgtgatattcttccaaatgtagttaccaaatataatatggtagaaaaggctaaatcatacttaatgagcaaattgaagtaagcttttaaagtatatttctcttttggtgaaaggccaatggagacattgtgaatttaagtgaacatttgcctcaagatgttaactataaacacactgcatacaattttcttctgaataacaaatgaatgcttattgctgcatgatgtaagcaaaagtcattatttttcctattcatttgaaataagttatggcttaaaatgcttttggagtttatttctcaaaattaaaatctggtcacatgagctttagtttgttttctggtttaaaaaataaaaaggtttctcttaacagtatttccagtgacaatgcaaggtaagtatatcaaaggaaatcaacagttgtgcttgggggctttttgttatgggatattgatttcttgttttttttccgtaacattgtctgctgcaatttaaataaaaattacgacattttaagatatttcatagacaaaccaaacaaaaatatatgtttttactttaaagtgaatgtttttctcttcagctgatctaaaaatgaaagcaagatatcttatgtagaaatattttgataatatttttacagtgagctttcccatgtttttatgtcttaagtttctttgctgcgtttatgtaggttgcacaagaacttttactcacttgtaattgtgcctcagactttttgaaagtctaccttctaaattgccccgacgatctagattctacatgttaccattggtttattcttgtgctttctgtatttaaaactttggctgtactaagcaaatgcaaggttataatttagctaatagtagtttacagacaattctgatgattatgatttcatttggtttaactaagctgtactagttcatttcataaggaaatgatactgtagacaaatgtaaataaagcctgtgagtcaagcatcaagtggtgtttgttagaaataaactagagatttttaaactctgaaaaaaaaaaaaaaaaa

SEQ ID NO: 652 - DNA, 1507 bp, human
ataccggttgccgccatgatagatcagcagaagcgtaagggcccagagttgccgctggttccagtcaagcggcagcggcatgagttgctgttgggagcggggtctggcccaggagccgggcagcagcaggcgacgccgggagccttgctgcaagcgggacctccaagatgttcctcccttcaagccccaatcatgctgctctctggacatgaaggggaagtctactgctgcaagttccaccccaacggatccaccttagcatctgcaggatttgaccgactgatattactgtggaatgtctatggtgactgtgataactatgccacactgaagggacacagtggagcagtgatggaattgcattacaacacagatggcagtatgcttttctcagcatccacagataaaaccgtggctgtgtgggatagtgaaacaggtgagagggttaaaaggctaaagggacatacttcctttgtgaattcctgttatccagccaggaaaagccctcagcttgtctgcactggcagtgacgatggcacagttaagctttgggacatccggaagaaagcagccatccagacatttcagaacacgtaccaggtgttagctgtgaccttcaatgacacaagtgatcagattatttctggtggaatagacaatgatatcaaggtctgggacctgcgccagaacaagctaacctacaccatgagaggccatgcagattcagtgactggcctgagtttaagttctgaaggctcttatcttttgtccaatgcaatggacaatacagttcgtgtctgggatgtccggccatttgcccccaaagagagatgtgtaaagatatttcaaggaaatgtgcacaactttgaaaagaaccttctgagatgttcttggtcacctgatggaagcaaaatagcagctggctcagccgacaggtttgtttatgtgtgggataccacaagcaggagaatattgtataagctgcccggccatgctggctccatcaatgaagtggctttccaccctgatgagcccatcattatctcagcatcgagtgacaagagactgtatatgggagagattcagtgaagatatggactggaagactccaaggccgcttgtctttgagacctcagactgcataagtgatgccaaatgttggatgtccaggctagcaccctcccttcagatgaccattgctagcaagaaacaggaggcggtggccatattccaaaaaccaattttgtcccatttcaccaggatgactaaggcaagcttccctgtggcctttaaaaaccacctgccagatttcagggactgtttttttttttctttttcttttttcctgttttctaatgcaggcccaatgtgacaaatttgttggttgggatttttttttttttttgtaactggcttgtatgatattttctttctgtatttctctatatcattttgtattaaaagccaaatagatgcctttttacaagaaaaaaaaaaaaaaaaaaaa

SEQ ID NO: 653 - DNA, 1803 bp, human
atgacagcggctccggcgtctccgcagcagatcagggaccggctgctgcaggccatcgacccccagagcaacatccggaacatggtggcggtgctggaagtcatctccagcctggagaaataccctattaccaaagaggcacttgaggaaacacgacttgggaagctcatcaacgacgtccgcaagaaaaccaagaacgaggagctcgccaagcgggccaagaagctgctgcggagctggcagaagctcatcgagccggcacaccagcatgaggcggcgctgcgggggctggcgggggccaccggctctgccaacgggggcgcacacaactgccggccggaggtgggggcggctggcccacccaggagcatccatgacctgaagagccgcaatgacctccagaggctgcccgggcagcggctggacaggctgggcagccgcaagcgccggggtgaccagcgtgacctcggccacccagggccgccacccaaggtctccaaagctagccacgaccccctggtccccaactcatcccccctccccaccaacgggatcagtgggagtccagagagcttcgccagctccctggatggcagtgggcatgcaggcccagagggcagccgcctggagcgtgacgagaatgacaagcacagtggcaagatccccgtcaacgccgtgcgaccgcacaccagctccccgggcctgggcaagccccctggaccctgcttgcagccaaaggcttcggtgctgcagcagctggacagggtggacgagactccggggcctccccatcccaagggaccccctcgctgctctttcagtcctcggaactcacggcatgagggctcctttgcccggcagcagagcttgtatgcacccaagggctccgtgcccagcccctcaccgcggccccaggcactcgatgccacacaggtgccgtcaccgcttccactggcacagccgtccacaccccccgtacggcggctcgagctgctgcccagtgcggaaagcccagtgtgctggcttgagcagcctgagagccaccagcggctggcggggccgggctgcaaggcagggctgtccccagccgagcccctcctgtcccgggcaggcttttccccagactcctccaaggcggacagtgatgctgcctcctcagggggctcggacagtaaaaagaagaagaggtaccgacctcgagactatacggttaacttggacgggcaggtggctgaggcgggcgtcaagcctgtccggttaaaagagcggaagctcacctttgaccccatgacgagacagatcaaacctctgacccagaaagagccagtgcgggcagacagccctgtgcacatggagcagcagtccaggacagagctggacaagcaggaggccaaggccagcctccagagccccttcgaacagacgaactggaaggagctgtcacgcaacgagatcatccagtcctacctgagccggcagagcagcctgctctcatcatcgggcgcgcagaccccaggggctcaccacttcatgtctgagtacctgaagcaggaggagagcacccggcaaggggccaggcagctgcatgtgctggtgcctcaaagcccgcccacggacctccctggtctgacccgggaggtcacacaggacgatctcgacagaatccaggccagccagtggccgggggtgaacgggtgtcaggacacacagggtaactggtatgactggacgcagtgcatatcgctcgatccgcacggcgacgacgggcgcttgaacattctgccttatgtctgcttggactga

SEQ ID NO: 654 - DNA, 4731 bp, human
tgaactgaggcgaactccgccgccaagtgagtgaggaggaggaggaggagaaggaggaggaggaagaggaggagcgcagtcggagcgcggcggcagcggcagaggcgccgcggcggggaccagcccagagagaccccccgagcccgcggcacaggcggcggcggcgctgagcgggctcgaccagccgagcgagcggcggccccggctcctcctcgtccggcgccagcagcccgcgccccgcgcccgcactcggccagccgagacccgcctcccgcccgcccgccggcctcgtgagggacgcgccgagccgggcggccgagagcggcggcggctgggagcgcgtcgggcccgggcggaaagtgcctgcggggggcgggcgagcgcgcggtgccggccgccccggggctcggcgcgggagccagagcgggagccggcgcggagcgggacgccgggtcccgagcggcccgcggccggggctcgcccccgcccctccctcctctccggcggcggcggcggcggcggcgggcggagtgagctgcggagcctggaatatggtcggggaaatggaaacgaaggagaagccgaagcccaccccagattacctgatgcagctgatgaacgacaagaagctcatgagcagcctgcccaacttctgcgggatcttcaaccacctcgagcggctgctggacgaagaaattagcagagtacggaaagacatgtacaatgacacattaaatggcagtacagagaaaaggagtgcagaattgcctgatgctgtgggacctattgttcagttacaagagaaactttatgtgcctgtaaaagaatacccagattttaattttgttgggagaatccttggacctagaggacttacagccaaacaacttgaagcagaaaccggatgtaaaatcatggtccgaggcaaaggctcaatgagggataaaaaaaaggaggagcaaaatagaggcaagcccaattgggagcatctaaatgaagatttacatgtactaatcactgtggaagatgctcagaacagagcagaaatcaaattgaagagagcagttgaagaagtgaagaaattattggtacctgcagcagaaggagaagacagcctgaagaagatgcagctgatggagcttgcgattctgaatggcacctacagagatgccaacattaaatcaccagcccttgccttttctcttgcagcaacagcccaggctgctccaaggatcattactgggcctgcgccggttctcccaccagctgccctgcgtactcctacgccagctggccctaccataatgcctttgatcagacaaatacagaccgctgtcatgccaaacggaactcctcacccaactgctgcaatagttcctccagggcccgaagctggtttaatctatacaccctatgagtacccctacacattggcaccagctacatcaatccttgagtatcctattgaacctagtggtgtattaggtgcggtggctactaaagttcgaaggcacgatatgcgtgtccatccttaccaaaggattgtgaccgcagaccgagccgccaccggcaactaacctatgaccttctgacctctgaactcttcacccaatgatgacctgaccatgcctgcctgctgatcagttaactggtaatcgcctttgcttgcctgtcgtcagtgcagcgagctgaggcacttgtccgttcgtcttaccatctaaccaaacaaaagacaaagaaattgttgtcctccaactcagctttttttttttttttttcctgtttgggtgaaagtggttctagaaactgcactgaatagtagtaaagcaataaggcccaattcatcccacagcactgatcatcttttaatatcccaccctaagcgaacggtaagaaggcctctcttaagaaggggagacagatggtccttaactactcaatgacagaggcagttactgtgagagacttctaggaatctttttcttctcatagcgaagtcaaagctctctctgaatgtactgtgtgatgatgcatcatgcatgaaccttcggtcagggatatcattggtgaagtgatttcaaaaagtattcaaaatttgatatgctgtttagtcactacagtgccctcaaagggcagaagttgcagccttttttatattgcctgccaaaatttgaagtattagaagaaagtgtgccatgagagaaaaacttaaggagttttgaaaagtaatgcaaataacaaaactgcaacactatttttaaaaagataaatatctgagttaaaattactgaatctttattttacacctaaaaaaatatgagaacaaggtacatgcattatgtgtcacattactgggcaaactgttcaagtatttttttttaaacctccctgtatagaaaaaaatcattaaggatgtaaaagccatgcttgcctatttgctgtatacatgtaatgaaattgtagataaagtgtagtgcattgaaacaaatgaacaaaaagtagatacttttactatacaagggtgctggtgcagaaaaaaatatatatatttttggaaatgtagcattttatactttcaagtgttataaaaaaaaagaaaaagaacaaagaaaccctttatttcattaaatgattttttctggtggttgtcaagaaacaaaagaccaaaagagcctttttgtctttcttttttattttttaagtattggaataagtctaaagaaaagaaagtgccttattttccttcatggtcattcagtcaagtgtctcataaagatcagctcctccctcagaatacaagttaatgcatgttactcagtcgcccagtatgtgaaagaagatatgagggagacaaatgagttgatagtttgaattataggatttttgccacgttaccttgatgcaaatttgccaaatctgatactgtgaaaagatttgataacttttctaatgcctgactagtaagttttaaaacatcattctttaaaagaatagtttaatacttttggttattccaatcttcaatgttaacccaaaggattctgagataaaaattatgtgtcatctaaacttcagtttacagacaaaattagagctttgttttatttggagaagggggatgcattcatttgattttgttttttgtttttaattaattgaatataataggatacctagcaaatgttttcacaaaagtgaatctttgtgattttcattctagaaaacaatgttttaaatcacccaaatttaatcacatgtctttatatcataccagataactggtgtagtgtatccttttactgtttcaataacctctgcctcccccaccccttaactttaaaagaatgtgaaaaactagcatcatagtgcatataaatactcaaccacatttcagcttaagcttctaatttctcaagaagttgaaacagttagttatgtagttgaagcaatttgtgtgcaaagcctacatctaaacacttgagtgaataatcattaactgctcagtaccagacgtggcaaatctcaagtgacagtggacccccccccccgcccagcttatcaactcgtcccctcttccacaccttcccagcatcacagtcagaggtcagcaggaagctgagtcattaccttcttggtgacctcccccaccatcttgtctcacttggaaaccgttgtcagtttatttactatgcaatagacattcattgttttgtatccagctagctttggtttaatatgccactgctttgtctttctgttacacatacagttttgatttatttacaatatatgctgtgccattttgatttttatattgtttggttggttgaataaatttgcgacactcaaacacttgaggtgatagttgttaaaaacaataccagtatttgatccagtttcatctcaactatgttatacctggacattttagatgtttatcaaaggtcttttatggggaagaaagtaaatgtatgaaataataaatgtgtgacatttatagggaatgttggctctgaacaaacttttgaaaacttggttgacaaaattttggatcaactgaaaaaagcatgacttttgaaatctctgaatgccttggttctcagtattatcattctttattgaatttatttcttattaaaatatgtagtttttaagactttttttctgacagtattatgtaattttttagcgtgggtagatgggagtgtcgcttgtatgttatcgtacagctgacatgtatttttgtctattctttattatcttagtttcatgctatgtatgtaccataaccaacctattgcctatgagaaacatgtaagataatgtatttacagccattgttacaagtttataatgtatttttctatcttgttttatatgtatgttatataacattcaaaaagaatttttttcttgattgagaaaaggatacaaaatgcaaaatccacaattttgataactgaaaattgccaattgttttgcagtactttattatattgggtgtcttgtcttttttgggcttttagttagctaatgaatgaatacattagacacttttgggttttagttgggattttacatagcttgcattttaattctttggttctttgctgtttctattaacccacagcattattttaataaatgttataataccaacctactaactctggactttgtctgtttattaacctttatatgtttaattaaaataaacaaataaagacaaaa

SEQ ID NO: 655 - DNA, 4662 bp, human
ggaaagtccaccttccccatcaaggccagcctgggaacatggagtggcagcggccgcagcaaatgagagagccaacgcgcggaaagtttgctcaatgggcgatgtccgagataggctgtcactcaggtggcagcggcagaggccgggctgagacgtggccaggggaacacggctggctgtccaggccgtcggggcggcagtagggtccctagcacgtccttgccttcttgggagctccaagcggcgggagaggcaggcgtcagtggctgcgcctccatgcctgcgcgcggggcgggacgctgatggagcgcgccatcagcccggggctgctggtacgggcgctgctgctgctgctgctgctggggctcgcggcaaggacggtggccgcggggcgcgcccgtggcctcccagcgccgacggcggaggcggcgttcggcctcggggcggccgctgctcccacctcagcgacgcgagtaccggcggcgggcgccgtggctgcggccgaggtgactgtggaggacgctgaggcgctgccggcagccgcgggagagcaggagcctcggggtccggaaccagacgatgagacagagttgcgaccgcgcggcaggtcattagtaattatcagcactttagatgggagaattgctgccttggatcctgaaaatcatggtaaaaagcagtgggatttggatgtgggatccggttccttggtgtcatccagccttagcaaaccagaggtatttgggaataagatgatcattccttccctggatggagccctcttccagtgggaccgagaccgtgaaagcatggaaacagttcctttcacagttgaatcacttcttgaatcttcttataaatttggagatgatgttgttttggttggaggaaaatctctgactacatatggactcagtgcatatagtggaaaggtgaggtatatctgttcagctctgggttgtcgccaatgggatagtgacgaaatggaacaagaggaagacatcctgcttctacagcgtacccaaaaaactgttagagctgtcggacctcgcagtggcaatgagaagtggaatttcagtgttggccactttgaacttcggtatattccagacatggaaacgagagccggatttattgaaagcacctttaagcccaatgagaacacagaagagtctaaaattatttcagatgtggaagaacaggaagctgccataatggacatagtgataaaggtttcggttgctgactggaaagttatggcattcagtaagaagggaggacatctggaatgggagtaccagttttgtactccaattgcatctgcctggttacttaaggatgggaaagtcattcccatcagtctttttgatgatacaagttatacatctaatgatgatgttttagaagatgaagaagacattgtagaagctgccagaggagccacagaaaacagtgtttacttgggaatgtatagaggccagctgtatctgcagtcatcagtcagaatttcagaaaagtttccttcaagtcccaaggctttggaatctgtcactaatgaaaacgcaattattcctttaccaacaatcaaatggaaacccttaattcattctccttccagaactcctgtcttggtaggatctgatgaatttgacaaatgtctcagtaatgataagttttctcatgaagaatatagtaatggtgcactttcaatcttgcagtatccatatgataatggttattatctaccatactacaagagggagaggcacaaacgaagcacacagattacagtcagattcctcgacaacccacattacaacaagaatatccgcaaaaaggatcctgttcttcttttacactggtggaaagaaatagttgcaacgattttgttttgtatcatagcaacaacgtttattgtgcgcaggcttttccatcctcatcctcacaggcaaaggaaggagtctgaaactcagtgtcaaactgaaaataaatatgattctgtaagtggtgaagccaatgacagtagctggaatgacataaaaaactctggatatatatcacgatatctaactgattttgagccaattcaatgcctgggacgtggtggctttggagttgtttttgaagctaaaaacaaagtagatgactgcaattatgctatcaagaggatccgtctccccaatagggaattggctcgggaaaaggtaatgcgagaagttaaagccttagccaagcttgaacacccgggcattgttagatatttcaatgcctggctcgaagcaccaccagagaagtggcaagaaaagatggatgaaatttggctgaaagatgaaagcacagactggccactcagctctcctagcccaatggatgcaccatcagttaaaatacgcagaatggatcctttctctacaaaagaacatattgaaatcatagctccttcaccacaaagaagcaggtctttttcagtagggatttcctgtgaccagacaagttcatctgagagccagttctcaccactggaattctcaggaatggaccatgaggacatcagtgagtcagtggatgcagcatacaacctccaggacagttgccttacagactgtgatgtggaagatgggactatggatggcaatgatgaggggcactcctttgaactttgtccttctgaagcttctccttatgtaaggtcaagggagagaacctcctcttcaatagtatttgaagattctggctgtgataatgcttccagtaaagaagagccgaaaactaatcgattgcatattggcaaccattgtgctaataaactaactgctttcaagcccaccagtagcaaatcttcttctgaagctacattgtctatttctcctccaagaccaaccactttaagtttagatctcactaaaaacaccacagaaaaactccagcccagttcaccaaaggtgtatctttacattcaaatgcagctgtgcagaaaagaaaacctcaaagactggatgaatggacgatgtaccatagaggagagagagaggagcgtgtgtctgcacatcttcctgcagatcgcagaggcagtggagtttcttcacagtaaaggactgatgcacagggacctcaagccatccaacatattctttacaatggatgatgtggtcaaggttggagactttgggttagtgactgcaatggaccaggatgaggaagagcagacggttctgaccccaatgccagcttatgccagacacacaggacaagtagggaccaaactgtatatgagcccagagcagattcatggaaacagctattctcataaagtggacatcttttctttaggcctgattctatttgaattgctgtatccattcagcactcagatggagagagtcaggaccttaactgatgtaagaaatctcaaatttccaccattatttactcagaaatatccttgtgagtacgtgatggttcaagacatgctctctccatcccccatggaacgacctgaagctataaacatcattgaaaatgctgtatttgaggacttggactttccaggaaaaacagtgctcagacagaggtctcgctccttgagttcatcgggaacaaaacattcaagacagtccaacaactcccatagccctttgccaagcaattagccttaagttgtgctagcaaccctaataggtgatgcagataatagcctacttcttagaatatgcctgtccaaaattgcagacttgaaaagtttgttcttcgctcaatttttttgtggactactttttttatatcaaatttaagctggatttgggggcataacctaatttgagccaactcctgagttttgctatacttaaggaaagggctatctttgttctttgttagtctcttgaaactggctgctggccaagctttatagccctcaccatttgcctaaggaggtagcagcaatccctaatatatatatatagtgagaactaaaatggatatatttttataatgcagaagaaggaaagtccccctgtgtggtaactgtattgttctagaaatatgctttctagagatatgatgattttgaaactgatttctagaaaaagctgactccatttttgtccctggcgggtaaattaggaatctgcactattttggaggacaagtagcacaaactgtataacggtttatgtccgtagttttatagtcctatttgtagcattcaatagctttattccttagatggttctagggtgggtttacagctttttgtacttttacctccaataaagggaaaatgaagctttttatgtaaattggttgaaaggtctagttttgggaggaaaaaagccgtagtaagaaatggatcatatatattacaactaacttcttcaactatggactttttaagcctaatgaaatcttaagtgtcttatatgtaatcctgtaggttggtacttcccccaaactgattataggtaacagtttaatcatctcacttgctaacatgtttttatttttcactgtaaatatgtttatgttttatttataaaaattctgaaatcaatccatttgggttggtggtgtacagaacacacttaagtgtgttaacttgtgacttctttcaagtctaaatcatttaataaaactttttttaaattaaaaaaaaaaaaaaaaaaa

SEQ ID NO: 656 - DNA, 1771 bp, human
gttcgtagcagaaatggcggctgcggcggctcgagtggtgttgtcatccgcggcgcgaggcggcctctggggtttcagcgagagtcttctaatccgaggcgctgcgggacggtcattatattttggagagaacagattaagaagtacacaggctgctacccaagttgttctgaatgttcctgaaacaagagtaacatgtttagaaagtggactcagagtagcttcggaagactctgggctctcaacatgcacagttggactctggattgatgctggaagtagatacgaaaatgagaagaacaatggaacagcacactttctggagcatatggctttcaagggcaccaagaagagatcccagttagatctggaacttgagattgaaaatatgggtgctcatctcaatgcctatacctccagagagcagactgtatactatgccaaagcattctctaaagacttgccaagagctgtagaaattcttgctgatataatacaaaacagcacattgggagaagcagagattgaacgtgagcgtggagtaatccttagagagatgcaggaagttgaaaccaatttacaagaagttgtttttgattatcttcatgccacagcttatcaaaatactgcacttggacggacaattttgggaccaactgaaaatatcaaatctataagtcgtaaggacttagtggattatataaccacacattataaggggccaagaatagtgcttgctgctgctggaggtgtttcccatgatgaattgcttgacttagcaaagtttcatttcggtgactctttatgcacacacaaaggagaaataccagctctgcctccctgcaaattcacaggaagtgagattcgtgtgagggatgacaagatgcctttggcgcaccttgcaatagctgttgaagctgttggttgggcacatccagatacaatctgtctcatggttgcaaacacgctgattggcaactgggatcgctcttttgggggaggaatgaatttatctagcaagctggcccagctcacttgtcatggcaatctttgccatagctttcagtctttcaacacttcctacacagatacaggattatggggactgtatatggtttgtgaatcatccactgttgcagacatgctacatgttgttcaaaaagaatggatgcgactctgtacaagtgtcacagaaagtgaggttgcacgagccagaaatcttctgaaaacaaacatgttgttgcagcttgatggttcaactccaatttgtgaagatattggtaggcaaatgttatgctataatagaaggattcccatccctgagcttgaagcaagaattgatgctgtgaatgctgagacaattcgagaagtatgtaccaaatacatttataataggagtccagctattgctgctgttggtcccattaagcaactaccagattttaaacagatacgcagtaacatgtgttggcttcgtgattaaaatgctcctaatcaagattgtttgaacacatgtatttataaaacagagctagagaaaaataaaaatgaacatgtatatacatttggaaatttgaattaaatactgtatcatactttcaaaggataaaaagactacccctctgaaggttgttttgtattaatggtcagtctttgttctctgagaaattatgttggaagcagcatactttcaaattattaccatgagtataattttaagaatgaaaatgtttacagtattttcagttttattataaaaatgcacacacaa

SEQ ID NO: 657 - DNA, 7250 bp, human
ccttggccgagaccggtcctctgcggagagggccccgccctctgtgaaggcccgcccgggaattggcggcggcgctgcagccatttccggtttcggggaggtgggtggggtgcggagcgggacttggagcagccgccgccgctgccaccgcctacagagcctgccttgcgcctggtgctgccaggaagatgcggccggagcccggaggctgctgctgccgccgcacggtgcgggcgaatggctgcgtggcgaacggggaagtacggaacgggtacgtgaggagcagcgctgcagccgcagccgcagccgccgccggccagatccatcatgttacacaaaatggaggactatataaaagaccgtttaatgaagcttttgaagaaacaccaatgctggttgctgtgctcacgtatgtggggtatggcgtactcaccctctttggatatcttcgagatttcttgaggtattggagaattgaaaagtgtcaccatgcaacagaaagagaagaacaaaaggactttgtgtcattgtatcaagattttgaaaacttttatacaaggaatctgtacatgaggataagagacaactggaatcggccaatctgtagtgtgcctggagccagggtggacatcatggagagacagtctcatgattataactggtccttcaagtatacagggaatataataaagggtgttataaacatgggttcctacaactatcttggatttgcacggaatactggatcatgtcaagaagcagccgccaaagtccttgaggagtatggagctggagtgtgcagtactcggcaggaaattggaaacctggacaagcatgaagaactagaggagcttgtagcaaggttcttaggagtagaagctgctatggcgtatggcatgggatttgcaacgaattcaatgaacattcctgctcttgttggcaaaggttgcctgattctgagtgatgaactgaatcatgcatcactggttctgggagccagactgtcaggagcaaccattagaatcttcaaacacaacaatatgcaaagcctagagaagctattgaaagatgccattgtttatggtcagcctcggacacgaaggccctggaagaaaattctcatccttgtggaaggaatatatagcatggagggatctattgttcgtcttcctgaagtgattgccctcaagaagaaatacaaggcatacttgtatctggatgaggctcacagcattggcgccctgggccccacaggccggggtgtggtggagtactttggcctggatcccgaggatgtggatgttatgatgggaacgttcacaaagagttttggtgcttctggaggatatattggaggcaagaaggagctgatagactacctgcgaacacattctcatagtgcagtgtatgccacgtcattgtcacctcctgtagtggagcagatcatcacctccatgaagtgcatcatggggcaggatggcaccagccttggtaaagagtgtgtacaacagttagctgaaaacaccaggtatttcaggagacgcctgaaagagatgggcttcatcatctatggaaatgaagactctccagtagtgcctttgatgctctacatgcctgccaaaattggcgcctttggacgggagatgctgaagcggaacatcggtgtcgttgtggttggatttcctgccaccccaattattgagtccagagccaggttttgcctgtcagcagctcataccaaagaaatacttgatactgctttaaaggagatagatgaagttggggacctattgcagctgaagtattcccgtcatcggttggtacctctactggacaggccctttgacgagacgacgtatgaagaaacagaagactgagcctttttggtgctccctcagaggaactctccctcacccaggacagcctgtggcctttgtgagccagttccaggaaccacacttctgtggccatctcacgtgaaagacattgcctcagctactgaaggtggccacctccactctaaatgacattttgtaaatagtaaaaaactgcttctaatccttcctttgctaaatctcacctttaaaaacgaaggtgactcactttgctttttcagtccattaaaaaaacattttattttgcaaccattctacttgtgaaatcacgctgaccctagcctgtctctggctaaccacacaggccattcccctctcccagcaccttgcagacttgggcccatcaagagctactgctggccctggctccgcagcctggatacttacctggccctcctccctagggagcaagtgccttccacttacttcccatccaggtctcagaggtctcaaggccaaccttggaatccttatttaaccattcaagtaatcaacggaagttttcaccctttaatcttaagtttagccttttaagaaaaacagtaagcgatgactgctgaaaggctcattgtgtaatctcccaagggtttggtcttattccattttcttctggtcaccagatgatttcttcctttaccatcaaatacttcttcataatggtcacagtctgaggatgtgcgcaaattctggttcttcccaagctctaaccgtaacacgtcccaccccctttttaaagcacttactgttttcagagcacccatatcccaccctggtgagaaggccactctcacatctgagtgttgggtacaaagctgctccgtagagtgatgtgcactcctggtgggtgaggggcaggggcagtggcagtgtgcaaagaattgattactccttgcagagcctgtggcttgcatttcctactgctttctacgtttgaaaattatgacagtctctggctaggtctgggtccagattaggatttaaactgataaaggaaactgttggtaaatcctctgctcagaaagcatttatcatgttcctatttaaggattaggtttattaatttaggcctcttagaagctaacccacttaaatattactcttctgaatgctagttctcttttattcttgatgtcctaagtcaattgaatctggcatctggggctagggtctgcctgtctacatattttttatttttttctgagaaattctgaacacatagatctctttcctaaactgacattttctattttgactgttttcatactataaccaggtaaagggacttctttcagagagctttatactgcctgaccaaagaacaaatctgaaaatcaccattttaaagttattttttcagttgaaccaaagtttaagtgaagaggacttttggcatattatacccaggatcagtttgtctttttgtatccatcaagtattacaggagaaggattgggaacagaatggaaaaacagtgtatgaaagtcatgttacaggccgagtgcggtggctcacacctgtaatcctagcactttgggaggctgaggcaggtggctcacttgaggtcaggaattcaagaccagcctggccaacatggtgaaaccccgtctctactaaaaagacaaaaaattagctgggcgtggtggcgggcacctataatcccacctacttggtaggctgaggcaggagaatcgcttgaacccaggaggcggaggttgcagtgagacgagattgtgccactgcactctagcctgggtgacagagcaaaactgtgtctcaaaaaaaaaagtcatgttacacatttaagtttttgaaattgctccttttatcggtaaagattctcaatccaaattctcctgggtgtgttgtcatcagctgtgatatgtttgtgcacattacgtatagcagaggatgtaagcaatattattgtttgtgaagttttgtttttaatgtcttgagtatgagttatgtttagtcactgtcagcatctgagaactttaataagcccttgagatattccaaagttttattttacttttttaaagaacagaaaaagatgaatgaaagaaccaaggagagatgcagagactatatttagcatgtataggttaaagtaagaaggaggttgtggtaactaaataggagtcctataaaatcaaatacattgtcaaccttttctgcacatctagtttcctaccatagaatcccactggaataccacatagcttttgcactgcagttactatttactaatgtaaacgtagggtttgtaaaagtcacaaacttataagcaatgaacttacctgctagtctttttattttggcttgcatgaagtcactgcaaattcaaatgtcagtaccggcatttaaaatatatctatatcactttgttggtacaaagttatttcaagataagtgtaattttgttacaagtttattttgaagagacaaatctcctgtgatctatgcaggacctctgtactttctaaagaacaaaatgttatgtagacattatacatggttggttgtctcttcttgaaactgtaatgtaaatctagggtccagtcatatcctaggtatcatcatttatccaagtacttggaggaatacaagtatatataaatacagtcattgagaataagtcgatttgaggcatacaagagtagtttcttacacagtttaacacggcctgattcaagactctgataggattcaaacagataccggttaaccatgactaccaaaactgatcatctgagtcgattgatagaggtgtgactagtccttagcactttttctcattcctctttttattcagcattgctgttacctatttcaggtttataagacctctttcagcagatcacatcagaagccaggaaatgcatagctaggagatgtcaaaagcccatatgaggagtggaccaagcagcagtggcggtttctcctcgcatctttttttttttaagctttaacttagcaggggcatggactttatagcactttttcaactttttgctttgctttggataagaaatccttacctttaaaaaaagcttctagtctccataacccccaaagtactgcttatttgtttgaagaatccagccatcgtagtgctttagtcactatcgtaaacattcatgatagggcaaggattttaaaacaggattcttgcttctgtagtcatcaaggtgaacagaagcatcctacacaaccactaagggctctatgtttgtgtcatgcctcttcaaacaccaaggagttgaacatgcttccagtgatttgtctccgtaatgccttcttcctttatttggcctttctttctttctgtaccttcaagttcttgatttttaaaattccaactctagagaaaaccaatatatggtggtgctgggctttgaagatagcatatcagacgccttggttctgtttgtacacttagccttacatttcaggaggaggcttttcattaggggcttaagctagctcctttggcttttaaaaaaaattttttttcaaatttcttcattacctaagggagcctgcatctaaatttctcaactagttcagcctagctgaattttctagtgtgtaatacactttgcttccttcttattggtgaaaaccagggggatgagtggcttccatggagagatttcctgatttctcagggaggaaaaaagtgatgacatttaccactacttttatgtttttcccctttttccaaattgataaggatttctggttcctagtgatccgggattgggcaacagtgcagaactgccagtcatgccgtaggccgtgaagaaagaatgtgagtaactgttgttttgcaaggatttgtagggttatgggcagttgttgtttgaagcattgctatgacctaattcccaaggtatctttcctctcttggtgttctaggtaagccaatgagctttaatctctacttgctataaccgtgtgcttagaaaaagaggtgagagtagtggttttccttcaaactgtccacattcatgaagattatgaattgttaggacagccagggcaagatagaccctgtctctacaaaaatttttttctaaattaaccgggcatggtggtgcctgcctgtagtcccacctgtgtgggagaatcacttgagcctgggaggtcaaggctgcagtgagccatgattgcacccctgcactccagcctgggtgacagagtgagaccctggctcaataagagggggaaaaaaaattgttaggagctgggtgcggatgcagcctgcaatcccagctacttgagaggctgaggccggaggattgcttaaacccaagaatttgagcgtagcctgggcaacacagcaagaccccatctaagaaaaaaatgttttttaaatcagcttagcccaaaggggttgtgaatggggaggtataaaaagcaaagattattttttggctactaagccaagaacttacagggattttttttttcagtcccagaacctacagataccctgctacttgcttcacgtggatgctcagtgcccagcagccatcttaatacattaaaccagtttaaaaaataccttccatgtggagaaaaacatgtctttttctcgcctcaactttatccacatgaaatgtgtgcccatggctgggcgcagtggctcacctgtaatcccaacactttgggaggctgaagcaggcagattgcttgaggccaggagttcgagaacagtctggccaacatggcgaaacctcatctctactaaaattacaaaaattagccgggcatggtggcacatgcctgtaatcccagctacgtcaggaggctgaggcacaggaattgcttgaacccaagaggcagaggatgcaatgagccaagatcacaccactgcactccagccttggcgacagagggagactctgtctcaaaaaaaaaaaaaaaaggtgtgcccaggcccctagccattgccatgtgcccagccagagagccaaattagagggctggcttccctatcacacagaataaatgctagtgctagccaatgatccctttgcttttaatgtatagaaaatactgttgttccttttgtcatttccagtgacatctgttttctaagcagctcttttctagggaggaaaccaaaggggctaggttaagaccctaatagaaatgttttttctaatctctggtgagtctggaagtgtcacattcacagtccacccttgggagtggcttggtggagctggggacaaggttttgtttactacatagtgcacatgataaatggccttaaactgtgattctttctggtaggataagttataataaactgaccctaaagaatgcaaaaaaaaaaaaaaaaaa

SEQ ID NO: 658 - DNA, 4177 bp, human
tctctcccccgccccccaggctcccccggtcgctctcctccggcggtcgcccgcgctcggtggatgtggctggcagctgccgccccctccctcgctcgccgcctgctcttcctcggccctccgcctcctcccctcctccttctcgtcttcagccgctcctctcgccgccgcctccacagcctgggcctcgccgcgatgccggagaagaggcccttcgagcggctgcctgccgatgtctcccccatcaactacagcctttgcctcaagcccgacttgctggacttcaccttcgagggcaagctggaggccgccgcccaggtgaggcaggcgactaatcagattgtgatgaattgtgctgatattgatattattacagcttcatatgcaccagaaggagatgaagaaatacatgctacaggatttaactatcagaatgaagatgaaaaagtcaccttgtctttccctagtactctgcaaacaggtacgggaaccttaaagatagattttgttggagagctgaatgacaaaatgaaaggtttctatagaagtaaatatactaccccttctggagaggtgcgctatgctgctgtaacacagtttgaggctactgatgcccgaagggcttttccttgctgggatgagcctgctatcaaagcaacttttgatatctcattggttgttcctaaagacagagtagctttatcaaacatgaatgtaattgaccggaaaccataccctgatgatgaaaatttagtggaagtgaagtttgcccgcacacctgttatgtctacatatctggtggcatttgttgtgggtgaatatgactttgtagaaacaaggtcaaaagatggtgtgtgtgtccgtgtttacactcctgttggcaaagcagagcaaggaaaatttgcgttagaggttgctgctaaaaccttgcctttttataaggactacttcaatgttccttatcctctacctaaaattgatctcattgctattgcagactttgcagctggtgccatggagaactggggccttgttacttatagggagactgcattgcttattgatccaaaaaattcctgttcttcatcccgccagtgggttgctctggttgtgggacatgaactcgcccatcaatggtttggaaatcttgttactatggaatggtggactcatctttggttaaatgaaggttttgcatcctggattgaatatctgtgtgtagaccactgcttcccagagtatgatatttggactcagtttgtttctgctgattacacccgtgcccaggagcttgacgccttagataacagccatcctattgaagtcagtgtgggccatccatctgaggttgatgagatatttgatgctatatcatatagcaaaggtgcatctgtcatccgaatgctgcatgactacattggggataaggactttaagaaaggaatgaacatgtatttaaccaagttccaacaaaagaatgctgccacagaggatctctgggaaagtttagaaaatgctagtggtaaacctatagcagctgtgatgaatacctggaccaaacaaatgggatttcccctcatttatgtggaagctgaacaggtagaagatgacagattattgaggttgtcccaaaagaagttctgtgctggtgggtcatatgttggtgaagattgtccccagtggatggtccctatcacaatctctactagtgaagaccccaaccaggccaaactaaaaattctaatggacaagccagagatgaatgtggttttgaaaaatgtcaaaccagaccaatgggtgaagttaaacttaggaacagttgggttttatcggacccagtacagctctgccatgctggaaagtttattaccaggcattcgtgacctttctctgccccctgtggatcgacttggattacagaatgacctcttctccttggctcgagctggaatcattagcactgtagaggttctaaaagtcatggaggcttttgtgaatgagcccaattatactgtatggagcgacctgagctgtaacctggggattctctcaactctcttgtcccacacagacttctatgaggaaatccaggagtttgtgaaagatgtcttttcacctataggggagagactgggctgggaccccaaacctggagaaggtcatctcgatgcactcctgaggggcttggttctgggaaaactaggaaaagcaggacataaggcaacgttagaagaagcccgtcgtcggtttaaggaccacgtggaaggaaaacagattctctccgctgatctgaggagtcctgtctatctgactgttttgaagcatggtgatggcactactttagatattatgttaaaacttcataaacaagcagatatgcaagaagagaaaaaccgaatcgaaagagtccttggcgctactcttttgcctgacctgattcaaaaagtcctcacgtttgcactttcagaagaggtacgtccacaggacactgtatcggtaattggtggagtagctggaggcagcaagcatggtaggaaagctgcttggaaattcataaaggacaactgggaagaactttataaccgataccagggaggattcttaatatccagactaataaagctatcagttgagggatttgcagttgataaaatggctggagaggttaaggctttcttcgagagtcacccagctccttcagctgagcgtaccatccagcagtgttgtgaaaatattctgctgaatgctgcctggctaaagcgagatgctgagagcatccaccagtacctccttcagcggaaggcctcaccacccacagtgtgaatcctgaggtgccgccattggcggttctgctgcttcgctgcagggataaggtggagctaccgaacagctgattcatatgccaagaatttggagtcttctttcaaaccagtgggggttggacaatgaatgtagttaactggttcctgctcacactccagaattaaattctattgaaaaaggaaaatcagcaattcagcaaaaaaataaataaaaaataaaaatgtaaatatgatagtaataaaatagagcataacgaaactgtgaaactttctgaagccttgtcagtggttaaaagtatttaacactctactgttaatgacagatgttctgtttttataacctaccaaaaggaaactagaggcttcttggtgaagagcatttttgtgaagtgggttctgcaaggagcctataaagccaagggtggtgtccatttctgggaatggttaaacacaaaaggctgatagctggtatcacatagttggagtcagtgcataattccaagtggctttttttttttttggcacggggactgatcaggaagatatattcctgcataactcaatctgaaccaaggattgtagtttagttttcctccttgccttcccttctgtgtgaccgaccccttggccaaaaaaaaaacaaaaagcaaaaaacaaaaacctaccctgttctggtttttttcctccctttagttccacccccaacccccattccctggtgtccttcttagagatgaagaaataataaggaaacatctttcatagccacattaaataagagaaactgatatacattatttttttctttttaaagatgacttataagaaccctgaaatttatataggtgagacaatagaaataaaaagatcttcagccaggcctttctgaaggagttattctgctaaaaatggtcttagttgtctgaaaagccagctcttgaacctcttcacaacagtatcaacactggcttctcccggttcattttatgcgtgcgagaagtcagtggtaactgctgcagggcttaatacattagtggtaactggtttaaaaaacaaagactgtaagcctgtgtgtgccactgtttgcttcaacagtatatcctactaataagcctcacctatttaatccaatgagttttaaatctaaatctcattcccttcttctttccctaccttttttttctttttttcttaaaaaaatattttgtgttattaacagaaattcatatttggtgtggcttaacggtatttcagaaggtcatcagattgtgagactgcttccttgaaacatttttgtgctattgttttaaaaaaataattaaaaaacagttggcgttaataaaaatgtcaatgtg

SEQ ID NO: 659 - DNA, 1410 bp, human
gagctagctttgcaatatggcggccgaggcggacggaccgcttaaacggctgctcgtgccgattcttttacctgagaaatgctacgaccaacttttcgttcagtgggacttgcttcacgtcccctgcctcaagattctcctcagcaaaggcctggggctgggcattgtggctggctcacttctagtaaagctgccccaggtgtttaaaatccggggagccaagagtgctgaagggttgagtctccagtctgtaatgctggagctagtggcattgactgggaccatggtctacagcatcactaacaacttcccattcagctcttggggtgaagccttattcctgatgctccagacgatcaccatctgcttcctggtcatgcactacagaggacagactgtgaaaggtgtcgctttcctcgcttgctacggcctggtcctgctggtgcttctctcacctctgacgcccttgactgtagtcaccctgctccaggcctccaatgtgcctgctgtggtggtggggaggcttctccaggcagccaccaactaccacaacgggtacacaggccagctctcagccatcacagtcttcctgctgtttgggggctccctggcccgaatcttcacttccattcaggaaaccggagatcccctgatggctgggacctttgtggtctcctctctctgcaacggcctcatcgccgcccagctgctcttctactggaatgcaaagcctccccacaagcagaaaaaggcgcagtagagccagctactggagtcattccgtttccactcattcacccaacctcagggttctccccatctgagccagcctgctggtgtgacttactcatcctccattcctctgcacttgcagactttctgagccagggttttcttttagtggaaacaaatggttgatggatccagatccttagaaaaggagaggatgggggtagagtctcccaagccaaaattttgacatttgagtgctttcgtaagccctgtacatgtactattaattcagtcattcagccaagcctcctcctctagcagcaatttccagctgtttaacactatcctgggcaaatgttttaccctgtcctccagcctccctgcttcccttctggccctggaagactgagtctggacggcagagtggagggactgggaggctgtggctgcctccctccctcagcccggctgggactgtctcccggaccccagtgctggggtgggggaagggggacggagaatgactcaggcagggccccagggtggggtgaggaggttcctgctctggcaggtctaggcggaagggagtggagatggggctggttgctgctgcagtgaggggaacagatgggacaataaagactggagactcagttgaataatgcaaaaaaaaaaaaa

SEQ ID NO: 660 - DNA, 2605 bp, human
gcggagctccgcatccaaccccgggccgcggccaacttctctggactggaccagaagtttctagccggccagttgctacctccctttatctcctccttcccctctggcagcgaggaggctatttccagacacttccacccctctctggccacgtcacccccgcctttaattcataaaggtgcccggcgccggcttcccggacacgtcggcggcggagaggggcccacggcggcggcccggccagagactcggcgcccggagccagcgccccgcacccgcgccccagcgggcagaccccaacccagcatgagcgccgccacccactcgcccatgatgcaggtggcgtccggcaacggtgaccgcgaccctttgccccccggatgggagatcaagatcgacccgcagaccggctggcccttcttcgtggaccacaacagccgcaccactacgtggaacgacccgcgcgtgccctctgagggccccaaggagactccatcctctgccaatggcccttcccgggagggctctaggctgccgcctgctagggaaggccaccctgtgtacccccagctccgaccaggctacattcccattcctgtgctccatgaaggcgctgagaaccggcaggtgcaccctttccatgtctatccccagcctgggatgcagcgattccgaactgaggcggcagcagcggctcctcagaggtcccagtcacctctgcggggcatgccagaaaccactcagccagataaacagtgtggacaggtggcagcggcggcggcagcccagcccccagcctcccacggacctgagcggtcccagtctccagctgcctctgactgctcatcctcatcctcctcggccagcctgccttcctccggcaggagcagcctgggcagtcaccagctcccgcgggggtacatctccattccggtgatacacgagcagaacgttacccggccagcagcccagccctccttccaccaagcccagaagacgcactacccagcgcagcagggggagtaccagacccaccagcctgtgtaccacaagatccagggggatgactgggagccccggcccctgcgggcggcatccccgttcaggtcatctgtccagggtgcatcgagccgggagggctcaccagccaggagcagcacgccactccactccccctcgcccatccgtgtgcacaccgtggtcgacaggcctcagcagcccatgacccatcgagaaactgcacctgtttcccagcctgaaaacaaaccagaaagtaagccaggcccagttggaccagaactccctcctggacacatcccaattcaagtgatccgcaaagaggtggattctaaacctgtttcccagaagcccccacctccctctgagaaggtagaggtgaaagttccccctgctccagttccttgtcctcctcccagccctggcccttctgctgtcccctcttcccccaagagtgtggctacagaagagagggcagcccccagcactgcccctgcagaagctacacctccaaaaccaggagaagccgaggctcccccaaaacatccaggagtgctgaaagtggaagccatcctggagaaggtgcaggggctggagcaggctgtagacaactttgaaggcaagaagactgacaaaaagtacctgatgatcgaagagtatttgaccaaagagctgctggccctggattcagtggaccccgagggacgagccgatgtgcgtcaggccaggagagacggtgtcaggaaggttcagaccatcttggaaaaacttgaacagaaagccattgatgtcccaggtcaagtccaggtctatgaactccagcccagcaaccttgaagcagatcagccactgcaggcaatcatggagatgggtgccgtggcagcagacaagggcaagaaaaatgctggaaatgcagaagatccccacacagaaacccagcagccagaagccacagcagcagcgacttcaaaccccagcagcatgacagacacccctggtaacccagcagcaccgtagcctctgccctgtaaaaatcagactcggaaccgatgtgtgctttagggaattttaagttgcatgcatttcagagactttaagtcagttggtttttattagctgcttggtatgcagtaacttgggtggaggcaaaacactaataaaagggctaaaaaggaaaatgatgcttttcttctatattcttactctgtacaaataaagaagttgcttgttgtttgagaagtttaaccccgttgcttgttctgcagccctgtctacttgggcacccccaccacctgttagctgtggttgtgcactgtcttttgtagctctggactggaggggtagatggggagtcaattacccatcacataaatatgaaacatttatcagaaatgttgccattttaatgagatgattttcttcatctcataattaaaatacctgactttagagagagtaaaatgtgccaggagccataggaatatctgtatgttggatgactttaatgctacattttaaaaaaagaaaataaagtaataatataactcaaaaaaaaaaaaaaaaaaaaaaaaaaaaaaaaaaaaaaaaa

SEQ ID NO: 661 - DNA, 1556 bp, human
gcagccgcggtgtcgcgaagtcctcccgggttgcccccgcggcgtcagagggagggcgggcgccgcgttggtgacggcgaccctgcagcccaaggagcgctccactcgctgccgccggagggccggtgacctcttggctaccccgcgtcggaggcttagatggctcaggcgaagatcaacgctaaagccaacgaggggcgcttctgccgctcctcctccatggctgaccgctccagccgcctgctggagagcctggaccagctggagctcagggttgaagctttgagagaagcagcaactgctgttgagcaagagaaagaaatccttctggaaatgatccacagtatccaaaatagccaggacatgaggcagatcagtgacggagaaagagaagaattaaatctgactgcaaaccgtttgatgggaagaactctcaccgttgaagtgtcagtagaaacaattagaaacccccagcagcaagaatccctaaagcatgccacaaggattattgatgaggtggtcaataagtttctggatgatttgggaaatgccaagagtcatttaatgtcgctctacagtgcatgttcatctgaggtgccacatgggccagttgatcagaagtttcaatccatagtaattggctgtgctcttgaagatcagaagaaaattaagagaagattagagactctgcttagaaatattgaaaactctgacaaggccatcaagctattagagcattctaaaggagctggttccaaaactctgcaacaaaatgctgaaagcagattcaattagtcttcaaacctaagagcatttacacaatacacaaggtgtaaaaatgataaaatactattttaattgataactagttctttgttaggtataaccacttagttgacactgatagttgtttcagatgaggaaaatattccatcaagtatcttcagttttgtgaataacaaaactagcaatattttaattatctatctagagattttttagattgaattcttgtcttgtactaggatctagcatatttcactattctgtggatgaatacatagtttgtggggaaaacaaacgttcagctaggggcaaaaagcatgactgctttttcctgtctggcatggaatcacgcagtcaccttgggcatttagtttactagaaattctttactgaagcagcacacacatttactacacacacagtgttaacaaagcactgtgcttagagggtaaaaaggaatcacaaaacaagaatctttccaaagttgtctcattcagcaatgttaaggcatctgtatcaaattattttggatgtaaagattcctgtgtctcataatatgaatgtattttttgatatacaagaaactgacataaaatgtgagaaaaccacctataatttaccactgtgaacaattatatatctatctgcttcatcttttctcaaatgcatcaattctctaaaattcctatattgtaacttgcctttttttaaaaaagttagatgctgatataaagtctgcttaattgtcaacttaaaaaaaaaaaaaaaaa

SEQ ID NO: 662 - DNA, 3537 bp, human
ggagcgcagtcgctccgcgatggactcgccggtcccggcctctatgttcgcccccgagcccagctccccgggggcggccagggccgcggcggccgccgcccgactccacggcggctttgactcggactgcagcgaggacggcgaggcgctcaacggcgagccagagctggacctcaccagcaagctggttctagtgagccctacatcagagcagtatgacagcctacttcggcagatgtgggagaggatggacgagggatgcggagagaccatatatgtcattgggcagggatcagatgggactgagtatgggctgagtgaagctgacatggaggcctcctacgccacagtgaagagcatggcggaacagatagaggccgatgtcatccttctgcgggaacggcaagaagctgggggccgcgtgcgtgattacctggtccggaaacgagtaggagacaatgacttcctggaggtcagggtagcagtggtgggcaacgtggatgctggcaaaagcacgcttctgggggtcctgacacatggggagctggacaatggccgaggctttgcccgccagaaactcttccgccacaaacatgaaattgaatctggtcgcaccagcagtgtgggcaacgacattctgggctttgacagtgaaggcaatgtagtgaacaagcctgacagccacggcggcagcctggagtggaccaagatctgtgagaagtccacgaaagtcattaccttcatcgacttggctggtcatgagaagtacctgaaaaccactgtcttcggcatgacaggccatctgcctgacttctgcatgctcatggtgggcagcaatgctggcatcgtggggatgaccaaagaacacctgggcttggcactggcactcaatgtacctgtctttgtggtagtcaccaagattgacatgtgtcctgccaacatcctgcaagaaaccctgaagctgttacagcgcctgctgaagtcaccaggctgccggaagatccccgtgctggtgcagagcaaagatgatgtgattgtcacagcctccaacttcagctctgaaaggatgtgcccgatattccagatctccaacgttacaggcgagaacctagatctgctgaagatgttcctcaacctcctctccccccgcaccagctacagggaggaggagcctgctgagtttcagattgatgacacctactccgtcccgggtgtggggacagtggtttcggggacaacactgagaggcctgatcaagctgaatgacacgctgctgctgggcccagaccccttgggtaacttcctgtccattgctgtcaaatccatccatcgcaagcgcatgcctgtcaaggaggtgcggggtggccagacagcatcctttgcgctgaagaagatcaagcgctcgtccatccggaagggcatggtgatggtttccccacgtttgaatccccaagcctcctgggagtttgaggccgagattctcgtcctccaccaccccaccacaattagcccgcgctaccaggccatggtgcactgtgggagcatcaggcagacagccaccattctgagcatggacaaggactgtctgcgcactggggacaaggccactgtacacttccgcttcatcaagacccctgagtacctgcacatagaccagcggctggtgttccgggaaggccgcaccaaggctgtcggcaccatcaccaagctcctccagaccaccaacaactccccaatgaactccaagccgcagcagattaaaatgcagtcgacgaaaaagggccccctgacgaaacgagacgaggggggcccgtctggtgggccagcagtaggagcacccccacctggagatgaagcctcctctgtaggggcagggcaaccagctgcgtccagcaatctccagcctcagcctaagcccagcagtggaggccggcgacgagggggccagcgccacaaggtgaagtcccagggggcctgtgtgactcctgccagcggctgctgaaccttcccctggcccaccctcaccacccaaggggtcatcatctctggccaccactccaccagatgggcagagcagctatgaccgccacccagccctcccgctcaggccacagccggagcctccgcattgcccccacccccattttccaggggggttgtaatttataagctgacgaaggtagccagacttccggaggactgaccatctctcactgtcctccccaccttcttcctcactcacacattttttgtacatctgggcccttagtttttattctgtttattatatgtctctgtctctctctattgtgtgtgtgtgtgtgtgtgtgtgtgtgtgtgtgtgtgtggtgcaggagtgccacccccagggccctgtcaacctctcttttctcctccatggctgtctgcctgcgtatctgtctctgagaatcctcggggcggtcaggggatgtcaggaggggaaggagccgccctccctatcttgctgctcctcttggcactcaggggcaccttccatggagccagaccgggtggaggggcttctgggatttggtgtctgctgctgccagagcaggaacccccagtctaggacttgggcattttaacagggagaaagtagtggcttcccttttctctctctcctcctttttccctttaagcccacagattcaggtcatgccaaaagctctctggttgtaacctggagacatgtggaggggaatggcgatgggattataggactctccccatctcgggccctgaccctgacccttgccaccaacccaaagacagctggtgggtttccccttggagacaatcctgcgtttgcctgggccggccctggctgccctcagctttcgctgatctgcccggcctggagcctcccatcaccccgcttcttgttgggcctcaggcactggttaccagaagggggtctgggtctgctcaggatcatgttttgtagcacctcctgttggaggggtggagggatgttcccctgagccaggctgagactagaaccccatcttccctgagccaggctgagactagaaccccatcttccccaccacgccacccctgtggctgctacaggagcacagtagtgaaggcctgagctccaggtttgaaagacccaactggagcgtggggcgggcaggcaggggttagtgaaaggacacttccagggttaggacagagcatttagccttctggaagaacccctgcctggggtgggactgtgcaggccagagaaggtggcatgggcctgaacccacctggactgacttctgcactgaagccacagatggagggtaggctggtgggtgggggtggttcgttctctagccggggcagacacccagctggctgggtccttcctcagccttgcctcctcctgtccccaaccctttcctttcctcctgcttgcggactgctggtcccctctccttccctccttccagctgtttctagttaccacctacccctggccgtggactgatcagaccagcattcaaaataaaagtttgttccaagttg

SEQ ID NO: 663 - DNA, 6782 bp, human
gggcggggctgagggcggcgggggcgggccgcccgagctgggagggcggcggcgccgaggggaggagagcggcccatggacccgcggggcccggcgccccagactctgcgccgtcgggacggagcccaagatgtcggcctaggccggggcgcgacgacgcggacggggcggcgaggaggcgccgctgctgccggggctcgcagccgccgagcccccgagggcgcgccctgacggactggccgagccggcggtgagaggccggcgcgtcgggagcgggccgcgcggcaccatgtcggccaaggtgcggctcaagaagctggagcagctgctcctggacgggccctggcgcaacgagagcgccctgagcgtggaaacgctgctcgacgtgctcgtctgcctgtacaccgagtgcagccactcggccctgcgccgcgacaagtacgtggccgagttcctcgagtgggctaaaccatttacacagctggtgaaagaaatgcagcttcatcgagaagactttgaaataattaaagtaattggaagaggtgcttttggtgaggttgctgttgtcaaaatgaagaatactgaacgaatttatgcaatgaaaatcctcaacaagtgggagatgctgaaaagagcagagaccgcgtgcttccgagaggagcgcgatgtgctggtgaacggcgactgccagtggatcaccgcgctgcactacgcctttcaggacgagaaccacctgtacttagtcatggattactatgtgggtggtgatttactgaccctgctcagcaaatttgaagacaagcttccggaagatatggcgaggttctacattggtgaaatggtgctggccattgactccatccatcagcttcattacgtgcacagagacattaaacctgacaatgtccttttggacgtgaatggtcatatccgcctggctgactttggatcatgtttgaagatgaatgatgatggcactgtgcagtcctccgtggccgtgggcacacctgactacatctcgccggagatcctgcaggcgatggaggacggcatgggcaaatacgggcctgagtgtgactggtggtctctgggtgtctgcatgtatgagatgctctatggagaaacgccgttttatgcggagtcactcgtggagacctatgggaagatcatgaaccatgaagagcgattccagttcccatcccatgtcacggatgtatctgaagaagcgaaggacctcatccagagactgatctgcagtagagaacgccggctggggcagaatggaatagaggatttcaaaaagcatgcgttttttgaaggtctaaattgggaaaatatacgaaacctagaagcaccttatattcctgatgtgagcagtccctctgacacatccaacttcgacgtggatgacgacgtgctgagaaacacggaaatattacctcctggttctcacacaggcttttctggattacatttgccattcattggttttacattcacaacggaaagctgtttttctgatcgaggctctctgaagagcataatgcagtccaacacattaaccaaagatgaggatgtgcagcgggacctggagcacagcctgcagatggaagcttacgagaggaggattcggaggctggaacaggagaagctggagctgagcaggaagctgcaagagtccacccagaccgtgcagtccctccacggctcatctcgggccctcagcaattcaaaccgagataaagaaatcaaaaagctaaatgaagaaatcgaacgcttgaagaataaaatagcagattcaaacaggctcgagcgacagcttgaggacacagtggcgcttcgccaagagcgtgaggactccacgcagcggctgcgggggctggagaagcagcaccgcgtggtccggcaggagaaggaggagctgcacaagcaactggttgaagcctcagagcggttgaaatcccaggccaaggaactcaaagatgcccatcagcagcgaaagctggccctgcaggagttctcggagctgaacgagcgcatggcagagctccgtgcccagaagcagaaggtgtcccggcagctgcgagacaaggaggaggagatggaggtggccacgcagaaggtggacgccatgcggcaggaaatgcggagagctgagaagctcaggaaagagctggaagctcagcttgatgatgctgttgctgaggcctccaaggagcgcaagcttcgtgagcacagcgagaacttctgcaagcaaatggaaagcgagctggaggccctcaaggtgaagcaaggaggccggggagcgggtgccaccttagagcaccagcaagagatttccaaaatcaaatccgagctggagaagaaagtcttattttatgaagaggaattggtcagacgtgaggcctcccatgtgctagaagtgaaaaatgtgaagaaggaggtgcatgattcagaaagccaccagctggccctgcagaaagaaatcttgatgttaaaagataagttagaaaagtcaaagcgagaacggcataacgagatggaggaggcagtaggtacaataaaagataaatacgaacgagaaagagcgatgctgtttgatgaaaacaagaagctaactgctgaaaatgaaaagctctgttcctttgtggataaactcacagctcaaaatagacagctggaggatgagctgcaggatctggcagccaagaaggagtcagtggcccactgggaagctcagattgcggaaatcattcagtgggtcagtgacgagaaagatgcccggggttaccttcaagctcttgcttccaagatgaccgaagagctcgaggctttgaggagttctagtctggggtcaagaacactggacccgctgtggaaggtgcgccgcagccagaagctggacatgtccgcgcggctggagctgcagtcggccctggaggcggagatccgggccaagcagcttgtccaggaggagctcaggaaggtcaaggacgccaacctcaccttggaaagcaaactaaaggattccgaagccaaaaacagagaattattagaagaaatggaaattttgaagaaaaagatggaagaaaaattcagagcagatactgggctcaaacttccagattttcaggattccatttttgagtatttcaacactgctcctcttgcacatgacctgacatttagaaccagctcagctagtgagcaagaaacacaagctccgaagccagaagcgtccccgtcgatgtctgtggctgcatcagagcagcaggaggacatggctcggcccccgcagaggccatccgctgtgccgttgcccaccacgcaggccctggctctggctggaccgaagccaaaagctcaccagttcagcatcaagtccttctccagccctactcagtgcagccactgcacctccctgatggttgggctgatccggcagggctacgcctgcgaggtgtgttcctttgcttgccacgtgtcctgcaaagacggtgccccccaggtgtgcccaatacctcccgagcagtccaagaggcctctgggcgtggacgtgcagcgaggcatcggaacagcctacaaaggccatgtcaaggtcccaaagcccacgggggtgaagaagggatggcagcgcgcatatgcagtcgtctgtgagtgcaagctcttcctgtatgatctgcctgaaggaaaatccacccagcctggtgtcattgcgagccaagtcttggatctcagagatgacgagttttccgtgagctcagtcctggcctcagatgtcattcatgctacacgccgagatattccatgtatattcagggtgacggcctctctcttaggtgcaccttctaagaccagctcgctgctcattctgacagaaaatgagaatgaaaagaggaagtgggttgggattctagaaggactccagtccatccttcataaaaaccggctgaggaatcaggtcgtgcatgttcccttggaagcctacgacagctcgctgcctctcatcaaggccatcctgacagctgccatcgtggatgcagacaggattgcagtcggcctagaagaagggctctatgtcatagaggtcacccgagatgtgatcgtccgtgccgctgactgtaagaaggtacaccagatcgagcttgctcccagggagaagatcgtaatcctcctctgtggccggaaccaccatgtgcacctctatccgtggtcgtcccttgatggagcggaaggcagctttgacatcaagcttccggaaaccaaaggctgccagctcatggccacggccacactcaagaggaactctggcacctgcctgtttgtggccgtgaaacggctgatcctttgctatgagatccagagaacgaagccattccacagaaagttcaatgagattgtggctcccggcagcgtgcagtgcctggcggtgctcagggacaggctctgtgtgggctacccttctgggttctgcctgctgagcatccagggggacgggcagcctctaaacctggtaaatcccaatgacccctcgcttgcgttcctctcacaacagtcttttgatgccctttgtgctgtggagctcgaaagcgaggagtacctgctttgcttcagccacatgggactgtacgtggacccgcaaggccggagggcacgcgcgcaggagctcatgtggcctgcggctcctgtcgcctgtagttgcagccccacccacgtcacggtgtacagcgagtatggcgtggacgtctttgatgtgcgcaccatggagtgggtgcagaccatcggcctgcggaggataaggcccctgaactctgaaggcaccctcaacctcctcaactgcgagcctccacgcttgatctacttcaagagcaagttctcgggagcggttctcaacgtgccggacacctccgacaacagcaagaagcagatgctgcgcaccaggagcaaaaggcggttcgtcttcaaggtcccagaggaagagagactgcagcagaggcgagagatgcttagagacccagaattgagatccaaaatgatatccaacccaaccaacttcaaccacgtggcccacatgggcccaggcgacggcatgcaggtgctcatggacctgcctctgagtgctgtgcccccctcccaggaggaaaggccgggccccgctcccaccaacctggctcgccagcctccatccaggaacaagccctacatctcgtggccctcatcaggtggatcggagcctagcgtgactgtgcctctgagaagtatgtctgatccagaccaggactttgacaaagagcctgattcggactccaccaaacactcaactccatcgaatagctccaaccccagcggcccaccgagccccaactccccccacaggagccagctccccctcgaaggcctggagcagccggcctgtgacacctgaagccgccagctcgccacaggggccagggagctggagatggcctccagcgtcagtgccaagactgagcgggccctccagtgttgtccaaggaaatgtagaatcactttgtagatatggagatgaagaagacaaatctttattataatattgatcagttttatgccgcattgttcgtggcagtagaccacatctgttcgtctgcacagctgtgaggcgatgctgttccatctgcacatgaaggacccccatacagcctgtctcccacccctgacaacccgagagggcatatggggccctgccaacaccacttcctcagcagaaacccgtcatgacgcggctgcttcggaagcagacatctggggacacagcctcagtacccagtcttttccctagttcctgaaactttcctaggaccttaagagaatagtaggaggtcctatagcattcccagtgtcactagaattttgaagacaggaaagtggaggttagtctgtggcctttttttcatttagccattgcacagtcagctgcagaagtcctgctgaccacctagtcatggacaaaggcccaggaccagtgacaccctgcgtccctgtgtgcattaagttcattctgggtcgcagccatgaagtgtcaccagtatctactactgtgaagtcagctgtgctgttttccattcgcttccacggcttctgcctcctgccataaaaccagcgagtgtcgtggtgcaggcaggccctgtggcctgctgggctgagggaagtcagagccccagggcgccacgaagcagccactgggataccccaccccgccccgccctgcccccccccccccccaccagtcctgcccccgcatggagcccccgtgattagtagcccgtatgatcacgtagacccacccaacacactcctgcacactggccccggcccacggcacagcaatcccctgcgcgtggatttcacctcaccctttgtaccagatgttgagtgaccagctctgtggccctgtgtcgtcagaggcttgtgattaactgtggcggcagacacagcttgtccacagcttgggccaggcttcccctgtcctcccaccggtcggctgcttggcaaggctgttcaggacgtgcacttccccaagtcggcactgagtggcccagcaccgcctagccctgccaccccactgccctcctgggccttctgctggatgggcacctggggggttctggtttttacttttttaatgtaagtctcagtctttgtaattaattattgaattgtgagaacatttttgaacaatttacctgtcaataaagcagaagacggcagttttaaagttaaaaaaaaaaaaaaaaaaaaaaaaa

SEQ ID NO: 664 - DNA, 7940 bp, human
tcaagatggcggccaaggtggcgaagcagcagccgcggcggcggcggcggctggagtgagcgtccgactcgccgcgccgaacgaggtcccggtgtagggccgcgcgccgtggccgcgtcccactcctcaggccggggcgcacgtcggctcccacgcttagccagctcccggtggtttcctagaaacatgattgtttattggcattgatctcacagtctggtgaggacttctttactgataatgtcaagttcaggttatcctcccaaccaaggagcattcagcacagaacaaagtcgttatcctcctcactctgtccagtatacatttcccaacacccgccaccagcaggagttcgcagtccctgattatcgttcctctcatcttgaagtgagtcaggcatcacagcttttgcagcaacagcagcagcaacagcttcgaaggcgaccttccttgctttcagaatttcacccaggttctgacaggcctcaagaaaggagaactagttatgaaccgtttcatccaggcccatccccagtggatcatgattcactggaatcgaagcgaccacgtctggaacaggtttctgattctcattttcagcgtgtcagtgctgcggttttgcctttagtgcacccgctgccagaagggctgagggcttctgcagatgctaagaaggatccagcattcggaggcaaacatgaagctccatcctctccaatttcggggcaaccatgtggagatgatcaaaatgcttcaccttcaaaactctcaaaggaagagttaatacagagtatggatcgtgtagatcgagaaattgcaaaagtagaacagcagatccttaaactgaaaaagaaacaacaacagcttgaagaagaggcagctaaacctcctgagcctgagaagcccgtgtcccctcctcctgtggagcagaaacaccgcagtattgtccaaattatttatgatgagaatcggaaaaaagcagaagaagctcataaaatttttgaaggtcttggcccaaaagttgaactgccactgtataaccagccatcagataccaaggtgtaccatgagaacatcaagacaaaccaggtgatgaggaaaaaactcattttattttttaaaagaagaaatcatgcaagaaaacaaagggaacaaaaaatctgccagcgttatgatcagctcatggaggcatgggagaaaaaagtggacagaatagaaaataatcctcggaggaaagctaaagaaagcaaaacaagggaatactatgaaaagcagtttccagaaattcgaaaacaaagagaacagcaagaaagatttcagcgagttgggcagaggggagctggtctttcagccaccattgctaggagtgagcatgagatttctgaaattattgatgggctctctgagcaggagaataatgagaaacaaatgcggcagctctctgtgattccacctatgatgtttgatgcagaacaaagacgagtcaagttcattaacatgaatgggcttatggaggaccctatgaaagtgtataaagataggcagtttatgaatgtttggactgaccatgaaaaggagatctttaaggacaagtttatccagcatccaaaaaactttggactaattgcatcatacttggagaggaagagtgttcctgattgtgttttgtattactatttaaccaagaaaaatgagaattataaagccctcgtcagaaggaattatgggaaacgcagaggcagaaaccagcaaattgctcgaccctcgcaagaagaaaaagtagaagaaaaagaagaggataaagcagaaaaaacagaaaaaaaagaagaagaaaagaaagatgaagaggaaaaagatgaaaaagaagactccaaagaaaataccaaggaaaaggacaagatagatggtacagcagaagaaactgaggaaagagagcaagccacaccccgggggcgaaagactgccaacagtcagggccgccgtaagggccggatcaccaggtccatgacaaacgaagctgcagctgccagtgctgcagccgcagcggctactgaagagcccccaccacctctgccaccgccaccagaacccatttctacagagcctgtggagacctctcgatggacagaagaagaaatggaagttgctaaaaaaggtctagtagaacatggtcgtaactgggcagcaattgctaaaatggtgggaacgaaaagtgaagctcaatgtaaaaacttctattttaactataaaaggcgacacaatcttgacaacctcttacagcagcataaacagaaaacttcacgaaaacctcgtgaagagcgagatgtgtctcaatgtgaaagtgtcgcttccactgtttctgctcaggaggatgaagatattgaagcctccaatgaagaagaaaatccagaagacagcgaagttgaagctgtcaagcccagcgaggacagtcctgaaaatgctacttctcgaggaaacacagaacctgcggttgagcttgagcccaccacggaaactgcacccagtacatctccctccttagcagttccaagtacaaaaccagctgaagatgaaagtgtggagacccaggtgaatgacagcatcagtgctgagacagcagagcagatggatgtagatcagcaggagcacagtgctgaagagggttctgtttgtgatcccccacccgctaccaaagctgactctgtggacgttgaagtgagggtgccagaaaaccatgcatctaaagttgaaggtgataataccaaagaaagagacttggatagagccagtgagaaggtggaacctagagatgaagatttggtggtagctcagcaaataaatgcccaaaggcccgagccccagtcagacaatgattccagtgccacgtgcagcgctgatgaggatgtggatggagagccagagaggcagagaatgtttcctatggactcaaagccttcactgttaaaccccactggatctatactcgtctcatctccgttaaaaccaaatccactggatctgccacagcttcagcatcgagctgctgttatcccaccaatggtatcctgcaccccatgtaacataccaattggaaccccagtgagcggctatgctctctaccagcgacacattaaagcaatgcatgagtcagcactcctggaggagcagcggcagagacaagaacagatagatttggaatgtagaagttctacaagtccatgtggcacatccaagagtccaaacagagagtgggaagtccttcagcctgctccacatcaagtgataactaatctccctgaaggcgttcggcttccgacaactcgaccaaccaggccaccgccccctctcatcccgtcatccaaaaccacagtggcttcagaaaaaccatcttttataatgggaggctccatctcacagggaacaccaggcacttatttgacttctcataatcaggcttcctacactcaagaaacacccaagccgtcagtgggatctatctctcttggactgccacggcaacaggaatctgccaaatcagctactttgccctacatcaagcaggaagaattttctccccgaagccaaaactcacaacctgagggtctgttggtcagggcccaacatgaaggtgtagtcagaggtaccgcaggagccatacaagaaggaagtataactcggggaactccaaccagcaaaatttcagtggagagcattccatccctacggggctctatcactcagggcaccccggctctgccccagactggcataccaacagaggctttggtgaaggggtccatttcgagaatgcccattgaagacagcagtcctgagaaaggcagagaggaagctgcatccaaaggccatgttatttatgaaggcaaaagtggacatatcttgtcatatgataatattaagaatgcccgagaagggactaggagtccaagaacagctcatgaaatcagtttaaagagaagctatgaatcagtggaaggaaatataaagcaagggatgtcaatgagggagtctcctgtatcagcaccgttagaggggctgatatgccgagcattacccagggggagtcctcattctgacctcaaagaaaggactgtattgtctggctccataatgcaggggacaccaagagcaacaactgaaagctttgaagatggccttaaatatcccaaacaaattaaaagggaaagtcctcccatacgagcatttgaaggtgccattaccaaaggaaaaccatatgatggcatcaccaccatcaaagaaatggggcgttccattcatgagattccaaggcaagatattttaactcaggaaagtcggaaaactccagaagtggtccagagcacacggccgataattgagggttccatttcccagggcacaccaataaagtttgacaacaactcaggtcaatctgccatcaaacacaatgtcaaatccttaatcacggggcctagcaaactatcccgtggaatgcctccgctggaaattgtgccagagaacataaaagtggtagaacggggaaaatatgaggatgtgaaagcaggcgagaccgtgcgttcccggcacacgtcagtggtaagctctggcccctccgttcttaggtccacactgcatgaagctcccaaagcacaactgagccctgggatttatgatgacaccagtgcacggaggacccctgtgagttatcaaaacaccatgtccagaggctcacccatgatgaacagaacttctgatgttacaatttcttctaacaagtctaccaatcatgaaaggaaatcgacactgacccctacccagagggaaagtatcccagcgaagtctccagtgcctggggtggaccctgtcgtgagccacagtccgtttgatccccatcacagaggcagcactgcaggcgaggtttatcggagccacctgcccacgcacttggatccagccatgccttttcacagggctttggatcctgcagcggctgcttacctgtttcagagacagctttcaccaactccaggttacccaagtcagtatcagctttacgcaatggagaacacaagacagacaatcttaaatgattacattacctcacaacagatgcaagtgaacttgcgtccagatgtggccagaggactctccccaagagagcagccactgggtctcccatacccagcaacgagaggaatcattgacctgaccaatatgcctccaacaattttagtgcctcatccagggggaacaagcactcctcccatggacagaatcacttatattcctggtacacagattactttccctcccaggccgtacaactctgcttccatgtctccaggacacccaacacaccttgcagctgctgcaagtgctgagagggaacgggaacgggagcgggagaaggagcgggagcgggaacggattgctgcagcttcctccgacctctacctgcggccaggctcagaacagcctggccgacctggcagtcatggatatgttcgctccccttccccttcagtaagaactcaggagaccatgttgcaacagagacccagtgttttccaaggaaccaatggaaccagtgtaatcacacctttggatccaactgctcagctacgaatcatgccactgcctgctgggggcccttcaataagccaaggcctgccagcctcccgttacaacactgctgcggatgccctggctgctcttgtggatgctgcagcttctgcaccccagatggatgtgtccaaaacaaaagagagtaagcatgaagctgccaggttagaagaaaatttgagaagcaggtcagcagcagttagtgaacagcagcagctagagcagaaaaccctggaggtggagaagagatctgttcagtgtttatacacttcttcagcctttccaagtggcaagccccagcctcattcttcagtagtttattctgaggctgggaaagataaagggcctcctccaaaatccagatatgaggaagagctaaggaccagagggaagactaccattactgcagctaacttcatagacgtgatcatcacccggcaaattgcctcggacaaggatgcgagggaacgtggctctcaaagttcagactcttctagtagcttatcttctcacaggtatgaaacacctagcgatgctattgaggtgataagtcctgccagctcacctgcgccaccccaggagaaactgcagacctatcagccagaggttgttaaggcaaatcaagcggaaaatgatcctaccagacaatatgaaggaccattacatcactatcgaccacagcaggaatcaccatctccccaacaacagctgcccccttcttcacaggcagagggaatggggcaagtgcccaggacccatcggctgatcacacttgctgatcacatctgtcaaattatcacacaagattttgctagaaatcaagtttcctcgcagactccccagcagcctcctacttctacattccagaactcaccttctgctttggtatctacacctgtgaggactaaaacatcaaaccgttacagcccagaatcccaggctcagtctgtccatcatcaaagaccaggttcaagggtctctccagaaaatcttgtggacaaatccaggggaagtaggcctggaaaatccccagagaggagtcacgtctcttcggagccctacgagcccatctccccaccccaggttccggttgtgcatgagaaacaggacagcttgctgctcttgtctcagaggggcgcagagcctgcagagcagaggaatgatgcccgctcaccagggagtataagctacttgccttcattcttcaccaagcttgaaaatacatcacccatggttaaatcaaagaagcaggagatttttcgtaagttgaactcctctggtggaggtgactctgatatggcagctgctcagccaggaactgagatctttaatctgccagcagttactacgtcaggctcagttagctctagaggccattcttttgctgatcctgccagtaatcttgggctggaagacattatcaggaaggctctcatgggaagctttgatgacaaagttgaggatcatggagttgtcatgtcccagcctatgggagtagtgcctggtactgccaacacctcagttgtgaccagtggtgagacacgaagagaggaaggggacccatcacctcattcaggaggagtttgcaaaccaaagctgatcagcaagtcaaacagcaggaaatctaagtctcctatacctgggcaaggctacttaggaacggaacggccctcttcagtctcctctgtacattcagaaggggattaccataggcagacgccagggtgggcctgggaagacaggccctcttcaacaggctcaactcagtttccttataaccctctgactatgcggatgctcagcagtactccaccaacaccgattgcatgtgctccctctgcggtgaaccaagcagctcctcaccaacagaacaggatctgggagcgagagcctgccccactgctctcagcacagtacgagaccctgtcggatagtgatgactgaactgcacaaagtgaggggaacagggtgcaggagagggatctctagtttttgtggtttaatttttagtagcaggtcaaaaacctgccctcctgtgacttattccctgagacttttcaggagagccagcccacagatgatgaagaaatgatggaagttcatttggagagtcaaatgggaaaaaaacaaacaaaaaactgcctttgatacaggcaattcagtggactataataatagtggagggttgagatgtagagtttttaaaaagtgaacagttgctgttcttacatctgtaaagaaaaccataatgtctttaaatcactcttctgtaaatagatgacctttttgcagtgtaaaaaaaaaaaaaaaaaaaaaaaaaa

SEQ ID NO: 665 - DNA, 5451 bp, human
gtagggagccagcccctgggcgcggcctgcagggtaccggcaaccgcccgggtaagcgggggcaggacaaggccggagcctgtgtccgcccggcagccgcccgcagctgcagagagtcccgctgcgtctccgccgcgtgcgccctcctcgaccagcagacccgcgctgcgctccgccgctgacatgtgtgccgctcagatgccgcccctggcgcacatcttccgagggacgttcgtccactccacctggacctgccccatggaggtgctgcgggatcacctcctcggcgtgagcgacagcggcaaaatagtgtttttagaagaagcatctcaacaggaaaaactggccaaagaatggtgcttcaagccgtgtgaaataagagaactgagccaccatgagttcttcatgcctgggctggttgatacacacatccatgcctctcagtattcctttgctggaagtagcatagacctgccactcttggagtggctgaccaagtacacatttcctgcagaacacagattccagaacatcgactttgcagaagaagtatataccagagttgtcaggagaacactaaagaatggaacaaccacagcttgttactttgcaacaattcacactgactcatctctgctccttgccgacattacagataaatttggacagcgggcatttgtgggcaaagtttgcatggatttgaatgacacttttccagaatacaaggagaccactgaggaatcgatcaaggaaactgagagatttgtgtcagaaatgctccaaaagaactattctagagtgaagcccatagtgacaccacgtttttccctctcctgctctgagactttgatgggtgaactgggcaacattgctaaaacccgtgatttgcacattcagagccatataagtgaaaatcgtgatgaagttgaagctgtgaaaaacttataccccagttataaaaactacacatctgtgtatgataaaaacaatcttttgacaaataagacagtgatggcacacggctgctacctctctgcagaagaactgaacgtattccatgaacgaggagcatccatcgcacactgtcccaattctaatttatcgctcagcagtggatttctaaatgtgctagaagtcctgaaacatgaagtcaagatagggctgggtacagacgtggctggtggctattcatattccatgcttgatgcaatcagaagagcagtgatggtttccaatatccttttaattaataaggtaaatgagaaaagcctcaccctcaaagaagtcttcagactagctactcttggaggaagccaagccctggggctggatggtgagattggaaactttgaagtgggcaaggaatttgatgccatcctgatcaaccccaaagcatccgactctcccattgacctgttttatggggacttttttggtgatatttctgaggctgttatccagaagttcctctatctaggagatgatcgaaatattgaagaggtttatgtgggcggaaagcaggtggttccgttttccagctcagtgtaagaccctcgggcgtctacaaagttctcctgggattagcgtggttctgcatctcccttgtgcccaggtggagttagaaagtcaaaaaatagtaccttgttcttgggatgactatccctttctgtgtctagttacagtattcacttgacaaatagttcgaaggaagttgcactaattctcaactctggttgagagggttcataaatttcatgaaaatatctccctttggagctgctcagacttactttaagctcaaacagaagggaatgctattactggtggtgttcctacggtaagacttaagcaaagcctttttcatatttgaaaatgtggaaagaaaagatgttcctaaaaggttagatattttgagctaataattgcaaaaattagaagactgaaaatggacccatgagagtatatttttatgagggagcaaaagttagactgagaacaaacgttagaaaatcacttcagattgtgtttgaaaattatatactgagcatactaatttaaaaagagaacttgttgaaatttaaaacgtgtttctaggttgaccttgtgttttagaaatttgcacttaatggaatttgcatttcagagatgtgttagtgttgtgctttgccttctttggcgatgaatgtcagaaattgaatgccacatgctttcataatatagttttgtgcttcaaagtgtttgacagaagttgggtattaaagatttaaagtctcttaggaatattattcatgtaactccatggcataaatagttgtatttttgtgtactttaaaatcaacttataactgtgagatgttattgcttccattttattagaagagaaacaaattccatgctttatggaatttatgtagactggagtcttcgtgaactggggcaaatgctggcatccaggagccgccaatactaacaggacaggttccattgccatggcctattccacccaaacaatatgttgtagtttctggaaattccatactcagatatcagtctgctagaactttaaaatgaaggacaaatcctgttaaagaaatattgttaaaaatctttaaaccctgtgtattgaaagcactctattttctaattttatccagttttctgtttaactccttataatgtttaggatattaaaattttaggataatgaagagtacataatgtcctacttaatatttatgttaataggacttaattcttactagacatctaggaacattacaaagcaaagactatttttatgcttccataacctagaattaaaaccaaattatgaccttatgataaatctttaagtattggtgtgaatgttatttaaattctatatttttcttatttaattacaaatactataaatgagcaaggaaaaggaatagactttcttaatatattataacactcattcctagagcttaggggtgactctttaatattaccttatagtagaaactttatgtaatatagctaactccgtatttacagaacaaaaaaacacagttccccctcctgtagtataaattttattttcacatacttagctaatttagcagtaattggcccagttttttccctaatagaaatacttttagatttgattatgtatacatgacacctaaagagggaacaaaagttagttttatttttttaataaacaacagagtttgttttgtgagataagtatcttagtaaacccaatttccagtcttagtctgtatttccaatatttctaattcctgagccacgtcaaagatgccttgccaaatttctccccatttctctacggggctagcaaaaatcttcagctttatccctcaacccctgccaaaggaacttgattacatggtgtctaaccaaatgagcaggcttaggaatttagatgagatgtgtaagattcacttacaggcagtagctgcttctagcatttgcaagatcctacacttttaccttctttaagggtgtacattttgatgttgaacatcagttttcatgtagacttaggactcatgtgcagtaaatataaataagtgtagcatcagaagcagtaggaatggccgtatacaaccatcctgttaaacatttaaatttagctctgatagtgtgttaagacctgaatatctttcctagtaaaaataggatgtgttgaaatatttatatgtactttgatctctccacatcacttataacttatgtgttttatttctccaagtgcggtgttcctgaatgttatgtatgcttttttttctgtaccacaggcattatctatacctggggccagattttctgcactttgaaatgttgcctttgcctaatgtaggttgactttctgaattgtggagaggcacttttccaagccaatcttatttgtcactttttgttttaatatcttgctctctgacaggaaagaaacaattcacttaccagcctcctcaccccatcctccaccatttccttaatgttccatggtattttcaacggaatacactttgaaaggtaaaaacaattcaaaagtatcgattatcataaattcacaaaatatttttgcaaccagaacacaaaagcaggctagtcagctaaggtaaatttcattttcaaacgagagggaaacatgggaagtaaaagattaggatgtgaaaggttgtcctaaacagaccaaggagactgttccctaatttattctcttggctggttctctcattgaattatcagaccccaagaggagatattggaacaggctcccttcatgccaagggtctttctaagttaatactgtgagcattgagcccccattaaaactcttttttacttcagaaagaattttacaggttaaagggaaagaaatggtgggaaactctccccgtaatgcttagccaactttaaagtgtacccttcaatatccccattggcaactgcagctgagatcttagagaggaaatataaccggtgtgagatctagcaatgcattttgaatcttcactccctaccaggctcttcctatttttaatctcttcacctcagaactagacatatggagagctttaaaggcaagctggaaggcacattgtatcaattctaccttgtgctatacgtaggagagatccaaaatttggatgcttctggagactcttagacatcttttcattgttgtccatttttaaagttgatgattgctggaaacattcacacgcttaaaagcaatggtgtgagttattaatgggtaaactaagaagtgttataggcaatgacttgaaatggtttttaaattgtatggattgttaagaattgttgaaaaaaaattttttttttttggacagcttcaaggagatgttagcaatttcagatatactagccagtttaggtatgactttggaagtgcagaaacagaaggatactgttagaaaatcctaacattggtctccgtgcatgtgttcacacctggtctcactgcctttccttcccacagacctgagtgtgaaagactgagagttgaggagttactttgtggatcttgtccaaatttagtgaaatgtggaagtcaaccagaccaatgatggaattaaatgtaaattccaagagggctttcacagtccacagggttcaaatgacttgggtaacagaagttattcttagcttacctgttatgtgacagtgatttacctgtccatttccaacccaaaagcctgtcagaaagcattctttagagaaaaccactttacatttgttgttaaactcctgatcgctactcttaagaatatacatgtatgtattcataggaacattttttctcaatatttgtatgattcgcttactgttattgtgctgagtgagctcctgtgtgcttcagacaaaaataaatgagactttgtgtttacgttaaaaaaaaaaaaaaaaaaaaaa

SEQ ID NO: 666 - DNA, 2982 bp, human
cgcaccccgcgcagcggctgagccgggagccagcgcagcctcggccccgcagctcaagcctcgtccccgccgccgccgccgccgccgccgccgccgcccccggggcatggcctgtctgatggccgctttctcggtcggcaccgccatgaatgccagcagttactctgcagagatgacggagcccaagtcggtgtgtgtctcggtggatgaggtggtgtccagcaacatggaggccactgagacggacctgctgaatggacatctgaaaaaagtagataataacctcacggaagcccagcgcttctcctccttgcctcggagggcagctgtgaacattgaattcagggacctttcctattcggttcctgaaggaccctggtggaggaagaaaggatacaagaccctcctgaaaggaatttccgggaagttcaatagtggtgagttggtggccattatgggtccttccggggccgggaagtccacgctgatgaacatcctggctggatacagggagacgggcatgaagggggccgtcctcatcaacggcctgccccgggacctgcgctgcttccggaaggtgtcctgctacatcatgcaggatgacatgctgctgccgcatctcactgtgcaggaggccatgatggtgtcggcacatctgaagcttcaggagaaggatgaaggcagaagggaaatggtcaaggagatactgacagcgctgggcttgctgtcttgcgccaacacgcggaccgggagcctgtcaggtggtcagcgcaagcgcctggccatcgcgctggagctggtgaacaaccctccagtcatgttcttcgatgagcccaccagcggcctggacagcgcctcctgcttccaggtggtctcgctgatgaaagggctcgctcaagggggtcgctccatcatttgcaccatccaccagcccagcgccaaactcttcgagctgttcgaccagctttacgtcctgagtcaaggacaatgtgtgtaccggggaaaagtctgcaatcttgtgccatatttgagggatttgggtctgaactgcccaacctaccacaacccagcagattttgtcatggaggttgcatccggcgagtacggtgatcagaacagtcggctggtgagagcggttcgggagggcatgtgtgactcagaccacaagagagacctcgggggtgatgccgaggtgaacccttttctttggcaccggccctctgaagaggactcctcgtccatggaaggctgccacagcttctctgccagctgcctcacgcagttctgcatcctcttcaagaggaccttcctcagcatcatgagggactcggtcctgacacacctgcgcatcacctcgcacattgggatcggcctcctcattggcctgctgtacttggggatcgggaacgaagccaagaaggtcttgagcaactccggcttcctcttcttctccatgctgttcctcatgttcgcggccctcatgcctactgttctgacatttcccctggagatgggagtctttcttcgggaacacctgaactactggtacagcctgaaggcctactacctggccaagaccatggcagacgtgccctttcagatcatgttcccagtggcctactgcagcatcgtgtactggatgacgtcgcagccgtccgacgccgtgcgctttgtgctgtttgccgcgctgggcaccatgacctccctggtggcacagtccctgggcctgctgatcggagccgcctccacgtccctgcaggtggccactttcgtgggcccagtgacagccatcccggtgctcctgttctcggggttcttcgtcagcttcgacaccatccccacgtacctacagtggatgtcctacatctcctatgtcaggtatgggttcgaaggggtcatcctctccatctatggcttagaccgggaagatctgcactgtgacatcgacgagacgtgccacttccagaagtcggaggccatcctgcgggagctggacgtggaaaatgccaagctgtacctggacttcatcgtactcgggattttcttcatctccctccgcctcattgcctattttgtcctcaggtacaaaatccgggcagagaggtaaaacacctgaatgccaggaaacaggaagattagacactgtggccgagggcacgtctagaatcgaggaggcaagcctgtgcccgaccgacgacacagagactcttctgatccaacccctagaaccgcgttgggtttgtgggtgtctcgtgctcagccactctgcccagctgggttggatcttctctccattcccctttctagctttaactaggaagatgtaggcagattggtggtttttttttttttaacatacagaattttaaataccacaactggggcagaatttaaagctgcaacacagctggtgatgagaggcttcctcagtccagtcgctccttagcaccaggcaccgtgggtcctggatggggaactgcaagcagcctctcagctgatggctgcacagtcagatgtctggtggcagagagtccgagcatggagcgattccattttatgactgttgtttttcacattttcatctttctaaggtgtgtctcttttccaatgagaagtcatttttgcaagccaaaagtcgatcaatcgcattcattttaagaaattatacctttttagtacttgctgaagaatgattcagggtaaatcacatactttgtttagagaggcgaggggtttaaccgagtcacccagctggtctcatacatagacagcacttgtgaaggattgaatgcaggttccaggtggagggaagacgtggacaccatctccactgagccatgcagacatttttaaaagctatacaaaaaattgtgagaagacattggccaactctttcaaagtctttctttttccacgtgcttcttattttaagcgaaatatattgtttgtttcttcctaaaaaaaaaaaaaaaaaaaaaaaaa

SEQ ID NO: 667 - DNA, 4570 bp, human
aaccggaagtggagcctgggagccttgacgttaggaacgaagtctaacctggatctggagccgggagataatctgaatgctggctggggcagaaaattactaagatcctgtggaagtgtgaggattattaaactgatcactgtctgataaggtgagatcaaattgggaatgctttcataatgaacgtcaaccagtcagttccacctgtgccaccatttgggcagccccagcccatctacccagggtatcatcagtccagctatggtgggcaatcagggtccacagcccccgccattccctatggagcctacaatggcccagtaccaggctatcagcaaacacctccccaaggtatgtcaagagccccaccttcctcgggggcacctccagcctcaacagcacaggctccttgtggccaggctgcatatggccagtttggccaaggagatgtacagaatgggccaagctccactgttcagatgcaaaggctgcctgggtctcagccatttgggtccccattggcccctgtgggcaaccagccacctgtgcttcagccctatggccctcccccgacaagtgcacaggtggctacgcagctgtctggaatgcagatcagcggtgctgtggccccagcccctccttcttcagggctgggctttggcccaccaacatcgctggcttcagcctcaggaagtttccctaactctggtctgtatggctcctatcctcagggccaggctcctccccttagccaggcccaaggtcatcctgggatccagactccccagcgatctgccccatcacaggcctccagcttcacacccccagcttcagggggtcctcggctgccttcgatgactggtccactcctgcctggacagagttttggagggccctcagtgagccagcccaaccatgtgtcttcacctcctcaagctctgccccctggcacccagatgactgggcccctgggaccactgccacctatgcactccccgcagcagccaggctatcagccccaacaaaatggttccttcggaccagcccggggccctcagtctaattatggaggcccctacccagcagcacccacctttggcagtcagcctgggcctcctcagccactgcctcctaagcgcctggaccctgatgccatcccaagccctattcaggtcattgaagatgacaggaacaaccggggtacagagccatttgttactggagtacggggccaggtgccacccttagtcactaccaacttcctggtgaaagaccaagggaatgcaagtccccgatacatccgatgtacatcctataatatcccttgcacatctgacatggctaagcaggctcaggtgcccctggcagcagtcatcaaaccgctggcaaggctgcccccagaggaggcttcaccgtatgttgtggaccatggggaatctggccctttgcgctgcaaccgctgcaaagcatacatgtgtcccttcatgcagttcattgaaggagggaggcgtttccagtgctgtttttgcagctgtatcaatgatgttcccccccagtattttcagcacctggatcataccggcaaacgtgtggatgcttatgaccgccctgagctatccctgggctcttatgaattcttggccactgtagattactgcaagaacaataagttccccagccctcctgcctttatcttcatgattgacgtctcctacaatgccatcaggactggtcttgttaggctcctctgtgaggagctcaagtcactgttagactttctacctagggagggtggggcagaagagtcagcaatccgcgttggctttgtcacctacaataaggtgctccacttctataatgtgaagagctcattggcccagccacagatgatggttgtgtctgatgtggctgacatgtttgtgccactgctggatggcttcctggtcaacgtcaatgagtctcgggcagttatcaccagcttattggatcagattccagaaatgtttgcagacacaagggaaacagagacagtatttgtaccagttatccaggctggaatggaggctctgaaggctgctgagtgtgcagggaagctctttctattccatacatccctgcccattgcagaggccccagggaaactgaagaacagagatgacaggaagctgatcaatacagacaaggagaagactctgttccagcctcagacaggtgcctatcagaccctggccaaagagtgtgtggcccaaggctgctgtgtagatctctttctcttccctaaccagtatgtggatgtggccacactctctgttgtgccccagctcactggtggctctgtctacaaatatgcttcctttcaggtggagaacgaccaggagcggttcctgagtgacctgcgtcgtgatgtccagaaggttgttggctttgatgctgtgatgcgggtccggacaagcactggtatccgtgctgtagatttctttggagctttctacatgagcaacacgacagatgtggagctggctgggctagatggggacaaaacagtgactgtggagttcaagcatgacgatcggctcaatgaagagagcggagctctcctgcagtgtgccctgctttacaccagctgtgcagggcagcgtcggctccgcatccataatctggccctgaactgctgcacccagctggctgatctatatcgaaactgtgagactgacacgctcatcaactacatggccaagtttgcatatcggggagtcctgaatagccctgtgaaggctgttcgtgacacgctcatcacccagtgtgcccagatcctggcctgttacagaaagaactgtgctagcccctcctctgcaggacagttgatccttcctgagtgcatgaagctactcccagtttacctgaactgtgtgttgaagagtgatgtcctgcagcctggagctgaagtcactactgatgaccgtgcctatgtccgacagctagttacctccatggatgtgactgagaccaatgtcttcttctaccctcggctcttacctttgacaaagtctcccgttgagagtactaccgaaccaccagcagttcgagcctctgaagagcgtctaagcaatggggatatatatttactggagaatgggctcaacctcttcctctgggtgggagcaagcgtccaacagggtgttgtccagagccttttcagcgtctcctccttcagtcagatcaccagtggtttgagtgttctgccagttctggataatccactgtccaagaaggttcgaggcctcattgatagcttacgggcacagagatcccggtacatgaagcttaccgtggtgaaacaggaagacaagatggagatgctgttcaagcacttcctggtggaagacaagagtctgagtgggggagcatcttatgtggactttctctgtcatatgcacaaggagattcggcagctactgagctaaagcaagtgggtaaatggcatagggcccaggctagcttccagaaagcaccccaggatgtcagagaaattgggacagtaacatatcttatgtaagctgacctcagtctctctggggggagggggagatataaggagacaccttctttctgggctcaagtatcctgccactctgtcatgtcctgctgatggaaggtgcccctgttccctcattctaccctctttttcctgctaatcctgtcataatgaatgtagcttctcagttcactgtatatgattcggtattgggggtttggaggcacccagaccctggcaatattatgtgtccctttggaccagtctcccaagaggagaggggcaggcaggaaagagtggggatcctaaggttactacagggggctcagtgtcatccacaacttcctatattagggataaaacatataggtgcacaagagctggggtatagcccataggtggtggagagaaaagtggtcagtccttcttgggcctggaggttagcagtcaagtttctctgctttcactgctcgctcgctctctcctgcaatgattgatgatcactccgtggatagagaggcacactgtcagaggtgaccggagaactgagttgcaaaatatattaagatctggtagaggtaccagcttcctttccagctggagaggccccaacactggatggttctgtagggagcctagggagcctggtcatcaacttgcaatacctcacagagccagttcacatcccactctgagctcccacgagaaacactgcttctccaggcccggggttgttggggagagaggcagaggcagctggagcgccgttctctcctgctgggacaccgcttgggctttggtattgactgagtggctgacagttatcttccaaccccaactggcttgggggcaggacaagggctaggcttgatggtggccaggcttgcctgctccccacctgggatgcccctgctctggacctctcatttctcttcattggtttatttttcaatgcatctttaatttgtaaagaaataaaataaattaagatgtaaaaaaaaaaaaaaaaaaaaaaaaaaaaaaaaaaaaaaaaaa

SEQ ID NO: 668 - DNA, 4170 bp, human
cgcgggtctgtggagagccgggtgcgagcggcggcagcacgaggggaaaagagctgagcggagaccaaagtcagccgggagacagtgggtctgtgagagaccgaatagaggggctggggccacgagcgccattgacaagcaatggggaagaaacagaaaaacaagagcgaagacagcaccaaggatgacattgatcttgatgccttggctgcagaaatagaaggagctggtgctgccaaagaacaggagcctcaaaagtcaaaagggaaaaagaaaaaagagaaaaaaaagcaggactttgatgaagatgatatcctgaaagaactggaagaattgtctttggaagctcaaggcatcaaagctgacagagaaactgttgcagtgaagccaacagaaaacaatgaagaggaattcacctcaaaagataaaaaaaagaaaggacagaagggcaaaaaacagagttttgatgataatgatagcgaagaattggaagataaagattcaaaatcaaaaaagactgcaaaaccgaaagtggaaatgtactctgggagtgatgatgatgatgattttaacaaacttcctaaaaaagctaaagggaaagctcaaaaatcaaataagaagtgggatgggtcagaggaggatgaggataacagtaaaaaaattaaagagcgttcaagaataaattcttctggtgaaagtggtgatgaatcagatgaatttttgcaatctagaaaaggacagaaaaaaaatcagaaaaacaagccaggtcctaacatagaaagtgggaatgaagatgatgacgcctccttcaaaattaagacagtggcccaaaagaaggcagaaaagaaggagcgcgagagaaaaaagcgagatgaagaaaaagcgaaactgcggaagctgaaagaaaaagaagagttagaaacaggtaaaaaggatcagagtaaacaaaaggaatctcaaaggaaatttgaagaagaaactgtaaaatccaaagtgactgttgatactggagtaattcctgcctctgaagagaaagcagagactcccacagctgcagaagatgacaatgaaggagacaaaaagaagaaagataagaagaaaaagaaaggagaaaaggaagaaaaagagaaagagaagaaaaaaggacctagcaaagccactgttaaagctatgcaagaagctctggctaagcttaaagaggaagaagaaagacagaagagagaagaggaagaacgtataaaacggcttgaagaattagaagccaagcgtaaagaagaggaacgattggaacaagaaaaaagagaaaggaaaaagcaaaaagaaaaagaaagaaaagaacgcttgaaaaaagaagggaaacttttaactaaatcccagagagaagccagagccagagccgaagctactcttaaactgctacaagctcagggtgttgaagtgccatcaaaagactctttgccaaagaagaggccaatttatgaagataaaaagaggaaaaaaataccacagcagctagaaagtaaagaagtgtctgaatcaatggaattatgtgctgctgtagaagttatggaacaaggagtaccagaaaaggaagagacaccacctcctgttgaaccagaagaagaagaagatactgaggatgctggattggatgattgggaagctatggccagtgatgaggagacagaaaaagtagaaggaaacacagttcatatagaagtaaaagaaaaccctgaagaggaggaggaggaggaagaagaggaagaagaagatgaagaaagtgaagaagaggaggaagaggagggagaaagtgaaggcagtgaaggtgatgaggaagatgaaaaggtgtcagatgagaaggattcagggaagacattagataaaaagccaagtaaagaaatgagctcagattctgaatatgactctgatgatgatcggactaaagaagaaagggcttatgacaaagcaaaacggaggattgagaaacggcgacttgaacatagtaaaaatgtaaacaccgaaaagctaagagcccctattatctgcgtacttgggcatgtggacacagggaagacaaaaattctagataagctccgtcacacacatgtacaagacggtgaagcaggtggtatcacacaacaaatttgggccaccaatgttcctcttgaagctattaatgaacagactaagatgattaaaaattttgatagagagaatgtacggattccaggaatgctaattattgatactcctgggcatgaatctttcagtaatctgagaaatagaggaagctctctttgtgacattgccattttagttgttgatattatgcatggtttggagccccagacaattgagtctatcaaccttctcaaatctaaaaaatgtcccttcattgttgcactcaataagattgataggttatatgattggaaaaagagtcctgactctgatgtggctgctactttaaagaagcagaaaaagaatacaaaagatgaatttgaggagcgagcaaaggctattattgtagaatttgcacagcagggtttgaatgctgctttgttttatgagaataaagatccccgcacttttgtgtctttggtacctacctctgcacatactggtgatggcatgggaagtctgatctaccttcttgtagagttaactcagaccatgttgagcaagagacttgcacactgtgaagagctgagagcacaggtgatggaggttaaagctctcccggggatgggcaccactatagatgtcattttgatcaatgggcgtttgaaggaaggagatacaatcattgttcctggagtagaagggcccattgtaactcagattcgaggcctcctgttacctcctcctatgaaggaattacgagtgaagaaccagtatgaaaagcataaagaagtagaagcagctcagggggtaaagattcttggaaaagacctggagaaaacattggctggtttacccctccttgtggcttataaagaagatgaaatccctgttcttaaagatgaattgatccatgagttaaagcagacactaaatgctatcaaattagaagaaaaaggagtctatgtccaggcatctacactgggttctttggaagctctactggaatttctgaaaacatcagaagtgccctatgcaggaattaacattggcccagtgcataaaaaagatgttatgaaggcttcagtgatgttggaacatgaccctcagtatgcagtaattttggccttcgatgtgagaattgaacgagatgcacaagaaatggctgatagtttaggagttagaatttttagtgcagaaattatttatcatttatttgatgcctttacaaaatatagacaagactacaagaaacagaaacaagaagaatttaagcacatagcagtatttccctgcaagataaaaatcctccctcagtacatttttaattctcgagatccgatagtgatgggggtgacggtggaagcaggtcaggtgaaacaggggacacccatgtgtgtcccaagcaaaaattttgttgacatcggaatagtaacaagtattgaaataaaccataaacaagtggatgttgcaaaaaaaggacaagaagtttgtgtaaaaatagaacctatccctggtgagtcacccaaaatgtttggaagacattttgaagctacagatattcttgttagtaagatcagccggcagtccattgatgcactcaaagactggttcagagatgaaatgcagaagagtgactggcagcttattgtggagctgaagaaagtatttgaaatcatctaattttttcacatggagcaggaactggagtaaatgcaatactgtgttgtaatatcccaacaaaaatcagacaaaaaatggaacagacgtatttggacactgatggacttaagtatggaaggaagaaaaataggtgtataaaatgttttccatgagaaaccaagaaacttacactggtttgacagtggtcagttacatgtccccacagttccaatgtgcctgttcactcacctctcccttccccaacccttctctacttggctgctgttttaaagtttgcccttccccaaatttggatttttattacagagtctaaagctctttcgattttatactgattaaatcagtactgcagtatttgattaacca

SEQ ID NO: 669 - DNA, 5200 bp, human
ggctgaccgccatcttccctcccgaggcggcagttccaggtgcaagcgccgggtttgctgcccgctgggcgcccctgcagcggcccgagctgtggccggcgtggatgaggggcaggcgaggcagggccgcccctccagtattgccgcccctcccgccccagggcagggctgggagggtacagcccgggggcgggctcgggtcgcctcccggccgccgcgtcctcgctgccccgggccgggcgggcgggcgccgagagcctcccagcccgccccgtgccccgcccgcccggctgcttccgcggcggcgctgcccgcacatgggctaggctgccaggatgttcagcttcgaaggcgacttcaagacgcggcccaaggtgtcccttggcggcgcgagcaggaaggaggaaaaggcttctcttttacatcgtactcaggaagaaagaagaaagagagaggaagaaaggcgaaggttgaaaaatgcaataattatccagtcatttattcgaggctatagagacagaaaacagcaatattccatccaaagaagtgcatttgatcgctgtgctaccttgtcacagtccgggggcgcttttcccattgctaatggccccaaccttacccttttggtaaggcagcttctgtttttttacaaacaaaatgaagactcaaaacgtttgatatggctgtatcagaacttaattaaacacagctctctgtttgtcaagcagttggatggatctgagagacttacatgcttatttcagataaaaagattgatgagcctctgttgcaggttgctgcaaaactgtaatgatgacagtttgaatgttgcacttccaatgagaatgcttgaagtattttcgtctgagaatacttacttgcctgttttacaagatgctagctatgtggtgtcagtgattgaacaaattttgcactacatgattcacaatgggtattataggtctctatatttgttgattaacagcaagcttccatcaagtattgaatattctgatttatctcgagttcctatagcaaaaattttgctagagaatgttctaaaaccattgcactttacttacaactcctgtccggaaggtgcgaggcaacaagtttttacagccttcacagaggagtttctggcagcaccttttacagatcagatttttcatttcatcattccggcgcttgcagatgcgcagaccgttttcccttacgagccctttctgaatgcactgttgttaatagagagtagatgttcaagaaagagtggtggagcaccctggcttttctatttcgttttaactgttggcgaaaattatttgggggccctctctgaggaagggctgctggtgtatttgcgggtgctgcagaccttcctctctcagttaccagtctctcctgccagcgcgagctgtcacgactcagccagtgactctgaggaggagagtgaagaagccgacaagccctcaagcccggaggatggcagactgtcagtatcatacataacagaggaatgcctgaagaagctggacacaaagcagcagaccaacaccctgctcaacctggtgtggagggactctgcgagcgaggaggtcttcaccaccatggcctccgtctgccacacgctgatggtgcagcaccgcatgatggtacccaaagtcaggcttctctacagtttagcctttaatgccaggtttctgagacatctttggtttctaatatcttccatgtcaacacggatgatcacagggtctatggtaccgttgcttcaggtgatatccaggggttctcctatgtcttttgaagattctagtcgaatcatcccactcttttatctttttagctccttgtttagtcattcactaatttccatacatgataacgaattcttcggtgatcccatagaagttgtaggtcaaagacaatcatcaatgatgccttttactttagaagagctgataatgttgtctcgatgccttcgagatgcatgcctggggatcatcaagttggcttatccagaaaccaagccagaagttcgagaagaatatattacagcatttcagagtattggagttactactagctctgaaatgcaacaatgcatacagatggaacagaaaagatggattcagttatttaaggttatcaccaatctagtgaaaatgttgaagtccagagacacgaggagaaatttttgtcctccaaaccactggctgtcagaacaagaagatattaaagcagataaggtcactcagctctatgtgccagcatccagacatgtgtggaggttccggcggatggggaggataggcccgctgcagtccaccctggacgtgggtttggagtccccgccgctgtctgtgtctgaggaaagacagcttgctgtcctgacagagttgccttttgtggttccatttgaggaacgagtaaagatctttcagaggttgatttatgcagataagcaagaagttcaaggagatggtccatttctggatggaattaatgtcacaataagaagaaattacatttatgaagatgcttatgacaaactttctccagaaaatgagcctgatttgaaaaagcggatccgtgtgcacttgctcaatgcccatggcctggatgaagctggcattgatggtggtggtattttcagagagtttttaaatgaactactgaagtcaggatttaaccccaaccaggggttctttaagactactaatgaagggcttctgtaccccaacccggctgctcagatgcttgtgggagattcttttgccagacattactacttcctaggcagaatgcttggaaaggctctctatgagaacatgctggtggagctgccctttgcaggcttctttctttccaagttgcttggaaccagtgccgacgtggacattcaccacctcgcctccctagaccctgaggtgtataagaatttgctctttctgaagagctacgaagacgatgtggaggagcttgggctgaacttcactgtggtgaacaatgacctgggagaggcgcaggtagttgaactaaaattcggtgggaaagacatccctgtcaccagcgccaaccggattgcgtacatccacttggtggcagactacaggctgaacaggcagatccgccagcactgcctggctttccgccagggccttgccaatgtcgtcagcctcgagtggctccgaatgtttgatcagcaagaaattcaggtattaatttctggtgcacaagttcccataagcctagaggacctaaaatcctttacaaactattcaggaggctattctgcagaccatcctgttattaaggtcttctggagagttgtggaagggttcactgatgaagaaaagcgcaaactgctgaagtttgtaacaagctgctctcgaccccctctcttggggtttaaggagttgtatcccgcattttgtattcacaacggaggctccgaccttgagcggctccccacagccagcacctgcatgaacctgctgaagctccccgagttctatgacgagacacttttgcgaagtaaacttctctatgcgattgaatgtgccgctggctttgagctgagctgaagctgatgctggggtcagacccctacagagaaccagtgcttccttcgtcagcagcgcctccccagacccacgaggatactcacactgcacgcctgaggctctcctaagctccttctttcattctgccattcctccctcccttccttttttaaatgatttttattacggtgtggtcacttatttagatggacattgcttttcaaataacttaaaataacacgttatgtgccatgtggctactttagtaatattgccaagaagagcacagtttttacactagtggcatctcagtgaaattaaccaaagatgaagctttggctttgctggtgagatcagagccctcctgagcaggcagcgccactccagggttcagacagggctgcacaggcggcagagatacagggtctgagggctgagacgccatggggccgctgctgcttatgtggttggattgtttacaagcctcattattaaaactgaaggcattttttttttctgctgcctttcccaaagtggttaggtttggaaaagagatgatgatggtaatattttatttgtgctttttaagccatttccccaaatgggactagcatgcttgttttcagtataccgtggcctgcctcatgatggtttggagatactgtctgtggatgtgaggtggggacttcattcattgtcctatttctatctccactttgtgcctggagagctttcaggggaggtggaggaggagggtctgccaagctactgcaacatctgtcacccactatacccagttacttgggggaggacagacactgtggtgtcattaaagttgtttgaaccaaagtggcggctgcatctttgtcccgatgctagccgtgccggtctcccatcatccgctcgccctcctttcccctgggctgcgcccacttgtcttcctggatatttgggggtgactcgccatgcttggcaccctctgcttcctggtgctgctctgactcgaagacgggacagtccctggtgcacatccagggaagaggagtgtcggtagttcttgcagtaggcactttatcaggacctgacctgttgctgggtgattttagtctctacaaacagaaagcgtttcaaagcgtcagctgtgggagcagagtgaccctttgctgatgctggggggaggggatctaaatcctcatttatctcttctatgtctcgtattttactgtcactggaggctctgtgggctgtcatagttaattgaccataattagcaatatacttttaaagtgggaaagctgaatgacacttttaagacaatgaacattatcaaaacaaaatgtataatttcttaatttgaataataaattaagcgtttaaatgctatttgtagtcttgatatacagaaataaaataattagggttggtcttttttattttaggttgttttatgttgaatgttctatatcttattagttaatttgtatattttattagtattttggaaatagcatatctgagactgaagagaaattgacaattcacttatttgtggtttttttctcagctattctgagcttatttatttatttgtatgttctaatggctaaacatttacattaaatgttttttttccc

SEQ ID NO: 670 - DNA, 6693 bp, human
cttgccatcgtgagagattggtacatgatgtgtaaattcagttcagcatatgtttcttcattatgaaaccactagcaatcccagctaaccatggagttatgggccagcaggagaaacactcacttcctgcagatttcacaaaactgcatcttactgacagtctccacccacaggtgacccacgtttcttctagccattcaggatgtagtatcactagtgattctgggagcagcagtctttctgatatctaccaggccacagaaagcgaggctggtgatatggacctgagtgggttgccagaaacagcagtggattccgaagacgacgacgatgaagaagacattgagagagcatcagatcctctgatgagcagggacattgtgagagactgcctagagaaggacccaattgaccggacagatgatgacattgaacaactcttggaatttatgcaccagttgcctgcttttgccaatatgacaatgtcagtgaggcgagaactctgtgctgtgatggtgttcgcagtggtggaaagagcagggaccatagtgttaaatgatggtgaagagctggactcctggtcagtgattctcaatggatctgtggaagtgacttatccagatggaaaagcagaaatactgtgcatgggaaatagttttggtgtctctcctaccatggacaaagaatacatgaaaggagtgatgagaacaaaggtggatgactgccagtttgtctgcatagcccagcaagattactgccgtattctcaatcaagtagaaaagaacatgcaaaaagttgaagaggaaggagagattgttatggtgaaagaacaccgagaacttgatcgaactggaacaagaaagggacacattgtcatcaagggtacctcagaaaggttaacaatgcatttggtggaagagcattcagtagtagatccaacattcatagaagactttctgttgacctataggacttttctttctagcccaatggaagtgggcaaaaagttattggagtggtttaatgacccgagcctcagggataaggttacacgggtagtattattgtgggtaaataatcacttcaatgactttgaaggagatcctgcaatgactcgatttttagaagaatttgaaaacaatctggaaagagagaaaatgggtggacacctaaggctgttgaatatcgcgtgtgctgctaaagcaaaaagaagattgatgacgttaacaaaaccatcccgagaagctcctttgccttttatcttacttggaggctctgagaagggatttggaatctttgttgacagtgtagattcaggtagcaaagcaactgaagcaggcttgaaacggggggatcagatattagaagtaaatggccaaaactttgaaaacattcagctgtcaaaagctatggaaattcttagaaataacacacatttatctatcactgtgaaaaccaatttatttgtatttaaagaacttctaacaagattgtcagaagagaaaagaaatggtgccccccaccttcctaaaattggtgacattaaaaaggccagtcgctactccattccagatcttgctgtagatgtagaacaggtgataggacttgaaaaagtgaacaaaaaaagtaaagccaacactgtgggaggaaggaacaagctgaaaaagatactcgacaagactcggatcagtatcttgccacagaaaccatacaatgatattgggattggtcagtctcaagatgacagcatagtaggattaaggcagacaaagcacatcccaactgcattgcctgtcagtggaaccttatcatccagtaatcctgatttattgcagtcacatcatcgcattttagacttcagtgctactcctgacttgccagatcaagtgctaagggtttttaaggctgatcagcaaagccgctacatcatgatcagtaaggacactacagcaaaggaagtggtcattcaggctatcagggagtttgctgttactgccaccccggatcaatattcactatgtgaggtctctgtcacacctgagggagtaatcaaacaaagaagacttccagatcagctttccaaacttgcagacagaatacaactgagtggaaggtattatctgaaaaacaacatggaaacagaaactctttgttcagatgaagatgctcaggagttgttgagagagagtcaaatttccctccttcagctcagcactgtggaagttgcaacacagctctctatgcgaaattttgaactctttcgcaacattgaacctactgaatatatagatgatttatttaaactcagatcaaaaaccagctgtgccaacctgaagagatttgaagaagtcattaaccaggaaacattttgggtagcatctgaaattctcagagaaacaaaccagctgaagaggatgaagatcattaagcatttcatcaagatagcactgcactgtagggaatgcaagaattttaactcaatgtttgcaatcatcagtggcctaaacctggcaccagtggcaagactgcgaacgacctgggagaaacttcccaataaatacgaaaaactatttcaagatctccaagacctgtttgatccttccagaaacatggcaaaatatcgtaatgttctcaatagtcaaaatctacaacctcccataatccctctattcccagttatcaaaaaggatctcaccttccttcacgaaggaaatgactcaaaagtagacgggctggtcaattttgagaagctaaggatgattgcaaaagaaattcgtcacgttggccgaatggcttcagtgaacatggaccctgccctcatgttcaggactcggaagaagaaatggcggagtttggggtctctcagccagggtagtacaaatgcaacagtgctagatgttgctcagacaggtggtcataaaaagcgggtacgtcgtagttcctttctcaatgccaaaaagctttatgaagatgcccaaatggctcgaaaagtgaagcagtacctttccaatttggagctagaaatggacgaggagagtcttcagacattatctctgcagtgtgagccagcaaccaacacattgcctaagaatcctggtgacaaaaagcctgtcaaatccgagacctctccagtagctccaagggcagggtcacaacagaaagctcagtccctgccacagccccagcagcagccaccaccagcacataaaatcaaccagggactacaggttcccgccgtgtccctttatccttcacggaagaaagtgcccgtaaaggatctcccaccttttggcataaactctccacaagctttaaaaaaaattctttctttgtctgaagaaggaagtttggaacgtcacaagaaacaggctgaagatacaatatcaaatgcatcttcgcagctttcttctcctcctacttctccacagagttctccaaggaaaggtggcagtggcaatcagctgagatcttttggctccgggcagttggacttaaccagttcctcctcttctcttggaagtgagaacagtaacaagaataacaatgcaccacggacctatgggataggctatactttggctcccagtggtactgtggataatttttcagattctggtcacagtgaaatttcttcacgatccagtattgttagcaattcgtcttttgactcagtgccagtctcactgcacgatgagaggcgccagaggcattctgtcagcatcgtggaaacaaacctagggatgggcaggatggagaggcggaccatgattgaacctgatcagtatagcttggggtcctatgcaccaatgtccgagggccgaggcttatatgctacagctacagtaatttcttctccaagcacagaggaactttcccaggatcagggggatcgcgcgtcacttgatgctgctgacagtggccgtgggagctggacgtcatgctcaagtggctcccatgataatatacagacgatccagcaccagagaagctgggagactcttccattcgggcatactcactttgattattcaggggatcctgcaggtttatgggcatcaagcagccatatggaccaaattatgttttctgatcatagcacaaagtataacaggcaaaatcaaagtagagagagccttgaacaagcccagtcccgagcaagctgggcgtcttccacaggttactggggagaagactcagaaggtgacacaggcacaataaagcggaggggtggaaaggatgtttccattgaagccgaaagcagtagcctaacgtctgtgactacggaagaaaccaagcctgtccccatgcctgcccacatagctgtggcatcaagtactacaaaggggctcattgcacgaaaggagggcaggtatcgagagcccccgcccacccctcccggctacattggaattcccattactgactttccagaagggcactcccatccagccaggaaaccgccggactacaacgtggcccttcagagatcgcggatggtcgcacgatcctccgacacagctgggccttcatccgtacagcagccacatgggcatcccaccagcagcaggcctgtgaacaaacctcagtggcataaaccgaacgagtctgacccgcgcctcgccccctatcagtcccaagggttttccaccgaggaggatgaagatgaacaagtttctgctgtttgaggcacagacttttctggaagcagagcgagccacctgaaaggagagcacaagaagacgtcctgagcattggagccttggaactcacattctgaggacggtggaccagtttgcctccttccctgccttaaaagcagcatggggcttcttctccccttcttcctttcccctttgcatgtgaaatactgtgaagaaattgccctggcacttttcagactttgttgcttgaaatgcacagtgcagcaatcttcgagctcccactgttgctgcctgccacatcacacagtatcattccaaattccaagatcatcacaacaagatgattcactctggctgcacttctcaatgcctggaaggattttttttaatcttccttttagatttcaatccagtcctagcacttgatctcattgggataatgagaaaagctagccattgaactacttggggcctttaacccaccaaggaagacaaagaaaaacaatgaaatcctttgagtacagtgcttgtccacttgtttacaatgtcctccttttaaaaaaaaaaaatgagtttaaagattttgttcagagagtaaatatatatccatttaatgattacagtattattttaaaccttaagtagggttgccagcctggtttctgaaaaaccaaatatgccggacagggtgtggccacaccaagaagacgggaagacctggcttgtgaccctggcttcccatgtccttctggtctcacccgcgaagtgccctatcctggaagtatgaaatgttagccaattaataccaagacacctcatctgctccttccccagtggatggggttcttctgtaaaactgtttgcacatggccaggggagggaactaggacccttgtgtcctgtctgagccttatggaggcaggacggtgtcattggcggatgtgtcctgctccattgagatggatggcaaaccccatttttaagttatatttctttgatttttgttaatttagaggtgtaggttttgttttttgtttttttgtttttttttaagagaaacatttataactggatagcattgcagtgaaagcagcttgggatgttggagctaatgccagctgtttatactgctctttcaagacagcctccctttattgaattggcattagggaataaacaagcctttaaacgtgataaaagatcaaaaacctggttagacatgccagcctttgcaaggcaggttagtcaccaaagactaacctccaagtggctttatggacgctgcatatagagaaggcctaagtgtagcaaccatctgctcacagctgctattaaccctataatgactgaaatgacccctccactctatttttgtgttgttttgcacagactccggaaaagtgaaggctgccaatctgagtagtactcaaatgtgaggaactgctggtcttggattttttttccattaaattcagctgatcatattgatcagtagataaacgtaaatagcttcaaattttaaaagtggaattgcagtgttttttcactgtatcaaacaatgtcagtgctttatttaataattctcttctgtatcatggcatttgtctacttgcttattacattgtcaattatgcatttgtaattttacatgtaatatgcattatttgccagttttattatataggctatggacctcatgtgcatatagaaagacagaaatctagctctaccacaagttgcacaaatgttatctaagcattaagtaattgtagaacataggactgctaatctcagttcgctctgtgatgtcaagtgcagaatgtacaattaactggtgatttcctcatacttttgatactacttgtacctgtatgtcttttagaaagacattggtggagtctgtatcccttttgtatttttaatacaataattgtacatattggttatatttttgttgaagatggtagaaatgtactatgtttatgcttctacatccagtttgtacaagctggaaaataaataaatataacat

SEQ ID NO: 671 - DNA, 5807 bp, human
gcgcgcgcgagggcgttgggcgccgccgcgaggcggggaagcgcggggccgcggcggtgcgggttctagggcggcggccgtcgccgtcgcagcagcgccccgagcggggagggccgaggaggcccgacgagctggggatggagagtaccgggcccctcactgcctcagagcgcgtgtgcggctctgggcgcgcacagtgacggtgacggcacccctggcccggcagcgccgaggccgcttcgccagacagccagcggccggcggcaggccgggccatgagcggcaggggccgggccgggcctcgctgaccctggctccgcgcggcagcttccccagtttccgctccggtctctcggcatgagagtccgcccgggcccggggctgcggctgccccagacccgccgcacgctggcgcgctccgggcccgcggagccgcggtgctgatacctgcgccgcactgcgccgcccgcccgtccgctgtgtgccccgggggcgcggccatggaggtggtgggtgacttcgagtacagcaagagggatctcgtgggacacggggccttcgccgtggtcttccgggggcggcaccgccagaaaactgattgggaggtagctattaaaagtattaataaaaagaacttgtcaaaatcacaaatactgcttggaaaggaaattaaaatcttaaaggaacttcagcatgaaaatattgtagcactctatgatgttcaggaattacccaactctgtctttttggtgatggagtattgcaatggtggagacctcgcagattatttgcaagcgaaagggactctcagtgaagacacgatcagagtgtttctgcatcagattgctgctgccatgcgaatcctgcacagcaaaggaatcatccacagagatctcaaaccacagaacatcttgctgtcctatgccaatcgcagaaaatcaagtgtcagtggtattcgcatcaaaatagcggattttggttttgctcgttacctacatagtaacatgatggctgcaacactgtgtggatccccgatgtacatggctcctgaggttattatgtctcaacattatgatgctaaggctgacttgtggagcataggaacagtgatataccaatgcctagttggaaaaccaccttttcaggccaatagtcctcaagacttaaggatgttttatgaaaaaaacaggagcttaatgcctagtattcccagagaaacatcaccttatttggctaatctccttttgggtttgcttcagagaaaccaaaaagatagaatggactttgaagcgttttttagccatccttttcttgagcaaggtccagtaaaaaaatcttgcccagttccagtgcccatgtattctggttctgtctctggaagctcctgtggcagctctccatcttgtcgttttgcttctccaccatcccttccagatatgcagcatattcaggaagaaaacttatcttccccaccattgggtcctcccaactatctacaagtttccaaagattctgccagtactagtagcaagaactcttcttgtgacacggatgactttgttttggtgccacacaacatctcgtcagaccactcatgtgatatgccaatggggactgctggcagacgtgcttcaaatgaattcttggtgtgtggagggcagtgtcagcctactgtgtcacctcacagcgaaacagcaccaattccagttcctactcaaataaggaattatcagcgcatagagcagaatcttacatctactgccagctcaggcacaaatgtacatggttctccaagatctgcagtggtacgaaggtccaacaccagccccatgggcttcctccggccgggatcatgctccccagtaccagcagacacagcacagacagttggacgaaggctctccactgggtcttctaggccttactcaccttcccctttggttggtaccattcctgagcaattcagtcagtgctgctgtgggcatcctcagggccatgactccaggagtagaaactcctcaggttctccagtgccacaagctcagtccccacagtctctcttatcgggtgctagactgcagagcgcccccaccctcactgacatctatcagaacaagcagaagctcagaaaacagcactctgaccccgtgtgcccatcccatactggggctgggtacagctactcgcctcagcccagtcggcctggcagccttggaacttctcccaccaagcacttggggtcctctccacggagttctgactggttctttaaaactcctttgccaacaatcattggctctcctactaagaccacagctcctttcaaaatccctaaaactcaagcatcttccaacctgttagccttggttactcgtcatgggcctgctgaagaacagtcgaaagatgggaatgagccacgggaatgtgcccattgcctcttagtgcaaggaagtgagaggcagcgggccgagcagcagagcaaggcagtgtttggcagatctgtcagtaccgggaagttatcagatcaacaaggaaagactcctatatgtcgacatcagggcagcacagacagtttaaatacagaacgaccaatggatatagctccggcaggagcctgtggtggtgttctggcacctcctgcaggtacagcagcaagttccaaggctgtcctcttcactgtagggtctcctccacacagtgcggcagcccccacttgtacccacatgttccttcgaacaagaacaacctcagtggggcccagcaactccgggggctctctttgtgccatgagtggccgcgtgtgcgtggggtccccgcctggcccaggcttcggctcttcccctccaggagcagaggcagctcccagcctgagatacgtgccttacggtgcttcaccccccagcctagaggggctcatcacctttgaagcccctgaactgccggaggagacgctgatggagcgggaacacacagacaccttacgccatctgaatgtgatgctgatgttcactgagtgtgtgctggacctgacagccatgaggggaggaaaccctgagctgtgcacatctgctgtgtccttgtaccagatccaggagagtgtggtggtggaccagatcagtcagctgagcaaagactgggggtgggtggagcagctggtgttgtacatgaaagcagcacagctgcttgcggcttctctgcatcttgccaaagcccagatcaagtccgggaaactgagcccatccacagctgtgaaacaagttgtcaagaatctgaacgaacgatataaattctgcatcaccatgtgcaagaaacttacagaaaagctgaatcgattcttctctgacaaacagaggtttattgatgaaatcaacagtgtgactgcagagaaactcatctataattgtgctgtagaaatggttcagtctgcagccctggatgagatgtttcagcagaccgaagatattgtttatcgctatcataaggcagcccttcttttggaaggcctaagtaggattctacaggaccctgcagatattgaaaatgtgcataaatataaatgtagtattgagagaagactgtcggcgctctgccatagcaccgcaaccgtgtgagcagcaggctcatcccgtggaccggtggtgggaacgtgaggtgatgcctttgggattacagcttgagttctgtcaccccatccccaggaaactgtagcttcttaactggtgactaccaaagaacaagcagtgatttgaaaaaggaaaaacaatccaaaaactacatatttgtaggaaatctgccttattggagaaaatcaccctttccctttttctttgtagaagcaggagcaagagtgtttggctcccagtttggacttggtgaataaatgtaccttagaactaggataatcggtacagttattcttaaagataattaaaaatgaaacaaagtgagtgctcgtcactgggttcatcagagcagtgtgtgaaattccatgtgtttgctgaggtgtaaaggtaaatgtattcacccctcatccaggcagtttgatatttggagtaagtttgtttaaatctgagcatgcatctttaaacagctcaggaagaaatagcttaagaagaagtgaaacatggatcttggaagaaattttgaaatcttcaatttgatcctaatatggatacatgttaatcttccaaaatctttcatattgcactaatttattaaaacaactgtgtattggattttgtaatttaactaaggcacaatggacttgtttaaaatattttacttgattgtatacatagaccctttccagaattcacatgtaatctccagtgaacttttaagtggttaaaacttgtattcatgtgaacctttgcacattttttttttttacttctttatctacacctacagattttctcagtaatgtttttgttagcttttggttccattttttattgtgcatgcagaatgtacattgatgcctgtgaccttaggtttattaaaggctaggtttatttgggcagtattagaaacaaaatcatggatcaagagatactcttgataatttgaatagggccaaaacaaagttggtgacctaaaggcttgttagtgatgtggagttcctacatgcagtgagtggaaaatgaagttcgttttctcttaggaaaatgggcagctgtcttctgcctaatgtgtatttttcatgttaattctgacagttcaccaaatagctagtcatggagaatgcaggcagttaacttaatatccctccaggaatggttcctacgttgtgtattatttggtttcttttacttacctgcttgaatacttgaataaaccattcaccaattttaatccttttattttaatccttttacataaaataatctgaactctttgacaaattgcacagagctctttggcattaatctaattttaatgtactgataaaaacaaacatggttgtcctttactttgacaaagtaatgtaatttttaccttatttatctgtatgaaattccagtagttaatttgaacatttatttatatgacgtttgtatttttaggtctttaatacagtgtttctacctctcatttgtaactgcatgcattattcttgaaactaggtaaaactcactgaattgttgtgtaatagcctttttattattgcctgtacaaatgtatattaaggtaaaataaaactgacaaagtgtttctagggtgtagctgggtacatattaagtggcttgttgagccaggtacttccttagtgagtttagagacttggccatgaatatcctttgtcctgccccaggatttagatcttggctactgtcatgcaggcttccaggaacatagactgttttacctccacaaccctatttgttattagtgatactttattttatataatattttttattcacagtgaaatttcattcatgttctttcagttatcacctgtgttatctcagttgtaggtttattctatcctctcctcttcctctcccatttcttttttaacacaggatgaaacaggttcagagaggggaagtgattggcctaaagtcaggaactaggcaagtggtcaagccatgctttgtgactttcaagttaattcttcttgttcttgtatattaaaggtcttggggtagatggtgtgtgtgaaacagtgaagtctcaacagcagaaaagaacaaaatgtaaattcatgaataatggttctggttatacttccattatcaaggctaattaagagattttgccttgagtatagcaataataaacaaatgctttatgtttccctg

SEQ ID NO: 672 - DNA, 2370 bp, human
atggcgcctcttctgtgtgccccaggagacaaagtctgcagtcggcacagagtcaccgtcagctgtcctggccgcagggtgttcaaggcgggacacaccaggctagagatccgcgatcgggccccgcctcaggctctgtgcacacccctgcctggtgacctccattggtgctccagcgtgaacatggtgcaaagataccagtctcctgtccgagtctacaagtacccgtttgagctggtcatggcggcctacgagaagcgtttccccacgtgcccacagatcccagtcttcctgggcagcgaggtcttgcgcgagtcccgcagcccggacggggctgtgcacgtggtggagcggagctgccggctgcgcgtggacgccccgcggctgctgcggaagatcgcaggtgttgagcacgtggtcttcgtgcagacaaacatcttgaactggaaggagaggacgctcctcatcgaagcgcacaatgagaccttcgccaaccgcgtggtggtgaacgagcactgcagctacacggtccaccctgagaatgaagactggacttgcttcgagcagtctgcctcactggacattcggtctttctttggctttgaaaatgccttggagaagatcgccatgaagcagtacaccgccaacgtcaagagggggaaggaggtgattgagcattacctgaatgagctcatctcccagggtacctcgcacattccgcgctggacgcctgccccagtccgtgaggaggatgcccgcaaccaggctggaccgagggaccccagctccctggaggcccacgggccccgtagcaccctggggcccgctctggaggcggtcagtatggacggggacaagctggatgcggactacattgagaggtgcctgggccacctcacgcccatgcaggagagctgcctgatccagcttcggcactggttacaggagacccacaaaggcaagattcccaaagatgagcacatccttcggttcctgcgggctcatgacttccacctggacaaggcccgggaaatgctgcgccagtccttgagctggcgcaagcagcaccaggtggatctcctccttcagacctggcaaccccctgccctgctggaggagttctatgcagggggctggcattaccaggacatagatggccgccccctctacatcctccgcctgggccagatggacaccaaaggcttgatgaaggccgtgggggaggaggcgctgctgcggcatgttctctccgtcaacgaggaaggacagaagcggtgtgaggggagcacaaggcagctgggccacctggagggactcaacatgcggcacctgtggcggccgggggtgaaggccctgctgcggatgattgaggtggttgaggacaattacccagagaccctgggtcggctgctcatcgtgcgagccccccgagtcttccccgtgctctggacactgatcagccccttcatcaatgagaacaccaggcggaagttcctcatctacagtggcagcaactaccagggacccggaggccttgtggactatctggatagagaagtgatccctgacttccttgggggagagagtgtgtgtaatgtccccgaaggagggctggtccccaagtccctctacatgacagaagaggagcaggagcacacggaccagctgtggcagtggagtgagacctaccattcagccagcgtgctccgcggagccccccacgaggtggccgtggagatcctggaaggagagtcggtcatcacctgggactttgacatcctgcgaggggacgtggtgttcagcctgtaccacaccaagcaggcgcccaggctgggcgcccgggaaccggggaccagggccagcgggcagctgatcgacaaaggctgggtcctgggcagggattacagccgtgtggaggctccccttgtctgccgggagggggagagcatccaggaggctggcattgcaggtggaatgtcactctctgactcccgaaatgacacatgcacacacgcagcaccagctccacgagcactggcagttgctgtcgatctcaccgaagttcccggtggggagaggggctcccatgtgacccggtggcccggcgtctacctgctccagtggcaaatgcacagcccccccagcagcgtggcctgcagcctcccgggtgtggacgatgtcctgacggctctgcacagccccgggcccaagtgcaaacttctctactactgtgaggtgctcgcctctgaggacttcaggggctccatgtccagcctggaatcctgcaccagcggcttctcccagctcagcgccgccacctcgtcctcctcctccggccagtctcatagcagctccctggtctccagatag

SEQ ID NO: 673 - DNA, 5002 bp, human
aggagggggttgggaggggagaggacgcgggcgaggaagaccagccccggggccccgatgttgtgactgtgacagactcactggggtttgtacatgctggggaggagccttcctttcaggggtgaccacattcatctgggcatgcctgcagtactcttggcccatggacctgaaggagaagcacctgggcgagcctccctcagccctgggcctgtccacgcggaaggccctcagcgtcctgaaggagcagctggaggcagtgctggaaggacatctcagggagcggaagaagtgtctgacgtggaaggaggtgtggagaagcagcttcctccaccacagtaaccgctgctcctgcttccactggccgggggcctcactcatgctactggccgtgctgctgctgctgggctgctgcgggggacagccagccgggagccgtggggtggggctggtgaatgcctcggccttgttcctgttactgcttctcaaccttgtgctcatcgggcggcaagaccggctgaagcgtcgggaggtagagcggaggctgcgagggatcattgaccaaatccaagatgccctcagggatggcagggagatccagtggcccagtgccatgtatccagacctccacatgccttttgcgccatcctggtccttgcactgggcctacagagacggacacctggtcaacctgccagtcagcctgctggttgaaggagacatcatagctttgaggcctggccaggaatcgtttgcttctctgagggggatgaaggatgacgagcacatcgtcctggagccgggagacctcttcccccccttctcccctccaccctcaccccggggagaagtggagagagggccacagagcccccagcagcaccggcttttccgtgtccttgagacccctgtgattgacaacatcagatggtgcctggacatggccctgtcccgaccagtcactgccctggacaatgagcggttcacagtgcagtcggtgatgctacactatgctgtgcccgtggtcctggccggcttcctcatcaccaatgccctgcgcttcatcttcagtgccccgggggtcacttcctggcagtacaccctcctccagctccaggtgaatggcgtcctgcccatcctccccctgctctttccagtcctctgggttctggcaactgcctgtggagaggcccgtgtcctggcccagatgagcaaggcctcacccagctccctgctggctaagttctcagaggatactctcagcagctatacggaggctgtctcctctcaggaaatgctgcgctgcatttggggccacttcctgagggtgctcggggggacatcgccaacgctgagccacagttccagcctgctgcacagcctgggctctgtcacggtcctgtgctgtgtggacaaacaggggatcctgtcatggccaaatcccagcccagagactgtactgttcttcagcgggaaggtggagccccctcacagcagccatgaggacctcaccgatggcctatccacccgctccttctgccatcccgagccccatgaacgagacgccctcttggctggctccctgaacaacaccctgcacctttccaatgagcaggagcgtggcgactggcctggcgaggctcccaagccccccgagccctattcacaccacaaagcgcatggccgcagcaaacacccatctggctccaacgtgagcttcagcagggacaccgagggtggtgaagaagagcccagcaagacccagcctgggatggagagcgacccctacgaagcagaggactttgtgtgtgactaccacctggagatgctgagcctgtcccaggaccagcagaacccctcctgcatccagtttgatgactccaactggcagctgcacctcacctccctcaaacccctgggcctcaatgtgctgctgaacctgtgtgatgccagcgtcaccgagcgcctgtgccgattctccgaccacctgtgcaacattgccctgcaagagagccacagcgccgtgctgcccgtccatgtgccctggggcctctgcgagcttgcccgcctcattggcttcactcctggggccaaggagcttttcaagcaggagaaccatctggcgctgtaccgcctccccagtgccgagacaatgaaggagacatcgctggggcggctctcctgtgtcaccaagcggcggcctcccctcagccacatgatcagcctcttcattaaagacaccaccaccagcacagagcagatgctgtcccatggcaccgctgatgtggtcttagaggcctgcacagacttctgggacggagctgacatctaccctctctcgggatctgacagaaagaaagtgctggacttctaccagcgagcctgcctgtctgggtattgctctgccttcgcctacaagcccatgaactgcgccctgtcctctcagctcaatggcaagtgcatcgagctggtacaggtgcccggccaaagcagcatcttcaccatgtgcgagctgcccagcaccatccccatcaagcagaacgcccgccgcagcagctggagctctgacgaagggatcggggaggtgctggagaaggaagactgcatgcaggccctgagcggccagatcttcatgggcatggtgtcctcccagtaccaggcccggctggacatcgtgcgcctcattgatgggcttgtcaacgcctgcatccgctttgtctacttctctttggaggatgagctcaaaagcaaggtgtttgcagaaaaaatgggcctggagacaggctggaactgccacatctccctcacacccaatggtgacatgcctggctccgagatccccccctccagccccagccacgcaggctccctgcatgatgacctgaatcaggtgtcccgagatgatgcagaagggctcctcctcatggaggaggagggccactcggacctcatcagcttccagcctacggacagcgacatccccagcttcctggaggactccaaccgggccaagctgccccggggtatccaccaagtgcggccccacctgcagaacattgacaacgtgcccctgctagtgccccttttcaccgactgcaccccagagaccatgtgtgagatgataaagatcatgctagagtacggggaggtgacctgctgcctgggcagctctgccaacctgcggaacagctgcctcttcctccagagcgacatcagcattgccctggatcccctgtacccatcccgttgctcctgggagacctttggctacgccaccagcatcagcatggcccaggcctcggatggcctttctcccctgcagctgtcagggcagctcaacagcctgccctgttccctgacctttcgccaggaggagaccatcagcatcatccggcttatcgaacaggctcggcatgccacctatggcatccgtaagtgcttcctcttcctgctgcagtgccagctgactcttgtggtcatccagttcctttcttgcctggtccagctgccgccactcctgagtaccaccgacatcctgtggctgtcctgcttttgctaccctctgctcagcatctctctgctcgggaagcccccccatagctccatcatgtctatggcaacggggaaaaacctccagtccattcccaagaagacccagcactacttcctgctctgcttcctgctcaagttcagcctcaccatcagctcctgcctcatctgctttggcttcacactgcagagcttctgtgacagctcccgggaccgcaacctcaccaactgctcctccgtcatgctgcccagcaacgacgacagggctccagcctggtttgaggactttgccaatggactgctgtcggctcagaagctcacggcagccctgattgtcctgcacactgtcttcatttccatcacccatgtgcatcgcaccaagcccctgtggagaaagagccccttgaccaacctctggtgggccgtgacagtgcctgtggtgctgctgggtcaggtggtccagacggctgtggacctgcagctgtggacacacagggacagccacgtccactttggcctggaggacgtgcccctgctgacatggctcctgggctgcctgtccctggtccttgtggtggtgaccaatgagatcgtgaagctacatgagattcgggtccgagtccgctaccagaagcgacagaagctgcagtttgaaactaagctgggcatgaactctcccttctgagccactggctgtggtggctgtagttgcccccgtccctggggctaaagccagacccatttctgaacaggggagtttgtatcatgaatgtttccaggtttgctcctgcacccgtggcactggaaacccagctccccgtgtcagaccccgctgtcttcctgagccctggggctcactgtggaggagctgacggcctgggcccttggccagtcctggctcttccctgggcctcaccagggacactcttgaatgtatggcctcaggcgctccctagagggggcctaaaccccctcacctgtgagctaccccctttagggatcccttgcccccttggagatcccttgccccccagtgcctctgctcgtgggtccctggacacggccttgaagccaaccttctttggaggagcaacagcagcagccttggccgacgcgtccaactcccaaggctgccgtggagggcaggggggtggtgcttgcctggatgtggccccgagtgcctcccctccctccctctgtgggggagtctcccgcctgaacctgaagatggagcagggcccccgcttcgccctggagcctcttcctgtgcctggctcaagctggctgcctgtcagtcttggggaatctggcccaggtctcctcagcctctgccccagttctgggagaagtttctactggtgtatattttttactggaaatgagccttttaggaatgaatgtagactggtttgtattaaaatgtgtcaattgctaaggaaaaaaaaaaaaaaaa

SEQ ID NO: 674 - DNA, 3752 bp, human
cggcgatggattggttgccgtggtctttactgcttttctccctgatgtgtgaaacaagcgccttctatgtgcctggggtcgcgcctatcaacttccaccagaacgatcccgtagaaatcaaggctgtgaagctcaccagctctcgaacccagctaccttatgaatactattcactgcccttctgccagcccagcaagataacctacaaggcagagaatctgggagaggtgctgagaggggaccggattgtcaacacccctttccaggttctcatgaacagcgagaagaagtgtgaagttctgtgcagccagtccaacaagccagtgaccctgacagtggagcagagccgactcgtggccgagcggatcacagaagactactacgtccacctcattgctgacaacctgcctgtggccacccggctggagctctactccaaccgagacagcgatgacaagaagaaggaaaaagatgtgcagtttgaacacggctaccggctcggcttcacagatgtcaacaagatctacctgcacaaccacctctcattcatcctttactatcatcgggaggacatggaagaggaccaggagcacacgtaccgtgtcgtccgcttcgaggtgattccccagagcatcaggctggaggacctcaaagcagatgagaagagttcgtgcactctgcctgagggtaccaactcctcgccccaagaaattgaccccaccaaggagaatcagctgtacttcacctactctgtccactgggaggaaagtgatatcaaatgggcctctcgctgggacacttacctgaccatgagtgacgtccagatccactggttttctatcattaactccgttgttgtggtcttcttcctgtcaggtatcctgagcatgattatcattcggaccctccggaaggacattgccaactacaacaaggaggatgacattgaagacaccatggaggagtctgggtggaagttggtgcacggcgacgtcttcaggcccccccagtaccccatgatcctcagctccctgctgggctcaggcattcagctgttctgtatgatcctcatcgtcatctttgtagccatgcttgggatgctgtcgccctccagccggggagctctcatgaccacagcctgcttcctcttcatgttcatgggggtgtttggcggattttctgctggccgtctgtaccgcactttaaaaggccatcggtggaagaaaggagccttctgtacggcaactctgtaccctggtgtggtttttggcatctgcttcgtattgaattgcttcatttggggaaagcactcatcaggagcggtgccctttcccaccatggtggctctgctgtgcatgtggttcgggatctccctgcccctcgtctacttgggctactacttcggcttccgaaagcagccatatgacaaccctgtgcgcaccaaccagattccccggcagatccccgagcagcggtggtacatgaaccgatttgtgggcatcctcatggctgggatcttgcccttcggcgccatgttcatcgagctcttcttcatcttcagtgctatctgggagaatcagttctattacctctttggcttcctgttccttgttttcatcatcctggtggtatcctgttcacaaatcagcatcgtcatggtgtacttccagctgtgtgcagaggattaccgctggtggtggagaaatttcctagtctccgggggctctgcattctacgtcctggtttatgccatcttttatttcgttaacaagctggacatcgtggagttcatcccctctctcctctactttggctacacggccctcatggtcttgtccttctggctgctaacgggtaccatcggcttctatgcagcctacatgtttgttcgcaagatctatgctgctgtgaagatagactgattggagtggaccacggccaagcttgctccgtcctcggacaggaagccaccctgcgtgggggactgcaggcacgcaaaataaaataactcctgctcgtttggaatgtaactcctggcacagtgttcctggatcctggggctgcgtggggggcgggagggcctgtagataatcttgcgtttttcgtcatcttattccagttctgtgggggatgagtttttttgtgggttgctttttcttcagtgctaagaaagttccctccaacaggaactctctgacctgtttattcaggtgtatttctggtttggatttttttttccttctttgttttaacaaatggatccaggatggataaatccaccgagataagggttttggtcactgtctccacctcagttcctcagggctgttggccaccctatgactaactggaagaggacacgccagagcttcagtgaggtttccgagcctctccctgcccatcctcaccactgaggccacgacaaagcacagctccagctcggacagcaccctcagtgccagccagcctctgccagacctctctttccctcttctccccagcctcctccagggctgcccaaggcagggtttccagccaggcctcggggtcatcttttcaccaggagcaaacccaagtcttagttgctacaagaaaatcccctggaagtactgggggccaggttccccagacagcaggaattgcccctgttcagagcagccggagtttgctggaccacaaggaagaagagaagagacttgcagtgaactgtttttgtgccaagaaaccctggacctggggccaagtatttcccaagccaagcatccacttgtctgtgtctgggaagggatggccaaggccgctagggtccttacccctcaggatcactccccagccctttcctcaggaggtaccgctctccaaggtgtgctagcagtgggccctgcccaacttcaggcagaacagggaggcccagagattacagatcccctcctgtaagtggccaggcattctctccctgccctctctggcctctggggtcatactcacttctttagccagccccatcccctccaccccacacctgagttcttgcctcctccttttggggacacccaaaacactgcttgtgagaaggaagatggaaggtaagttctgtcgttctttccccaatccccaggaatggacaagaagccaacttagaaagaagggtctcacgtggctggcctggctcctccgtagacccctgttcttttcaacctctgcccacccgtgcatgtcatcacaaacatttgctcttaagttacaagagaccacatccacccagggattagggttcaagtagcagctgctaacccttgcaccagcccttgtgggactcccaacacaagacaaagctcaggatgctggtgatgctaggaagatgtccctcccctcactgccccacattctcccagtggctctaccagcctcacccatcaaaccagtgaatttctcaatcttgcctcacagtgactgcagcgccaagcggcatccaccaagcatcaagttggagaaaagggaacccaagcagtagagagcgatattggagtcttttgttcattcaaatcttggattttttttttccctaagagattctctttttagggggaatgggaaacggacacctcataaagggttcaaagatcatcaatttttctgactttttaaatcattatcattattatttttaattaaaaaaatgcctgtatgcctttttttggtcggattgtaaataaatataccattgtcctacaaaaaaaaaaaaaaaaaaa

SEQ ID NO: 675 - DNA, 6611 bp, human
tgactgcatcacctggtctgtgaattttccattagaagcttggtgtgctgttaggtgaaagacttgctcagctatgcgtcattgggttttatcaacatataggcgaaaaaaatcctggtctctgagtgtacagctgagatgaaaatttcttttattggaggaagtattgagtgtgtgctctcaaatgcggcctcagttgagtagtgcattcctgagttttggaagcaaatttgcaaacaattgagagtcgtacagtgggtgttctaactggattcaggttttttctaatgtaattttttcacacgtaaattaaaaagtttagaaatgtcacacataacttcataacactttatggagaaatggttgtacttttaatttttttctttttatttatactccaactgactgagcagaggttgtacttctaaataactttgtggaagtttttagtaccataatttttataattttcattccagtcctttgatatttatgacagtacttctgaagcgcttactgagtgccggacactgttgtaagtgctttacggaacttgacttttttttttttttgagacggactctcgctctgtcgcccaggctggagtgcagtggtgcagtggctcgatctcggctcactgccacctctccctcatggtttcaaacacttctcctgcctcagcctcccaggtagccaggattatagccgcccgccaccactcccgactaattttattttgtatgttcttttttagtagagacggaggagtttcaccatgttggccaggctggtatcgacctcctgacctcaagtgatgtgtccatctcggcctcccaaggtgctggaattacaggtgtgagccactgtgctcggcctaccttttttttttgttttttgtttttttgaaaaggagtttcgctcttgtccaggctggagtataatggtgcgatctcagctcaccgcaatctccgcctcccagattcaagcgattctcctgcctcagcctcctcaggagctgggattacaggcgcccaccgccatgcccggctaatttttgtatttttagtagagacggggtttcactatattggccaggctggtctcgaactgctgacctcaagtaatccgcctgcctcagcctcccaaagtgctgggattacagacgtgatccaccaggatcacaccaggccgcgcctggcctgctttcattttaaaagtcaaatttgtcatccgcctcagtgcttgtaatcttttctgagtgagatactgaaatttgcagtttcgttttgcttgcacttgttcactggaccagtagtcactgttaaatgtaaaagtatctacttcctctgaaagttttttattcctttatttcctgcctgggcttgtcctccaccctacatgtatgcgtagtagatttagtgtttgttatcctaacctttaggtttagggattgactgggtttctgactttttatttggccaatgaggacgatacagaaaatgaagcattggtcattatcacattttaacgctgaaaaagtaagaaggacaaccccggaataaaatgatatcagtatcaagataaaagtttggaatgggagaaaaattctcaaagcctgaaagaaaatctgtagttacttttggtgacgctgtccagttcccacaatgtatcattccttatctgaaactagacatcctctgcagccagaagaacaagaagtaggcattgaccccttgtccagttactctaacaagtctggaggagattcaaataaaaatggaagaagaacaagttctactttagactctgaagggacttttaattcctataggaaagaatgggaagaactatttgtaaacaacaattacttggcaacaataaggcagaaggggattaatgggcagctgagaagcagcaggttccgcagcatttgctggaagctatttctttgtgttcttcctcaagacaaaagtcaatggataagtagaattgaagaattaagagcatggtatagcaacattaaagaaatacatattaccaacccgaggaaggttgttggccaacaagatttgatgatcaataatcctctttcacaggatgaagggagtctttggaacaaattcttccaagataaagaacttcgatcaatgattgaacaagatgtcaaaagaacgtttcctgaaatgcagtttttccagcaagaaaatgtgagaaaaattcttacagatgttcttttctgttatgccagagaaaacgagcagttgctttataaacagggcatgcacgaactgttagcacctatagtctttgtccttcactgtgaccaccaagcttttctacatgccagtgagtctgcacagcccagtgaggaaatgaaaactgtcttgaaccctgagtatctggaacatgatgcctatgcagtgttctcacaacttatggaaactgctgaaccttggttttcaacttttgagcatgatggtcagaaggggaaagaaacactgatgactcccattccctttgctagaccacaagatttagggccaacaattgctattgttactaaagtcaaccagatccaggatcatctactgaagaagcatgatattgagctttacatgcacttgaacagactagaaattgcaccacagatatatgggttaaggtgggtgcggctgctatttggacgagagttccccctgcaggaccttctggtggtctgggatgccttgtttgcagacggcctcagcctgggtttagtagattatatcttcgtagccatgttactttacatccgagatgctttgatctctagtaactaccagacctgtctcggccttctgatgcattacccattcatcggggatgtacactcactgattcttaaggctctgttccttagagatccaaagagaaatccaagaccagtgacttatcaattccatccaaatttagattattacaaagcacgaggagcagacctcatgaataaaagccggaccaatgccaaaggtgctcccctgaatataaataaggtctctaatagcctgattaattttggaagaaagttgatttccccagcaatggctccaggcagtgcaggtggccctgtacctggaggcaacagcagtagctcctcctctgttgtaattcctaccaggacctcagcagaggccccaagccatcacttgcaacagcaacagcagcagcagaggctgatgaaatcagaaagcatgcctgtgcaattgaacaaagggctaagttctaaaaacatcagttcatctccaagcgttgagagtttgcctggaggaagagaattcactggctctccaccttcatctgctactaaaaaagattccttttttagcaacatctcacgttctcgctcacacagcaaaactatgggcagaaaagaatctgaagaagaattagaagcccaaatttccttccttcaagggcagttgaatgacctggatgccatgtgcaaatactgtgcaaaggtgatggacactcatcttgtaaatattcaagatgtgatattacaagaaaatttggaaaaagaagatcaaattctggtttccctggcaggattaaaacagatcaaagacattctaaaaggttccctgcgttttaaccagagccagctagaggccgaagagaacgaacagatcaccattgcggacaaccactactgctccagcggccagggccagggccgaggccaaggccagagcgttcaaatgtcaggggccattaaacaggcctcttcagaaacgccagggtgcactgatagagggaattccgatgacttcatcctgatttccaaagatgatgatgggagcagtgccaggggctccttctccggccaggcccagcctcttcgcaccctcagaagcacctctgggaaaagccaggccccagtctgctccccactggtgttctcagatccactgatgggcccagcctcagcttcctccagcaaccccagctccagtcctgatgacgacagcagcaaggactctggcttcaccattgtgagtcccctggacatctgaccacagtgcccagtcctgccccacagggatctagccacccttcagtggccccaaggccagactgaggctcatccagtggagaaccttcttaaaccactgcttccttcccggcatgcatttggcattggtccagccctttgaaaccccttagagagaagcatatatggccacaaagcacagaggcttaggtttgccacatgcagacagggctttctgggcccttacctaatccccacccgactcttgctctgagttagagctgagttacgtacccagtatcacactcacagttagaaaagaccgaatcacaatttagaatcacttttcctctgtccccttctccccagctaagaatgtgtggcacctccatcagttatacttagaaggagcagaaatagttattttcgtatcttctatccctcaaagcatcagacatgggaaaattggtttataccaagaaagcttcctctgtggaaatctgtctcagcctactttattcctgcattgggaagccatatcgcagagctaaatgcaatagaatgaaccagaactagtggattccagggctgggggaaaaaaaaaaaagaaaaaacctcattactgacctctcaaagttataaggatctctgcaaacaggatctaagcttaggaataatatttaggtgtgatatagtgttagatttttttgatgtattaaagaatgcatctccaatccttaggccatatcaactttggccatcaatatctctccttaaacaattatatttcaccttttagaatctttcatagccagaaaacaagattactgtaagccagttttagctgcactgatttcaaaagatataagaatattactatccttcaaatggaaaatgcgaccttgactttatgggataaacatctttcagacagtcagttttctagtcaggtttctctggtttcagagctgtatatacctgtcaactgaggaataaagggaaaaacccaagttcattcccacccaaagtcagaatccctcattggccttaaggtagcagtcataagacagagaattggacctagagtcccttctgtggggaataaggatacctagagaacattccacatgccaagaggatgcaggatttctacacaaccccttcccttcttggaagtcaagtgtaggtactgcagggcctgtgctcagctgtgaaccccgtatcctgggccccactgccgggaccgggtctgacatgccagtgccttcctgggctgagcacagattagagactctcccccttgtcagtcagcaccttaggaaaccatgatgggcacagagcatcacatgagctgtttctctccttaaagaagatccctggaaaggatgcttttcctctcctttgcctgcgcaggaattctaacaggagtgggtgaggatggcagagggacacagtgcctgtctcgcctccatcagggagagcagccatgccagggatgactagctctttgagcctgtcctcagaggatggcgaggcagccgggcagtggaggccttcatggtaacaaatgaaagctcagtatagaggaacagacactgtttacgtccctcccactgctaaccttatatatctctatagacaaatgtgataatgacatgatttcccacctgccctccaagaaaatggtgactcactctcaagtcagctactgtagagagggttctaattggttctgcaatttgctcttaaactctagcagggaactctcctcttaccacatcagcatgtaaggtgaataataactctggttttgccagacagcaggttgtctgaccttcaaccactgggcaattgcctggcagatgcacacagtagctccctggcttctggctctgagtgttcctctcagcacctctgagtaagctgctgccaagcacatatccctatgacaacactttgtaaaagccgcggggcccccatacagcgagtgaccttgcaactgtgcagggttgccattggtcactttctcaccttgggaaggtgtcagtgttttcagttctaaggtaagaggtgtagagctgttcccaccagggctctgggacagactggaaaggaccacagacctggccatccctgggcagcagggccagtgtcacctgctgacctctagtatttcctttgccctagagctagagtcatgatagctgagggtcactcgccctgcaagagtcactaggcacccaccatgccaataaggctctccgctggctccctgcagttggctgggtgtttaatagtcactgaaaactcccagccctgctgcacactagaggcaggtcctctcggtcctctccatcctgtgcttctgtggcccccagcaagctcaccgcctccttggaggagagagacatacaaggacagtgggtcatgggtagtaccagcctcaaattcccacaggctcatactcagacaattgtattactgccttatgttttttaagtgtttttttaaattcttcatagttgagtattatttgcaattttattagttacagtgctattaaagaatatgtgctcctttt

SEQ ID NO: 676 - DNA, 4470 bp, human
cttttcctgcccccagactagaggcgggatgtagtctcttaggctaagagtgattggtcacaaggagactcggaagtgtctgatcagagccccagaggaggccttgagagcctgttggcgtaccgttccacacttggatccaggaatcgggcgtgttccaggctgctctctatggtagctttgggcggatagagggggcgcgcaaagtattaagggacaataatggccgctttcaaggtgtggattttggctccttgagcctgtctgagcgaggggtggcagcgccggcgccccagaatccgggacagaagggtcccaagagtcgcgcttggtgagagaaatcccagatcctgtgatgggggacaccagtgaggatgcctcgatccatcgattggaaggcactgatctggactgtcaggttggtggtcttatttgcaagtccaaaagtgcggccagcgagcagcatgtcttcaaggctcctgctccccgcccttcattactcggactggacttgctggcttccctgaaacggagagagcgagaggagaaggacgatggggaggacaagaagaagtccaaagtctcctcctacaaggactgggaagagagcaaggatgaccagaaggatgctgaggaagagggcggtgaccaggctggccaaaatatccggaaagacagacattatcggtctgctcgggtagagactccatcccatccgggtggtgtgagcgaagagttttgggaacgcagtcggcagagagagcgggagcggcgggaacatggtgtctatgcctcgtccaaagaagaaaaggattggaagaaggagaaatcgcgggatcgagactatgaccgcaagagggacagagatgagcgggatagaagtaggcacagcagcagatcagagcgagatggagggtcagagcgtagcagcagaagaaatgaacccgagagcccacgacatcgacctaaagatgcagccaccccttcaaggtctacctgggaggaagaggacagtggctatggctcctcaaggcgctcacagtgggaatcgccctccccgacgccttcctatcgggattctgagcggagccatcggctgtccactcgagatcgagacaggtctgtgaggggcaagtactcggatgacacgcctctgccaactccctcctacaaatataacgagtgggccgatgacagaagacacttggggtccaccccgcgtctgtccaggggccgaggaagacgtgaggagggcgaagaaggaatttcatttgacacggaggaggagcggcagcagtgggaagatgaccagaggcaagccgatcgggattggtacatgatggacgagggctatgacgagttccacaacccgctggcctactcctccgaggactacgtgaggaggcgggagcagcacctgcataaacagaagcagaagcgcatttcagctcagcggagacagatcaatgaggataacgagcgctgggagacaaaccgcatgctcaccagtggggtggtccatcggctggaggtggatgaggactttgaagaggacaacgcggccaaggtgcatctgatggtgcacaatctggtgcctccctttctggatgggcgcattgtcttcaccaagcagccggagccggtgattccagtgaaggatgctacttctgacctggccatcattgctcggaaaggcagccagacagtgcggaagcacagggagcagaaggagcgcaagaaggctcagcacaaacactgggaactggcggggaccaaactgggagatataatgggcgtcaagaaggaggaagagccagataaagctgtgacggaggatgggaaggtggactacaggacagagcagaagtttgcagatcacatgaagagaaagagcgaagccagcagtgaatttgcaaagaagaagtccatcctggagcagaggcagtacctgcccatctttgcagtgcagcaggagctgctcactattatcagagacaacagcatcgtgatcgtggttggggagacggggagtggtaagaccactcagctgacgcagtacctgcatgaagatggttacacggactatgggatgattgggtgtacccagccccggcgtgtagctgccatgtcagtggccaagagagtcagtgaagagatggggggaaaccttggcgaggaggtgggctatgccatccgctttgaagactgcacttcagagaacaccttgatcaaatacatgactgacgggatcctgctccgagagtccctccgggaagccgacctggatcactacagtgccatcatcatggacgaggcccacgagcgctccctcaacactgacgtgctctttgggctgctccgggaggtagtggctcggcgctcagacctgaagctcatcgtcacatcagccacgatggatgcggagaagtttgctgccttttttgggaatgtccccatcttccacatccctggccgtaccttccctgttgacatcctcttcagcaagaccccacaggaggattacgtggaggctgcagtgaagcagtccttgcaggtgcacctgtcgggggcccctggagacatccttatcttcatgcctggccaagaggacattgaggtgacctcagaccagattgtggagcatctggaggaactggagaacgcgcctgccctggctgtgctgcccatctactctcagctgccttctgacctccaggccaaaatcttccagaaggctccagatggcgttcggaagtgcatcgttgccaccaatattgccgagacgtctctcactgttgacggcatcatgtttgttatcgattctggttattgcaaattaaaggtcttcaaccccaggattggcatggatgctctgcagatctatcccattagccaggccaatgccaaccagcggtcagggcgagccggcaggacgggcccaggtcagtgtttcaggctctacacccagagcgcctacaagaatgagctcctgaccaccacagtgcccgagatccagaggactaacctggccaacgtggtgctgctgctcaagtccctcggggtgcaggacctgctgcagttccacttcatggacccgcccccggaggacaacatgctcaactctatgtatcagctctggatcctcggggccctggacaacacaggtggtctgacctctaccgggcggctgatggtggagttcccgctggaccctgccctgtccaagatgctcatcgtgtcctgtgacatgggctgcagctccgagatcctgctcatcgtttccatgctctcggtcccagccatcttctacaggcccaagggtcgagaggaggagagtgatcaaatccgggagaagttcgctgttcctgagagcgatcatttgacctacctgaatgtttacctgcagtggaagaacaataattactccaccatctggtgtaacgatcatttcatccatgctaaggccatgcggaaggtccgggaggtgcgagctcaactcaaggacatcatggtgcagcagcggatgagcctggcctcgtgtggcactgactgggacatcgtcaggaagtgcatctgtgctgcctatttccaccaagcagccaagctcaagggaatcggggagtacgtgaacatccgcacagggatgccctgccacttgcaccccaccagctccctttttggaatgggctacaccccagattacatagtgtatcacgagttggtcatgaccaccaaggagtatatgcagtgtgtgaccgctgtggacggggagtggctggcggagctgggccccatgttctatagcgtgaaacaggcgggcaagtcacggcaggagaaccgtcgtcgggccaaagaggaagcctctgccatggaggaggagatggcgctggccgaggagcagctgcgagcccggcggcaggagcaggagaagcgcagccccctgggcagtgtcaggtctacgaagatctacactccaggccggaaagagcaaggggagcccatgacccctcgccgcacgccagcccgctttggtctgtgagctgaggctgtccccagagaggatggcagcaggtattgggtcctcagccttctggcgggagccctgaggctgcggacaaagccctttcatctgaggactttcatctgtgcatatcacggccccccagggcagttcctgctggaccagactctctggcagaggaggtggagttcttccatgcaggagcacggcatggcgggagcggggctgcagagtatccgaggtgctgccggggcagcgggaggtggctggacccatcgcatctaaaactggcccaggacacttggtgtatgcgtgacttggctgtggctgtcttttttaatccttgtgtaaagcagcaaaaaagacctaaagggaattgtaatttggttataattcaggatttggaaataaatttattatttgtaaaacatgaaaaaaaaaaaaaaaaa

SEQ ID NO: 677 - DNA, 2577 bp, human
tctgcttagtcatggtgacctgcgcgcgctccgcgcctcccccacgcgcagcgatggaggcgccggggctcgggcggtggaggcggagccggagcgcggccatggcggggtccctgagtgccagaggtggtggtgttgcttatcttctggaaccccatgcagccagatcccaggcctagcggggctggggcctgctgccgattcctgcccctgcagtcacagtgccctgagggggcaggggacgcggtgatgtacgcctccactgagtgcaaggcggaggtgacgccctcccagcatggcaaccgcaccttcagctacaccctggaggatcataccaagcaggcctttggcatcatgaacgagctgcggctcagccagcagctgtgtgacgtcacactgcaggtcaagtaccaggatgcaccggccgcccagttcatggcccacaaggtggtgctggcctcatccagccctgtcttcaaggccatgttcaccaacgggctgcgggagcagggcatggaggtggtgtccattgagggtatccaccccaaggtcatggagcgcctcattgaattcgcctacacggcctccatctccatgggcgagaagtgtgtcctccacgtcatgaacggtgctgtcatgtaccagatcgacagcgttgtccgtgcctgcagtgacttcctggtgcagcagctggaccccagcaatgccatcggcatcgccaacttcgctgagcagattggctgtgtggagttgcaccagcgtgcccgggagtacatctacatgcattttggggaggtggccaagcaagaggagttcttcaacctgtcccactgccaactggtgaccctcatcagccgggacgacctgaacgtgcgctgcgagtccgaggtcttccacgcctgcatcaactgggtcaagtacgactgcgaacagcgacggttctacgtccaggcgctgctgcgggccgtgcgctgccactcgttgacgccgaacttcctgcagatgcagctgcagaagtgcgagatcctgcagtccgactcccgctgcaaggactacctggtcaagatcttcgaggagctcaccctgcacaagcccacgcaggtgatgccctgccgggcgcccaaggtgggccgcctgatctacaccgcgggcggctacttccgacagtcgctcagctacctggaggcttacaaccccagtgacggcacctggctccggttggcggacctgcaggtgccgcggagcggcctggccggctgcgtggtgggcgggctgttgtacgccgtgggcggcaggaacaactcgcccgacggcaacaccgactccagcgccctggactgttacaaccccatgaccaatcagtggtcgccctgcgcccccatgagcgtgccccgtaaccgcatcggggtgggggtcatcgatggccacatctatgccgtcggcggctcccacggctgcatccaccacaacagtgtggagaggtatgagccagagcgggatgagtggcacttggtggccccaatgctgacacgaaggatcggggtgggcgtggctgtcctcaatcgtctcctttatgccgtggggggctttgacgggacaaaccgccttaattcagctgagtgttactacccagagaggaacgagtggcgaatgatcacagcaatgaacaccatccgaagcggggcaggcgtctgcgtcctgcacaactgtatctatgctgctgggggctatgatggtcaggaccagctgaacagcgtggagcgctacgatgtggaaacagagacgtggactttcgtagcccccatgaagcaccggcgaagtgccctggggatcactgtccaccaggggagaatctacgtccttggaggctatgatggtcacacgttcctggacagtgtggagtgttacgacccagatacagacacctggagcgaggtgacccgaatgacatcgggccggagtggggtgggcgtggctgtcaccatggagccctgccggaagcagattgaccagcagaactgtacctgttgaggcacttttgtttcttgggcaaaaatacagtccaatggggagtatcattgtttttgtacaaaaaccgggactaaaagaaaagacagcactgcaaataacccatcttccgggaagggaggccaggatgcctcagtgttaaaatgacatctcaaaagaagtccaaagcgggaatcatgtgcccctcagcggagccccgggagtgtccaagacagcctggctgggaaagggggtgtggaaagagcaggcttccaggagagaggcccccaaaccctctggccgggtaataggcctgggtcccactcacccatgccggcagctgtcaccatgtgatttattcttggatacctgggagggggccaatgggggcctcagggggaggccccctctggaaatgtggttcccagggatgggcctgtacatagaagccaccggatggcacttccccaccggatggacagttattttgttgataagtaaccctgtaattttccaaggaaaataaagaacagactaactagtgtctttcaccctgaaaaaaaaaaaaaa

SEQ ID NO: 678 - DNA, 2721 bp, human
gttcccgccaggtccgtgccgggcgagagagatgctgcccggcccgcctcggctttgaggcgagagaagtgtcccagacccatttcgccttgctgacggcgtcgagccctggccagacatgtccacagggttctccttcgggtccgggactctgggctccaccaccgtggccgccggcgggaccagcacaggcggcgttttctccttcggaacgggagcgtctagcaacccttctgtggggctcaattttggaaatcttggaagtacttcaactccagcaactacatctgctccttcaagtggttttggaaccgggctctttggatctaaacctgccactgggttcactctaggaggaacaaatacaggaatagcaacaactataactacaggattaactctgggaacgccagccactacatctgcagctacaacaggcttcagtttaggattcaataaacctgcagcatctgccacaccatttgctctacctattacctctacctcagctagcggtctgactctttcgtctgctctgacatcaactccagcagcatccacaggatttactctaaataatttgggtgggacaacagccacaactacaactgcatcaacaggcctctctttagggggagccttagctggtttgggaggttcacttttccagagtacaaacacaggaacatcaggacttggacagaatgctttagggttgactttgggaactacagcagctacttcaactgcaggcaatgaaggccttggtggtatagatttcagtagctcctcagataaaaagagtgataaaacgggaacaagaccagaggatagtaaagctctgaaggatgaaaatctacctcctgtcatctgccaggatgttgaaaatctccagaaatttgtgaaggagcagaaacaagttcaagaagaaattagtagaatgtcttcaaaagcaatgcttaaggtacaagaagatattaaagctctgaagcagctcctgtcgttggctgccaatggaatacagagaaacactctcaacattgacaaattgaaaatagaaactgctcaggagttgaagaatgctgaaatagctttaagaacccagaagacaccacctggacttcaacatgaatatgcagctcctgctgactacttcagaatcttggttcagcaatttgaggtacagcttcagcagtacaggcagcagattgaagaactagaaaaccatcttgccactcaagcaaataattcacatataacccctcaagatttgtcaatggctatgcagaaaatttatcaaacatttgtagctttagcggcacaacttcagtctattcatgaaaatgtaaaggttctgaaagaacagtaccttggctacaggaaaatgttcttgggagatgctgttgatgtgtttgaaacaaggcgagcagaagccaagaagtggcagaacacacccagagttactactggacccactcctttcagcaccatgccaaacgcagcagccgttgccatggctgcaacacttacacagcagcaacagcctgctacagggccacagccatctctgggagttagttttggaacgccattcggctcaggtattggcactggcttgcaatcaagtggcttaggttcttcaaaccttggaggatttggaactagctctggttttggatgcagcaccacaggggcctccacatttggatttggaacaacaaataaaccctcaggaagtcttagtgcaggctttggcagctcaagtacatctgggtttaacttcagcaatcctggcatcacggcatcagctggtttgacttttggggtgtccaatcctgcctctgcaggttttggaacaggaggacaactccttcagttgaagaaacctccagctggaaacaaaagaggaaaaagataaacatgggttgatgtgttgagagaatccatagcagcaccgttcattctatgagtctatttttctaatgatgcagtaattaaattgcatcccaggagatttataaagttttgatatttttccctactctggaatttgaactttcttcatgtttgccatactgaacatcttttttcttgtggaatttaaagtccagctgtgttttctttttaatttgattctcagtgtaagaaatgttctgattacatcactgattggtaatggttagaaaccattaacctaaaacttactatttaacctagtgtttttgttgatgaggtttacattatgtgaatacatgcacatttgtttcttatacaggtggtgtgaactctagggcctatactagaatcaatttgttccttgttaaaggccttttgaattatactgcagggcatcttgtgaatatgtatgtaaatatatacagaataatacacacagttgtgtgtgcatataaaatacatatttacgccaggcgtggtggctcacgcctgtaatcccagcactttgggaggccgaggcaggcggatcacctgaggtcaggagtttgagaccagcctgacatggtgaaaccccatctctacgaaaaatacaaaaattagctgggcatagtggcgggtacctataatcccagctactcgggaggctgaggcacgagaatcacttgaagccgggaggtgggggttgcagtgagccgagatcacaccactgcactccagcctgggcaacaagagcaaaactccgtctcaaaaaaaaaaaaaaaaaaa

SEQ ID NO: 679 - DNA, 3901 bp, human
cggagacgagagaggaagcagccggcccgcccctgggttcgcgctctcgccgcctctgagggaattgaattgaggcgccgcggctgcgagagctaaaaaggaaggaggagccgccgcgggactgagacgggggcagagccgaagagaccgacacagagaaggaaacgaggaggaggatgtctcaccgggcggccagcgcctggatcagcccgtgactcttaacagcggcgggcctcagaccccagcgcagactcggactttgtctttgggggcccgtgctctgccctccccggtttccgacaggacccagaggagccggcgtgcctctctgccctccagccttcttcaccatgtccaagatgccggccaagaagaagagctgcttccagatcaccagtgtcaccacggcccaggtggccactagcatcaccgaggacaccgagagcttggacgacccggacgagtcacgcacagaggacgtctcttccgagattttcgacgtctctcgggccacggattatggccctgaggaggtctgcgagcgcagctcttccgaagagacgcttaacaatgttggggatgcggagactcccgggaccgtctccccaaacctcctcctagatgggcagctggcagcggcggctgctgctcccgccaacggaggaggagtcgtttcggcccggagcgtgtctggggcgctcgccagtaccctggcggcggctgccacttcggcccccgcccccggagcacccggcggcccccagctcgcgggctcatccgccgggccagtgactgcagccccatctcagcctcccaccacatgtagttcccgttttcgcgtgatcaagctggaccacgggagcggagagccctatagacgcggccgatggacgtgtatggaatactatgagagggattcagacagcagcgtcctgactagatccggggattgcattagacacagcagtacttttgaccagactgcggagcgggacagcggcctgggcgccaccggagggtcggtggtggtagtagtggcctccatgcagggggcgcacgggcccgagtcgggaactgacagctccttgactgctgtgtcacagctacccccgtcggagaaaatgagccagcccactccggcccagccgcagagttttagcgttgggcagccacagccgccgccgccacccgtaggtggggctgtggctcaaagctcggctccgctgccgccgttcccgggagccgcgaccgggccgcagccaatgatggcagccgcgcagcccagccagccccagggagcggggcccgggggacagactctgccgccgacgaatgtaaccctggcgcagccggctatgtccctgcctccgcagccgggccctgcagtgggcgcccccgcggcgcagcagccccagcagttcgcgtatcctcagcctcagataccgcccggacatttgctgcccgtccagccctccggccagagtgagtacctgcagcagcacgtggccggcctgcagccgccaagccccgcgcagccctcgtccaccggcgccgcagcgagccccgccacggcggccacccttcccgtgggcaccggccagaatgcttcctcggtgggcgcgcagctcatgggcgcgtcttcccagcccagcgaagccatggccccccggacgggaccagcgcaaggcgggcaggtcgcgccttgtcagccgactggagtgcccccggctactgtgggaggcgtggtgcagccgtgcctcggtcctgccggggctgggcagccccagtccgtgcctccgccgcagatgggtggcagtggtccgctgtcagccgtacctggtggccctcacgccgtggtgcccggagttccaaacgtgcctgcagccgtgcccgctccaagcgtgcctagtgtgtctaccacttctgttactatgccaaatgtacccgcgcctctggcccagtcgcaacagctgagcagccatacgccagtcagcaggagcagcagcataatccagcatgttgggctgcccttagcgccaggcacacacagcgcaccaacaagtctaccacagtctgacctaagccagtttcaaactcagacccagcctttagtcgggcaagtcgacgatactagaagaaaatcagaacccctacctcaaccaccactttctctcattgctgaaaataagcctgttgtgaagccgcctgttgcagattccctggcaaacccccttcagttaacacctatgaacagtctggccacctctgtattcagcatagctattcctgttgatggtgatgaagacaggaatccttcaactgctttctaccaagcgttccatttgaacacgttaaaggaatcaaagagcctctgggatagtgcatctgggggaggtgttgtagccattgacaacaaaatagaacaagcaatggatctggtgaaaagccatttgatgtatgcagtaagagaagaagtggaagttttaaaggaacaaataaaagaattagttgaaagaaactctttacttgaacgagaaaatgcactgttaaaatctctttcaagcaatgatcaattatcccaactcccaacccaacaggccaatcctggtagcacttctcaacagcaagcagtgatagcacagcctccgcagccaacgcaacctccacagcagccgaatgtctcctcagcataaagctttcttaagcctcattaagaaaaaaactgaaagcaatctatccttgtgtgccactggtgttctttccactttatacgaaagcaagtagccatgctttggttgtgtgtttggccttttcagtattagacaatcattctacaagagcttttcctctctctgagatgtcatgcagcgctgttgatgtccagttctatgtcatcagtacacaaggagaataatagatggggtttattaaagcgagcaaagtctgcattttacctggtgcgcatgagtggggtctttaagagttttggtggctctcccatgtttcctattacccatggatttaccctgagccttcctatcacattataaataacagttcatctaaagagccacttttctttctgattcagtaacatttgcctacataagttttcatttatttgtgttttatttattacagggctgctattttcataatgtacatgaacaatgtcacagaacttttttaatttttttgaataattataagtatcagtaaaggaagtgaaagacaggattgcatttaatagataaaacgtttaggcaataattgaacaaaagaatcctggcatatttctaacactaatggcaatttacttatggtatttattttcagtagtaaagacccagcttgaatgtaaattttgtatagtgtaagtatgaagaacatagtgcaactgtacaggtagtcaccagttattgtgatatgataaataattgggctattttgatgaagaaaactttgttcatttgtttctactttctaagagaaattgccacgattcctctgcttttcaacatttcgtatgacttttttttcgggtgggaataaaaagctgtgaaattgttcaacctactttgtaaccaaagaagcaaagctgtgtaatggagtttggtttttttttgttgtttttttttttttgtctttttttttttttataatgcacattctttatgtatttttatttagtgttttctcagtcacaattttctttactgtctagcatgatctgcatgacctataatctttgaaccactttcgtacctcatgtttttatccagcactcttattgtaatatgtactagtctgtgaacaatgtcaaataaaagagaacgaacaggtagtttggtggagctgagctagtgtacaatacactagttgtaaaaaaaaaaaaaaaaaa

SEQ ID NO: 680 - DNA, 4058 bp, human
gtgtttccgggtcgctgctggcccccgggtactggtctcagtacccctgcagccggccggagaggctagagcccgacggggcccggctccggcggcagccgcgcctctcgcttgcttccctcggccgggccgtcctcggcggcagtgtcaggagcactccgctggtccaggcggcaacatgtccatgcttttagtgatgtccctgcctctaatccagaagccatggaggagataaggtagcccccctcgatcggatggggaagcccagttcaatggatactaaattcaaggatgacttatttcggaagtacgtgcagttccatgagagcaaagtggataccaccaccagcaggcagcggcctggcagcgatgagtgcctgcgggtggcagcctcaaccctgctcagcctgcacaaggtggatcccttttatcgattccggctgatccagttctatgaggtggtggagagctccttgcgctcgctcagctcctctagcctgcgggctctgcacggcgccttcagcatgctggagacggtgggcatcaacctcttcctctacccgtggaagaaggaattcagaagcatcaagacctacacgggcccttttgtttattatgtcaagtcgacattactggaagaggacatccgagccatcctgagctgcatgggctacacacctgagctgggcactgcatacaagctcagagagctcgtggagaccctccaggtgaagatggtctcctttgagctctttctggccaaagtcgagtgtgagcagatgctagaaatccactcacaagtgaaggacaagggctactccgagctggacattgtgagcgagcgcaagagcagtgcagaggatgtgcgcggctgctcggacgccctgcggcggcgggcagagggccgggagcacctgacggcctccatgtcacgagtggcactccagaagtcggccagcgagcgggcggccaaggactactacaagccccgcgtgaccaagccctcgaggtcagtggatgcctatgacagctactgggagagccggaagccacccctgaaggcctcattgagtcttcggaaggagcctgtggcaacggatgtgggggacgacctcaaggatgagatcatccgcccatccccttcgctgctgaccatggccagctccccccacggcagcccggatgtgcttccacccgcctcccccagcaacggcccggccctgctgcgcggtacctacttctccactcaggatgacgtggatctgtacacagactctgaacccagggccacctaccgtcggcaggatgctctgcggccggatgtgtggctgctcagaaacgatgcccactccctctaccacaagcgctcgccccctgccaaagagtccgccctctccaagtgccaaagctgcgggctgtcctgcagctcctccctctgccagcgctgtgacagcctgctcacctgtcctccagcttccaagcccagcgccttccccagcaaggcctcgactcatgacagcctggcccacggggcatctctgcgggagaagtacccaggccagactcagggcctcgaccgcctcccgcaccttcactccaaatccaagccctccaccacgcccacttcccgctgtggcttctgcaaccgcccaggcgccaccaacacctgcacccagtgttcaaaagtctcatgtgacgcctgcctcagcgcttaccattatgacccctgctacaaaaagagtgagctgcacaagttcatgcccaacaaccagctgaactacaagtccacccagctctcccatctcgtgtacagatagaccggcctcgccccttccagctccaagggctacatcaaccgacctttcgggtttcacggtgaagaagtactaacgcattgatctcagaggcggaggcctgcacttgaccatgtaggtggcagagatcgtgggctggctgtgtccacgtgggagttcacttagcgactcagatatctcaaccaatggctgctttgttgtctgacaagggagaaggtggcacttccgttcagattcattttgctaatctctccactccctgttcagttggttctttttttggggttttgttttgttttgttttgttgttttgttttttcctttaaagaggatttctgtctctgggaccctcgctgcacctacccctcccattgcaaagccaacttggactgggaagggcccttcaggtcaccaaacatccacctggagcggcgagctagaggcctgttggcttgtgaaatgagccctcctgccacacggggcctctcccaaaggctcatcccttggccgcccccttcctaaacacaaggatccccagctggactccccaccccctggcttccccacctctccaggtgtcaaaggtgaaccgagtccagtattagctgaatgtcatttcgtacaccacagctcagtcagcccatggccttcgtgaactttgctccaacacactgatgtgtgggcttcccacagcaggactgacttccccctttctgttgtttgcacatgcccctcttactgtactgtcaatagatatttttgagatttatttttaaataaatattcaacttgctgtgtgtttcaacgtggttaaaaaaatgaattatgtagctatttattaaatgccctgggttctttagtcttccaagggagggcctcgcgcccattcgtgttgtatcctccactcactatggcccgaggggagaggagagtttggggcagggaggaacagacatgaagcctccttttcttgagctggtggagagccactgtcttccctgcagtaactatctatacacctacctccagtgtgcacttagggggtgagcgcgggtgtcgaggtctgtgtgtctgcagactgctaacctatgacaattcagggacctcacctgtcggacctatagcttgctgagcaggaaccttgcacttcacacttcttgagtctcgtttcagaaggaaaatcatttgggattcctactgcccctccatctcaatcctcttctcttcaccagtttccaggactcatctgcaacatttgcaatctttttgcactaaaagtgggcaggagtcggcatgtgcccatcagagagacggctcctcagatgctcagctaagcctaagcgcttccaagcctgaaggccccttcagcttctcatgtgaattaccaacccctggattttccttgtgggggtacaagagcaggagtggggcaagagtttgaaaataaagccgcttccttgtgaactaactatattttagccataactgtttgtgatgtacacaatgttaagggatttatatgcagtgggcttttctgggagaaagttattcagctcttgagcaagtttaagtctggctgaatcctgaggccactgtgaatttgctgatgttcttccaactcagttgagtgattttaaggttttccaaatcttctatggctctctttttaatatatatatatatatatatatatatatatatatatatatatatatatctatctggtagatcacatgtagatgtacagtgtgtatattaagctgaatttcaaccaactttattactaagaccagcctagcagggcattcatctttgatgttcttccttttcacatttcagaatcggcaatgcctggcccactcctgagagctctagttttctagttttccatttccagattgcgccagcattacagtaactaactctttctaaccaaccgtgatgccacgtaacttaccctatggacaaaagcaggaatgactaacacatcctaggagggaaagtccagtgtacctgtcatcacggacgcactgtggtcacagactggaatacgaaatactacagccctgctcccaggtgtgcatcttactggatgaggttgctgtgattgagatagttaaatacatgctaatttaaaaatgcagatgttttacatttgatttctaccaagagttgaaatgttgagagatgattaaaaataataataataaagtgtcttccattgttaaaaaaaaaaaaaaaaaa

SEQ ID NO: 681 - DNA, 1534 bp, human
cgccgccgccgccgccgcgtacctagccaggtccctgaggggcgggcagatgaggcctaggggtgccgatccctagtgtcgactatgcgagatctgattccggagctgccatgattgaagtggtagcagagctcagccggggtcctgtatttttggctggggaggcgctggagtgtgtagtgaccgtcaccaacccccttccgcccacggccacttctgcatccagtgaggccctggcctgggccagtgcccaaatccactgccagttccatgccagtgagagtcgagtagcactgcctcctcctgactctagtcagccagatgtccagcccgacagccagactgtctttctgccacaccgaggtgagaggggccagtgtatcctttctactccaccgaaaattctattctgtgacctgaggcttgatcctggagagtccaaatcatactcctacagtgaagtgctgcccatagagggaccaccctcctttcggggtcagtcagtcaagtacgtctacaaactgaccattggctgccagcgtgtcaactcccctatcactttactcagagtccctctgagggttcttgtgctgactggccttcaggatgtccggtttccccaggatgaggctgtagccccatccagtccattcttggaggaggatgaaggtgggaagaaagattcatggctagctgagctggctggggaacgcctaatggctgccacatcctgccgcagcctccatctatacaatatcagtgatggccgagggaaagttgggacgtttggcatcttcaaatctgtgtacagacttggcgaggacgtggtggggaccttaaacttaggggaaggaaccgtagcttgtttgcagttttcagtcagcttacagaccgaggagcgtgtacagcctgagtaccagcggcgacgtggggcagggggtgtcccctctgtgtcacatgtgactcacgcccggcaccaggaatcctgcctacatacaactagaaccagcttctccctcccaatccctctcagctccaccccaggcttctgtacagccattgtgtccttgaagtggagattgcattttgaatttgtaacgtcccgagaaccaggattggtactcctaccccctgtggaacagcccgaacctaccacctggacaggacctgagcaagtacctgtagacaccttcagctgggacctgcccatcaagctggaggaagcctgggtattttgacacgggatcatctgtaaggccccatcctccctgtgccctctctgctgctcctccattcctaacgcttcaccccactttaccttgagcttggaagtagcacttgctgtagactcctgggtgctggaggagtagagacatcaccaagcagatgatcccccagcctcctaggatccccttggcctgtccagcccagagcatccttagggccattgctgctgcacagccctctcagacccttcttggcctctgctcagctactctggtcttgactccttgactttgctttgcgttgctcc

SEQ ID NO: 682 - DNA, 6053 bp, human
gaaattttgagaagtggtgggatgaagaagatccctgaagagaggagtaactgagacaaaggcgaggctagcaatagagagacaagtgagggaattagacctttggtatcatcatgaaaaggcctggaagaaacgctggtttatcctgcggagtggccggatgagcggtgacccagatgttctggaatactacaagaacgatcactccaagaagcctctgcggatcatcaacctgaacttctgtgagcaggtagatgcaggcctgacctttaacaagaaggagctgcaggatagttttgtgtttgacatcaagaccagtgaacgcaccttttacctggtggctgagacagaagaggacatgaataagtgggtccagagcatctgccagatctgtggcttcaatcaggctgaggagagcacagactccctgagaaatgtttcctcagccggtcatggcccccgctcttctccagctgagctcagcagctctagccagcaccttctccgagagcgcaagtcctcagccccatcacactccagccagccaactctgttcacgtttgaaccccctgtgtcaaaccacatgcagcccaccttgtccaccagcgcacctcaggagtatctctacttgcaccagtgcataagccgaagagcagaaaatgcaaggagtgccagcttctctcagggcaccagagcctcttttctcatgaggagtgacacagctgtacaaaaacttgcccagggcaatggacactgtgtcaacgggatcagtggtcaagtccatggcttctatagccttcccaagccgagccggcacaatacagaattcagagacagtacctacgacctcccccgcagcctggcctcccatggccacaccaagggcagcctcacaggctccgagacagataatgaggatgtgtacaccttcaagacgcccagcaacaccctgtgcagggagttcggggacctcctggtagacaatatggatgttccggccaccccactctcagcctaccagatccctaggacattcactctggacaaaaaccacaatgccatgacagtggccactcctggggactcagccatagctcccccaccccgcccccccaagccaagtcaggcagaaacacctcgatggggcagtcctcagcagagaccgccaatcagtgaaaatagcagatctgtcgctgccaccatccccagacgcaacaccctccctgcaatggacaacagccgacttcaccgagcttcttcctgtgagacctacgagtacccacagcgtggtggagagagtgcaggccggtctgctgaatccatgagtgatggagttggctctttcctgccagggaaaatgattgtgggccgatcggacagcaccaattctgaagacaactatgtgcccatgaatccaggttcttccaccctgttggccatggaacgagcaggtgataattcccagagcgtctacatcccaatgagcccaggggcccatcactttgactcacttggctacccatcaacaacccttcctgtgcaccgaggccccagcagaggaagtgagattcagccaccccctgtcaaccgcaacctcaaacctgatcggaaagcaaagccaacaccacttgacctgaggaacaacaccgtcatcgatgaactccccttcaagtcacctatcaccaagtcttggtctagggccaaccacaccttcaactccagctcctcccagtactgccgccccatctccacccagagcatcaccagcacagactcaggagacagcgaagagaactatgtccctatgcaaaacccagtgtctgcatctcccgttcccagtggcacgaacagtcctgcccctaagaagagcaccggcagcgttgattatctggccctggacttccagccgagctccccaagcccccaccgcaagccatctacttcatccgtcacctctgatgagaaggtggactacgttcaggtggacaaggagaagacccaggccctgcagaacaccatgcaggagtggacagacgtgcggcagtcctcagagccttccaagggtgccaagctgtgatgagagggccaccgcagagcccaggaggcagcatctccagagctggcccttcccatctcccctctcccctctcccgttcttcctcccatccacctcctctctactctgccagtctcagccttcaaagcacttgacatcagggaccctgaacccttcccctgggaggtgagggcctgatcaaggcacctcctctgcccactcggggcccagctgtgatttttatcagtaatggccatgcctccacccaccttagttaggagctacttccaaaaagcatccttcagcctcttcctgtcctttagacctgactctctaccagatgtttggagggaagggctggggctctgagccagattccacacctcacgttcagtcacagccctcagctatcttccctccggccactgggctacctctccttcagtcccagaagacaagtctcaccaacccagggagtcaaggaccagcaaaccaaagtggataatggactttttcattcctgtttttcttggcaggagagaagcaaggccactaaaagaggagatggtggagacggaggctcagcagtggtcttgaggggtaaaggacttagatgcccagatgaagagggaaagctgacatctgcagggaacccactttgaggctgaggccatggcaggacagctgctgtggggtgcagaggcagaagatgaaggacaaaaggaagggaaaactgatggccaacctagagcagcaaggagcagggcttggagctcgggtggtggagatgacaaggacactgtggggtctgggtccccagaactctggagctacaggccactctaggcccaagggctagtcctcttccccagtcccctcagaggcccccgccagccccaccttgaaagcagcatacaggggaaggcttggaccaagctgggcgaccaagcacatggggcaggaacacatggtaaaggggtggggaatatgggagggagtgtggtgtggatgggggtgatgcagggactgaggggaaccctgggacaggcacaggctgggcagaggcacagggcagtgcaggggactctgcagtggggtcgggaagtgagtttctttgcagtgagcagtgcagtggaagtcgggcacagaggtagcagacagatgtgaagcagtggtgaaggccatgtagcaagtggggaaatacatccaaagggcctgggagttggggggtgcccaacgcaatccttgggggtgcagggtggagcagaaagtgaaggagggacacgtgcaagagtggtgtgcatggtggtgtgacatgaggaccgttcctaggatgggacagtgggtcaggcaggacaaggagaaagcagggcagaatgatgcctagaggaccacatcaggcatggctgacagcttgtgcccatgggctgtggcgtatgtcagatcgcagggtaggaacgagtctggcctggtgccggcccagtgtttcctcagctcatccgccctctgttgctccctagcattccaggagccatcttggactctcctccccaggtttgaaaggccatcagattagcagggacggggtgtagggcatcacccaaggttccttctcttaaactaagggtgggggatctgaatgtttttatgttgactgttcttgactaaattttcaagagtttcagaagcaacaggacagaccagacgtttcattctaccctggggcgaacagaacttcttcctcccaaacaatgacttcctgccatgtttgatggggacagctaccactgtcctctgcccccattcccctttcagctcccatgagcatgcatagttcaccagaccaatggcctagccattctctaagtcccatcctggaagaagttatttcttcaagagctgcacctctcctcctagcattagtttagatcaactcaaggagtatttattaatggctgctgtctccagtttctggggttaagcactaaggacacaagaatcaatcagaccttctccctgaacttaagatagccacaatcagaaaaaggacaaggacatgagacagtggtgatggccatcagacagagacttcaaatgctgatggagggcagaggaagtacttagggaggttggtgtcagaggcaggagtgggggatcagggaaggtggattctaggaaaagggagtgcctgaggtaggccttagaaggggatgagtcagatttttacagaggaggagggcagggcttgggtccagtggaggaagaaggaaggagaggcttggaaagccttgtgtcttgggaaaaaaaggcctttgagcatatgggtccagccactcagaagtgcaggggccatgccttggtgttccaataagtgaatggaagcagtggtggtagctacactgggcagagttggcagggtgctggttcactctgcccagccctgaatgtgtgccttaaaggccccctacaaggggccccatacgacagagcttttaactggtgccttccctgtacccgcagcagccacaagtgggcccagactattgcagcctcccataaacatgtgagcatgttctgagtgtgccatgatgtgagtggacctggctggaatcttcggagagcgactgaggtgttcaaatcgaatctcccaggaggcttccttccagccccctattctggtaactaccaggaggcttccttccagccccctattctggtaactaccaaaatccctcgggtgcaagtgtaggggtagagatggaaggatgagaggtgaaattgaccttttgaaagcaaagctctggctcacaggccccaaactaccagccgtatctagcatatccccaccctccacccactacctcctccaacaaaggagtcaactcagttgaaaaaactggtcctttggcctatccatgggtcaaagtccacctctcctgggggcctggagaggactgagcctacggaaaggggataccttcccactcagcactgcttcacacaggccccctgcctggggctctccaaggagccttcttcacccacttccagctccacttctgcaaggttaagtcaagtgagaacgatgagaaatagggagatggtgtctccttaagtccttgatctgcctgtctgtggaatgggaggttggattagctgcgctgaggtcccatccacagctggtgctcagctgcttgaaggggagactccctcctctgtaacttctttctgggggattggggtgggcagtacctatccccagtcccctcctagcttgactttagtggtttccaatgtagaagttaacaaagtatgccccattcctgtgacaaaagcacaaccattctgaagttactggagcatgggctcagctcatcctccctctggccccttctcccatggggacatctcggcccagcacccctatcccatttccagagttcttccttccccatctgggccttcataaaatgcaggggaagccagactggtctcaggagcgctaaagcccttccgtggggggtcgtctttctgggactagccctgctgtttaggacctgggaccacaatggggtacctgccgagggggtccccaagagatccaggctgtcatgtgatttatggtggcatgtgttgtgtatttgttggctacttgtgtcttgaaatctagaattatttcacgcagaattgtcactgtttgtcaggaagagaaaatgggctagtggaagcccagtcttgagttcttgtcttgttaccatttaaaattgacatttaattttcaaatcactgttggtgcctaatcacttaagttattaatttattctgttgtattcttttttttaaattgtaacatatttatccggtgggtgggacaggagtgtgttcaagtgggtcatgtttttgctgtggtgacacatggtacaggcttggagcttgcaggtccctttctactgtggtgttggagcaggacaataaagtccactagaaatgcacccca

SEQ ID NO: 683 - DNA, 4424 bp, human
cccgcctcccagtagccgcgcctcaccctaggccaggaatggttttagggaagactgttgccggatgacaaggctgtcactattgttctgtactacctgacattatgggaccaggccagccagcttcaacctgtgttcatctagcacctaggacccaacttgatgggaggagcgaccccaaagtacttcagacccagaaccagctgcagtttaataggaatgttcctacacattcaagcaacttggcgatccgatattcttgcccacatgccattagaattgaaaaactgaagcactcatacaatgaatcataccattgtaaagatgcagattgtagagttggtcctgacctgggcagttctgtttcattttccgtcatatcccaagagagacttagctatgctgtccacctagccagaagagatgtgaaacgaagacaatttgaaaaacatataaaagaacatcatctcagaagtcagcctcaaagctctcagaagtgtggacatactaagtataaaatacccgaccacagggtggaaaggaaggaatcaaagagtcaagcagcctgtcagtgtagccaccagccatccaaagtagaaatctccagctctggtgccaaagtatacctttactcatctcatccaggccagtcagatcttactgtgccaaattcgccacccacccatgatccgggacttcagcctcatcccaggataggtgaccacaaaaacataagtgaacagaaaagcctgctagaagtccagcgactccagaaagaactgagcagttgtatccacaaaattgaagaggtaactaaaaaagatagactagaagaagctttggatccagatgaagaacgtcgaatccgtatcaggagacaggagcaagctgctcgctctgcccgaatgctctacgtcctccagcagcaggtaaaagaaatccaggaagaattggataaattgagtccacataaaattaaacacactaagaagtcatgggcaatgtctaagctggcggctgcccatcgaggagccattcgggccttacagatgtttgtcactcagtttactgaccgaggggagcatccacttcctgctcggtgtaaggaactgggcagccttattcgccagctttcactttgttctgtcaagctggatgcagacccttctgttcctgatgtggttatagatattctgcaacaaattgaggctttggaatctctcctggaaaagaaactgtcaccaaaaaaggtgaaaaaatgtttcagtgaaattcggagcagatttcctatcggtagccaaaaggccttggagagatggccaagtacatcaccaaagggtgagaggaggcccctcacagcaaaggacacattcccacaggaaacaagtcgaccttctgtagcaaagcagcttcttgccgataagtatcagcccgatacggagcttccggagacccagaggttgcagagtgagcttgatgtattagatgcggatatagttctggaagaaggaccatttattctagaccaaagtgcaagcttcaaagacgaggtgttagccgtggcaaaaacaaaagcagggaaaaagaagcctgtgactgagaatgtgccgtttaggaagaaagatactctggcgccagcaagacagcaaggactccgcaaagctgaaagaggtagacaaagccaacctcacagtaaaagcagagtgcagcagacaacagtttcatccagattaaaaatgaaccggcagcctgtgaaagaccgcaaggcaccatggatacccccaaaccccacatccccaccagcgtctcctaaatgtgctgcatggctaaaggtgaaaactagccccagagatgccacaaaagagcctctccagcaagaagatcctcaagaggaaagtcacctgacaggtgctgttgagcatgaagcagccaggctcgcttggcttgatgctgaaacttccaaaagattgaaggaactagaagagttaaaagccaaggaaattgacagcatgcaaaaacagaggcttgattggcttgatgctgaaacttctagaagaacaaaggaactgaatgagctcaaagctgaagaaatgtatagactccaacaattgagtgtttctgccacccacttagcagacaaggtagaggaggcagttctggatcgtttgaagcctctcttggtcaaggcccagagagtcaattctactacagaagcaaatattcatttgaaagatggctcgtcagtaaacacagcgaaagcccagcctgcacaggaggttgcagctgttgattttgaatccaacaacattcgtcagcttgatgattttttggaagattgtgccagtgagctctgggctgtgactcatgctaagatcttggggtctgaaaccttagccaccgttgaggacagcaaggatagcccagatctggagatcatgatgcgccgaatggaagagatggaaaaataccaggagtctgttcgtcaaagatataataaaatcgcatatgctgatcctcgactttggatgcaggaagaaaacaatgaccaaaaaatctcagcaataagtgaaaagcctctatctcctcatccaatcagaatcacgaagacagtggatcgcaaggatccagccgtgaacatcatgttagaaaggccctgtaatggcaattccctggatgaaagtgtgggaacagaggaaggatcagagaaaagagaggcccctcttctctccctagccgaagattctcaacagaaagaaggccgagctcccctctttgtcccaccgggtatgcagcacagcatcggtgactactgtagtcgttttgagcagtaccttcggatcatatctcatgaggctgtaggctccttcaacccgtggctgatagctgaaagcttttcagaagagctggtagatgaagctctgggtgctgtggctgctgaacttcaggatatgtgcgaagattatgcagaagctgtgttcacctcagaattcttagaggctgctacataaaggctctctgaggcgaggccatttgtgtcacactggagaagggatggcaccaccctttgttttggcccacaggaaattttcatcctcagctgtccatccaggcccagaaggtgctgcccactgaaaggaaggcagtgccggggaggtcatcctcactttgcattttcttttgtcatggcaatggttctggaaatgtatgatgcaatgtatcacacttatcagtgcccaggcaacacaacttgattatggcaatattttcagaatgtgtacttttcctattgaaataccatgttcattcctctggctcagtttggtgatgaaaatgttttgaaagataatcgatacgtatatttcacacaaggattcaggttgctgttgaacccttgctggcattgataccaacacaagtgcggctactagctggtcccatcacggggcccctgttttgcatctttggcgatttcctgtcaggacctctggccctactaggctgtagactcagggagagcacagtctggctgtgctgccaaacctctcctctgctgcagtttattccaaacaggagccccctggctgtcagtgcacaataatagacacacatttcttcaacgttccattcctaggtgattttcacatttttagttcctcagcatattttattgctgtgtgttgacacaatctggtataaaaaactttctctggattcagaggaagtttgaggaatcaggagaggaccaggccttctcctgtgcctgggtgaaggtacagacctcgctgtgtctccgatgaggtcagaagtgtctctatttcataccacaaaggaacccaagtgggagtagggaacagatggatggcgcgaagacctctgtgtctccccagagaaaggaagaaacttaagaaccatcatagcctggtcctccaacatcttacagatcatgttttccaagagaaaagcctgtgttttcagaaactctgaattcagaaaaagaaacggaatgtgcgtaagaatcaggccactgcctggaaagactttctctcaattcgtagcctgaggctcagtgaaggaaacatgcagaaagaatgcctgagacgcccccagggaataagggaactctttataacctgtccagtgccgtcatctgggatttttctctgaagtacaagaatttcaggtgatttaagctgcttgatcacacttatttgtgcaaaattgattttcatttaatgttaatgttttcctgcttaattttatataacttcagaatgtaaagagcttcaaggtaaattacagggtgtttaacctggggagttaaatgtgtacacttgaattaataggagcaccggttgttgctagtataaagtaatttgtgtggcagtttgtactgtgctgagtttttaaaataaacccaatatttt

SEQ ID NO: 684 - DNA, 5519 bp, human
cgccggccgaggaggaggggtgggggtagcggcggcgcccgcggcccggagcgggggttgggggagtagagaaagcggggcgcgcggaggaacgctgggtccccggcgccgcgggagctgggaggaccgagccggccgagcgagcagcgcggcagcacagtccccgcgtggcgcagcgcggcggggacgcggggaccgcccggatctccttccactgcgccccgcgctctgcggtcctcggccgcctcttcttccttcactcactgcccgggcgggagcggcgcccaagtcgggtgcgccatgtctggggccgggtagccccgccgcccgccggcccgccagctcgccctccgagccacccgccagcgggccggccggccgggaagcgcgggacaggcagatgcagtgagtgaggggggggccatggcggaggagcggcccccccggctggtggattacttcgtggtagctgggcttgcagggaacggagcacccatccctgaggaaacgtgggttcctgaacccagtgggcccctgcgccctccccggccagctgagcccatcacagatgtggcagtcatcgctagggcactgggcgaggaagtgccccagggctacacatgcatccaggcttctgctgggggccaccccttggaactcagtgctggacttctgggtggaactcaacccgtcatctgctaccgcaggggccgtgacaagccccccctcgttgagctgggggtgttgtatgaggggaaggaacgtcccaagcctggcttccaagtgcttgacacgacaccctacagccactcagcaaacctggcccctccaggccccgggcacccccgcacctacctcacttaccggcgggcagcagagggggcagggctgcatgccctgggcatcactgacctctgcctggtgctgcccagtaagggcgagggcactcctcatacttactgccggctgccccgcaacctcaaccctggcatgtggggcccagcagtgtacctgtgctataaggtgggcctggcgaaggccaacacgctggtgtacgaggcagttctacgaggcgttcccaagggccaggctatcagagcgacaggcacgggcactgggcctgctgagcgccgtggagcggggtcgggcactggggggcagagctgtgcgcagccggcgtgccatcgctgtgctgtcccgctggcctgccttccctgccttccgcgccttcctcaccttcctttaccgctactccgtctcaggcccccaccgcctacccttggaagcgcacatctcccacttcattcacaacgttcccttcccttccccacagagaccccgcatcctagtgcagatgtctccctatgacaacttgctcctctgtcagcctgtatcctcacccctgcccctcagtggtgccagcttcctgcagctgctgcagagcctgggccctgagctggctatcacactgctgctggctgtgctcacagagcacaagctgctagtccactcgctgcggccagacctgctcaccagcgtctgtgaggccctcgtctcgatgatcttcccactgcactggcagtgcccctacattcctctgtgcccgctggtgctggcagatgtgctgagtgccccagtgcccttcattgtgggtatccactccagctactttgatctgcatgacccgcctgctgatgtcatctgtgtagaccttgataccaacacgctcttccagactgaggaaaagaagctcctctcccctcggaccctgccccgcagaccctacaaggttctgctggccacactgacaaacctgtaccagcagctggaccagacatacactggacctgaggaggaagcatccctggagttcctactgacagactacgaggcagtgtgtggccgcagggcccggctggagcgcgaagtccaaggagccttcctccgcttcatggcctgtctgctcaagggctaccgggtcttcctgcgcccactcacccaggccccctccgagggagctcgtgatgttgacaaccttttcttcctgcagggcttcctcaaatcccgggaacgctccagccacaaactttactctcagctgctgcacacacagatgttctcacagttcattgaggagtgctcttttggctctgctcgccatgctgcccttgaattctttgactcttgtgttgaaaaggtccacccagagcaggagaagcctgagccgacacccttagtggagctagaggagctgtcaggaagtgagctcactgtctttatcacacctcccgaggagcctgccttaccagagggcagtgaatccactccccagtactgctatgatggattcccagagctacgggctgagttgtttgagtctcttcaagagcaacctggggccctgcctgtgccaggcccttcccgtagcgcccccagcagtcctgctcctcgccgtaccaaacaggagatgaaagttgcacagcggatggcacagaagtcagcagctgtgcctgagctgtgggcccggtgcctgctggggcactgctatgggctgtggttcctgtgtctgcctgcctatgtgcggtcggcaccctcccgagtgcaggcactgcacacagcctaccatgtgctgcgccagatggagagcggcaaggtggtgctccctgatgaggtgtgttaccgggtactgatgcagctctgctcacactatgggcagcctgtgctgtctgtgcgggtcatgctggagatgcgtcaggcaggcattgtgcccaacaccatcacctatggctactacaataaggctgtgttggaaagcaagtggccgtctggcacaccaggtgggcgtctgcgctgggccaagctccggaatgttgtcctgggggctgctcagttccgccagcccttgagagaacggcaacagcagcagcagcagcaacagcagcagcagcagcagcagcagcaggagcaggtgtcagcacatcaagaggcaggcagctcccaggcagagccctatttggagcgcccttcccctactcgccctcttcagcgccagactacttgggctgggcgaagtctgagagacccagcctcaccccctggacgcctggtgaagagtggtagcctgggcagtgcccgaggggcacagcccactgtggaggccggtgtggcccacatgatagaggccttgggggtcctggaaccccggggatcacctgtgccctggcacgatggaagtctctcagacctgagcctgacaggggaggagccgctccctggaggcagcccagggggctcaggctcagccctgagtgcccagtccactgaggccctggaagggctaagtgggcggggacccaaggctggtgggcgacaggatgaggcaggcaccccccgacgagggctgggtgcccgcctccaacagctgctcactccttcccgccactcccctgcctcccgcattcccccacctgagctgcctcctgacctgccacccccagcccgccgcagccccatggacagtcttctgcacccccgggagcgccctggatccactgcctccgagagctcagcctctctgggcagtgagtgggacctctcagaatcttctctcagcaacctgagtcttcgccgttcctcagagcgcctcagtgacacccctggatccttccagtcaccttccctggaaattctgctgtccagctgctccctgtgccgtgcctgtgattcgctggtgtatgatgaggaaatcatggctggctgggcacctgatgactctaacctcaacacaacctgccccttctgcgcctgcccctttgtgcccctgctcagtgtccagacccttgattcccggcccagtgtccccagccccaaatctgctggtgccagtggcagcaaagatgctcctgtccctggtggtcctggccctgtgctcagtgaccgaaggctctgccttgctctggatgagccccagctctgcaacgggcacatggggggagcctcccggcgggttgagagtggggcatgggcatacctgagccccctggtgctgcgtaaggagctggagtcgctggtagagaacgagggcagtgaggtgctggcgttgcctgaactgccctctgcccaccccatcatcttctggaaccttttgtggtatttccaacggctacgcctgcccagtattctaccaggcctggtgctggcctcctgtgatgggccttcgcactcccaggccccatctccttggctaacccctgatccagcctctgttcaggtacggctgctgtgggatgtactgacccctgaccccaatagctgcccacctctctatgtgctctggagggtccacagccagatcccccagcgggtggtatggccaggccctgtacctgcatcccttagtttggcactgttggagtcagtgctgcgccatgttggactcaatgaagtgcacaaggctgtggggctcctgctggaaactctagggcccccacccactggcctgcacctgcagaggggaatctaccgtgagatattattcctgacaatggctgctctgggcaaggaccacgtggacatagtggccttcgataagaagtacaagtctgcctttaacaagctggccagcagcatgggcaaggaggagctgaggcaccggcgggcgcagatgcccactcccaaggccattgactgccgaaaatgttttggagcacctccagaatgctagagaccttaagcttccctctccagcctagggtggggaagtgaggaagaagggattctagagttaaactgcttccctgttgccttcatggagttgggaacaggctgggaaggatgcccagtcaaaggctccaagcgaggacaacaggaagagggatccactgttaccaaaagtcctgattcccccatcaccaacctacccagtttgttcgtgctgatgttgggggagatctggggggagttggtacagctctgttcttcccttgtcctataccgggaactcccctccagggtacccacagatctgcattgccctggtcattttagaagtttttgttttaaaaaacaactggaaagatgcagagctactgagcctttgccctgaatgggaggtagggatgtcattctccaccaataatggtccctcttccctgacgttgctgaaggagcccaaggctctccatgcctttctacctaagtgtttgtattttattttaaattatttattctggagccacagcccccttgcttatgaggttcttatggagagtgagaaagggaagggaaatagggcaccatggtccggtggtttgtagttccttcaaagtcaggcactgggagctagaggagtctcaagctccccttaggaagaactggtgccccctccagtcctaatttttcttgcctgccccgccttggggaatgcctcacccacccaggtcctgacctgtgcaataaggattgttccctgcgaagttttgttggatgtaaatatagtaaaagctgcttctgtctttttc

SEQ ID NO: 685 - DNA, 4509 bp, human
gagaactggggaaactggaatttcccgcggagctgacagcgcttgcgctccccctactcgttctaattccacgcgctccaaaatatccgccatggagaaatcttggccaggatgtccattctaggcccatcggtgctgtcttgctgaaggttgggtcaggcatctaaagggactgtggtaagggagggtgtgacacaggtgtaagctgccatcgtcatcatgaactttgagggtctggaccctggactggcagaatatgccccagccatgcattctgccctggaccctgtcttggatgcccacctgaacccaaatctgctacagaatgtggagctggacccagagggagtggccttggaggctcttcccgtccaggaatcagtgcacataatggaaggtgtctactctgaattgcacagcgtggtggctgaagtgggtgtacctgtttccgtctcccactttgacttgcacgaggagatgctgtgggtggggagccacgggggccatgccacttcattttttggcccagccttggagcgctactcatcctttcaagtcaatggcagtgatgatattcggcagatccagagcctggagaatggtatcctttttctcaccaagaacaacctcaagtatatggcccgtgggggcctcattatatttgattacctgctggatgagaatgaggatatgcacagtctcctactgactgacagcagcactctactcgttggtgggctgcagaatcacatactagagattgatcttaacactgtccaggagactcagaagtatgcagtagagacgcctggagtcaccatcatgagacagacaaatcgcttcttcttctgcggccacacgtctggcaaggtttccctgagagacctccgtacttttaaggtggaacatgagtttgatgccttctcaggaagtctgtcagactttgatgtgcatggcaacctgctagctgcctgtggcttctccagccgcctcactggcctggcctgcgaccgtttcctcaaggtgtatgatttgcgcatgatgcgtgccatcacaccacttcaagtacatgtggatcctgccttcttgcgcttcattcctacatatacttctcgtcttgctatcatctctcagtcagggcagtgccaattctgtgaacccacaggcctggccaacccagccgatatctttcatgtgaatcctgtggggcctctgctaatgacatttgatgtgtcagccagcaagcaggctctggcctttggggattctgagggctgtgtgcacctctggactgattccccggagccttccttcaacccctactcccgtgagactgagtttgctttgccgtgtctcgtggactcactgcctcctctggactggagccaggacctgctgcctctttccctcatccctgtcccactcaccactgacacacttctctctgattggcctgctgccaactctgctccagctcccaggcgagcaccacccgtggatgcagagattctgcgcaccatgaagaaggtgggcttcattggctatgcgcccaatccccgcaccaggctgcgcaatcagataccctacagactcaaggagtcagacagtgaatttgacagcttcagccaggtcactgagtcaccagtaggacgagaagaggaaccacatctccacatggtttctaagaaataccgcaaggtgaccatcaaatattccaagctagggctggaggactttgacttcaaacactacaataagaccttgtttgctggattagagccccacattcccaacgcctactgtaactgcatgatccaggtgctctatttcctggagcctgtacgctgtctaattcaaaaccacctttgccagaaggagttctgtctggcatgtgagctgggcttcctgtttcacatgttggacctctctcgtggtgacccttgccagggcaataattttcttcgggcattccgtactattcctgaggcctcagccctcggtctaatcctggctgactcagatgaggcctcaggcaagggcaatctggccaggctcattcagaggtggaatcgcttcattctcactcaactgcatcaagatatgcaggagctggaaataccacaggcttatcgaggtgctggaggcagcagcttttgctcatcgggggactctgttattgggcagctcttcagctgtgagatggagaactgcagcctctgccgctgtggcagtgagaccgtgcgagcctcatccactctgcttttcacactctcctaccctgatgataaaactgggaagaactatgactttgctcaggtgctgaagcgaagcatctgcctggaccagaatacacaggcctggtgtgacacctgtgaaaagtaccagcccacgattcagacccgcaacatccgccatctgccagatattcttgtcatcaattgtgaggtgaacagctcaaaagaggctgatttctggagaatgcaggctgaggttgccttcaagatggcagtaaagaaacacggtggggaaatctccaagaacaaggaatttgctttggctgattggaaggaactagggagtccagagggtgtgctggtgtgtccctccattgaggagttgaagaacgtctggcttcctttctccattcgcatgaagatgaccaaaaacaaagggctggatgtttgcaattggactgatggggatgagatgcagtggggcccagccagggcagaggaggagcatggtgtctatgtgtatgacctgatggctactgtggtacacatcctggactcacgcacagggggcagcctggtggctcacatcaaagttggagagacctaccaccagcgcaaggagggcgttactcaccagcagtggtatctgttcaatgactttcttattgaacctattgataagcatgaagctgtgcagtttgacatgaattggaaagtacctgcaatcctttattatgtcaaacggaatctcaattccagatacaacctgaacatcaagaaccctattgaggcaagtgtcttgctggctgaagcctcgctggcacggaagcagcggaaaacacatactacctttattccactgatgctgaatgagatgccacagattggggacctggtgggtctggatgctgagtttgtcacccttaatgaggaggaagcagagttacgcagtgatggtaccaagtctaccattaaaccaagccagatgtcagtagccaggattacctgtgttcggggccagggacccaatgagggtatccccttcattgatgactacatctctacccaggagcaggtggtggattacttgactcaatactcgggtataaagcctggtgacctcgatgccaaaatttcctccaagcacctaacaactctcaagtctacctacttaaagcttcgttttctcattgacattggagtcaagtttgtgggtcatggcctgcagaaggacttccgggtcatcaacctgatggtgcccaaggaccaagtccttgacactgtctacctgttccatatgccccgaaaacgaatgatttccctgcgattccttgcttggtactttctggacctgaagattcaaggggaaacccatgacagtattgaggatgcccgcacagcccttcagctgtaccgaaagtatctggagctaagcaaaaatggcactgagcctgagtctttccacaaggtgctcaagggtctttatgagaagggcagaaagatggactggaaggtgcctgagcctgagggccaaacaagtcccaagaatgcagctgtcttctcctcagtgctggcgctctgactacccttcccaaagaaccacggccctctccctttactgttctatagccccagaactgggagatggcttcctaagttggctataccttgtccacttccagtactggacgtgctcagggtctagggtcacagatggtgctattaattgaactggaacacagcagaattgttgcaaaggttctaggagccagattcattccttcttcattctttgcaaaacagtggtacagacatggagtctagaattgacccagatggaaagtaattggtattcttaatatcctgggtgactaatatccaggcagagaagctcctggaaccataactgtaagttcctagctggctagggattgaagtcctggacagtgacagaggataccacagtagttcaagacttagcacaagtcaccaactgcttcagggatacctggaggggccagcaagtagagtgttggtggcccaagcaaaccagtgttgccaataccattgccaaaagggcctttggatcctggacaaagcttggctgccggcttcatttattcctgctgatggctgagaagcatctgtcttccatcccacttgcctgtcccaagttttgttccattttttaaaaatttgttgtaaactgcatgttttataaaataaaaataaaatatcgtttgttatttatctcaaaaaaaaaaaaaaaaaaaaa

SEQ ID NO: 686 - DNA, 6292 bp, human
ggatccaagatggcgtagaaagtaatgacaggatttggatgaagtaatggatcactaatgaactacagtgctggtgagatgtgtaagaaattataaagagctctgatgggctatttgggtgatacccagtgcagtgaactgcaggatttttgtccctgagtcatggaagacagaagagctgaaaagtcatgtgaacaagcatgtgaatcacttaagaggcaggactatgaaatggccctcaagcactgcacagaggcccttctttctcttggccagtactccatggcagacttcacagggccttgtccattggaaatagaacgcatcaaaatcgagagtcttctctacagaattgcctcatttttgcaactgaaaaattatgtgcaagctgatgaagattgtagacatgtgctgggagaaggactggccaagggagaagatgcctttcgggcagtgctttgctgcatgcagctgaaagggaagctccaacctgtatccaccattcttgccaagtcactcacaggagagtccctgaatgggatggtaacaaaggatttgacaagactaaaaacacttctctcagaaacagagacagcaactagtaacgccctctctggatatcacgtggaagacttagatgaggggtcttgtaatggttggcatttccgcccaccacctaggggaatcacaagcagcgaggaatatactttgtgtaaaagatttttagaacaaggaatctgtaggtatggtgcccagtgtacttcagcacattcccaggaagaactagcagaatggcagaaaagatatgcttcacggctgataaaattgaaacagcaaaatgagaataaacagctctcaggcagttacatggaaaccttgatagaaaagtggatgaattcattgtctcctgagaaagtgcttagtgaatgtatagaaggagtaaaggtagagcacaatcctgacctgtcagttactgtcagcaccaaaaaatcccaccagacatggacctttgctctcacttgtaagcctgcaagaatgctgtatcgtgtagcattgctttatgatgctcatcgtcctcattttagtatcattgcaatatctgccggagatagtactacccaggtatcacaagaagtcccagaaaactgtcaagaatggataggaggaaagatggcccaaaatggattagatcattacgtgtataaagtcgggatagcatttaacacagaaatatttggaacttttcgccaaaccatagttttcgactttggattggaaccagtactcatgcaaagagtaatgattgatgcagcttctacagaagatctcgaatacctgatgcatgcaaaacagcagctagtaaccacagctaaacgttgggattcttcctctaagactattatagattttgaacctaatgaaactactgatttggagaagagccttcttatcagataccaaattcccctctctgctgaccagctatttactcagtccgttttagacaaatcattgaccaagagcaactatcagtcacggttacatgaccttctttatattgaggagatagcccagtataaagaaatcagcaagttcaaccttaaagtgcaattgcagattctggcaagcttcatgctcactggtgtttctggaggtgcaaagtatgctcagaatggacaactttttggtcgctttaagcttactgaaacactttctgaagatactttggctggacgactggtgatgaccaaagtcaatgctgtttatttattaccagtccctaaacagaagttagtacagacccagggaaccaaagagaaggtttatgaagctactattgaagaaaaaacaaaggaatatatatttttaaggctatctagggaatgctgtgaagaacttaatcttcggcctgactgtgacacacaggttgaacttcagtttcaattaaatcgattacccctctgtgaaatgcactatgcactagacaggatcaaggacaatggggttttgtttccagacatcagtatgactcccaccataccatggagtcctaacagacaatgggatgaacagttggatcctcgactaaatgcaaaacagaaagaggctgttctggccattaccactccacttgcaatccagctgccgcctgtgcttatcatcggaccctatgggacaggcaaaacgttcactctagctcaggctgtcaaacatattctgcagcaacaggagactaggattctcatttgcacccattctaatagtgctgctgatctctacataaaggattatttacatccatatgtagaagcaggcaatccccaggcaagacctctcagggtatatttcagaaatcgctgggtaaagactgtccacccagttgtgcatcagtactgtttgatctcaagcgcacattccacctttcagatgccccagaaagaagatattcttaaacatcgagtggtggttgttaccttgaatacttcccagtacctctgtcagttggaccttgaacctgggttttttacacacattctattagatgaagctgcccaggccatggagtgtgaaaccattatgcctctagcattagcaactcaaaacactcggattgtcttggctggtgatcacatgcagctcagtccttttgtttacagcgagtttgccagggagagaaaccttcacgtttcattacttgaccgactctatgagcattaccctgctgagttcccatgtaggattctcctgtgtgagaactaccgctcccatgaagctatcatcaattatacctctgagcttttctatgagggcaaactgatggccagtgggaagcagccagcacacaaagatttctacccactaactttctttacagcacgaggagaagatgtacaagaaaaaaatagcacagctttttataataatgcagaggtgtttgaagtggtggaacgtgtagaagagttaagaaggaagtggccagtagcgtgggggaagttagatgatggcagtattggtgtggtgactccatatgctgatcaagtgtttagaatacgtgctgaacttcgaaaaaagagattatctgatgttaatgtagaaagggtgctaaatgttcaaggaaagcaattcagagttttgtttcttagcacagtacgtacaagacatacttgtaaacataaacagacaccaattaaaaagaaagagcaacttctggaagattccacagaggacttagattatggttttttatctaactacaagcttctcaatactgccatcacaagagcacaatccctggttgctgtggtgggtgatcccattgctctgtgctctattggaagatgcaggaaattttgggaacggtttattgccctgtgtcatgaaaacagtagcctacatggaatcacttttgaacagatcaaagcccagttagaggctttagaactaaagaagacatatgtgttgaatccgctggcacctgaatttatcccccgggctctaagactgcagcattcaggaagtaccaacaaacagcagcaatcaccacccaaggggaaaagtcttcatcatacccagaatgatcacttccagaatgatggaattgttcagcccaatccttctgtacttattggcaatcctattagagcatatactcctccaccccctcttggacctcacccaaatttgggaaaatctccaagccctgttcaaagaatagatcctcacactgggacaagtattctttatgtacctgctgtctatggagggaatgtagttatgtcggtgcctttacctgtaccatggacaggataccagggtaggtttgcagttgatcctcgaattattacacatcaggcagcaatggcctataacatgaacctattacagacacatggacgaggatctcctattccttatggccttggacatcacccacctgtcaccataggccagccacaaaatcagcatcaggagaaggatcaacatgagcaaaatcgaaatggtaaaagtgatacaaataattccggacctgaaattaataagattcgaacaccagagaaaaagccaacagaaccaaaacaggttgatttggaatcaaatccacagaacagaagtcctgaatcacgtcctagtgttgtttatcccagtaccaaatttcctcgcaaagataatctcaacccaagacacataaatcttccccttcctgctccccacgcacagtatgcaatccctaatcgccactttcatccccttccccagctaccaagaccaccctttccaattccacagcagcacaccttgttaaatcagcagcagaataatttgcctgaacaaccaaatcagataccacctcagccaaatcaggtagtccagcagcaaagtcagttgaatcagcagcctcagcagccacctcctcagctttctcctgcatatcaggcgggacccaacaatgctttttttaatagtgcagttgctcatcggccacagtctcctcctgcagaagctgtaattccggagcagcagccccctcccatgctgcaagaaggccacagtcctctgagagccattgcacaacccggccccattcttccttcacatctgaatagcttcattgatgagaacccctcgggattacctataggggaggctttagatcgtatacatgggagtgtcgctctggaaacattaaggcagcagcaggcacggttccagcagtggagcgagcatcatgcctttctcagtcagggcagcgctccatacccacaccatcaccatcctcacctccagcatcttcctcagccgcccctgggattacatcagccgccagtgagggcagactggaagctcaccagcagtgccgaagatgaagtggagaccacatactcaaggtttcaagacttaatcagagaactgtctcatcgtgatcaaagtgaaacacgggaactagctgaaatgccaccacctcaatcaagacttttgcaatatagacaagtacagagtagaagcccaccagcagtcccatctcccccatccagtacagaccacagtagccacttttctaactttaatgataacagcagagacattgaagtagccagcaacccagcatttccacagcgcctcccaccccagatattcaactcacctttctcgttgccatctgaacaccttgcccctcctcccttgaaatacctggcacctgatggagcatggacttttgctaacttgcaacagaatcacctaatggggccaggttttccctatggcctacctccattgcctcacaggccaccgcagaacccttttgtacaaatacagaatcatcaacatgctattggtcaagagccatttcacccattgtcatctcgaacagtatcttcttcttcgctccctagcttagaagagtatgagcccagaggacctggtcggcccttgtaccaaagaagaatctcatctagctcagttcaaccttgttctgaagaagtaagcactcctcaagacagtctggctcagtgtaaagagcttcaggaccacagtaaccaatcttctttcaacttttcatccccggagtcctgggtaaacaccacctcatctactccttatcagaacattccgtgcaatggatccagcaggacagctcagcccagagagttgatagcgccacccaagactgtcaaaccccctgaggatcaactgaagtcggagaacctcgaggtgtccagttccttcaactacagtgtgctgcagcatcttggccagtttccaccccttatgcctaacaagcagatcgcggagtcggccaatagcagtagcccccagagctctgcggggggcaagcccgccatgtcctatgccagcgctctgcgggcccctccaaagcccaggccccctcctgagcaggccaagaagagtagcgaccctctgtctctcttccaggaactgagcctagggagctcatctggcagcaatggcttttactcatattttaaataatcactttttttttccctcaagggagaatgttttaatttctgtttgtatcagtagaattaaggtagttggacttcatctatagatgcacagttccctttgttttaatattaaatatgttctcacttaattgctttgctgctagacttgcaactaatttttttaaagtatattccattattttgcatttttgatgtgtcaaaactttgacagcttttatgtagaataaaaaaatttttaaatttgtgtattgttacatatgtttgcatcaagctagcagccaagaggttaattgtgcaactat

SEQ ID NO: 687 - DNA, 2787 bp, human
gcacagacgagatctcgatcgaaggcgagatggcggacgtgctagatcttcacgaggctgggggcgaagatttcgccatggatgaggatggggacgagagcattcacaaactgaaagaaaaagcgaagaaacggaagggtcgcggctttggctccgaagaggggtcccgagcgcggatgcgtgaggattatgacagcgtggagcaggatggcgatgaacccggaccacaacgctctgttgaaggctggattctctttgtaactggagtccatgaggaagccaccgaagaagacatacacgacaaattcgcagaatatggggaaattaaaaacattcatctcaacctcgacaggcgaacaggatatctgaaggggtatactctagttgaatatgaaacatacaaggaagcccaggctgctatggagggactcaatggccaggatttgatgggacagcccatcagcgttgactggtgttttgttcggggtccaccaaaaggcaagaggagaggtggccgaagacgcagcagaagtccagaccggagacgtcgctgacaggtcctctgttgtccaggtgttctcttcaagattccatttgaccatgcagccttggacaaataggactggggtggaacttgctgtgtttatatttaatctcttaccgtatatgcgtagtatttgagttgcgaataaatgttccatttttgttttctacatttaatgttactttcctgtcctaaaattgaaagttctaaagcatagcaaggctgtatggatcattgtgaagatacttctagggactgaactctatgtatttcttttttttcttttttttgagatagagtcttgctgtgttacccagggtggattgcagctgatcatagctcactgcagcttcaaactcttgggctcaagccatccttctgcctcactgtccctagtagttgggattacaggcacatgccaccatgcccagctaaatttttaatatttttgtagagatggggtcttgctgtgttacctgggctagttatgtgagtttctatattagacatagtctcaagtttcaggtagggtttaaagtagagacactggtcagtatttcttttttggggggaactaggagagcaggagtagaagtgagatgttaagatcttatggcactaaagacttactattctgttcctacatactctgttaggatcagatagatgttatagaaatgccttttgtttctcctgcccttcttgatgtcacagttttttgtacttccagctgtctaaaggcatgaatctcctcttggagcattctcccagacccttctttagaagagtctatactaagttcttggtgccctcttcggcagccaagggtgaaggccccatagaggagaggatccaaaggagcattgaggaggcccaagaggaaaaggatgtggctcaggctgggagggacttcagttagcatggtgggggagaaccagtaccacatacccagtaggtaataaggtgtccagcagaggatgaaggtcagcaagataagcagggccagtctcagggcccggagacgaacacggggacaattgtcaaaggagcgggggagggcaaattcaccagcaggggctaggaatttagaaaatatactgtaattcagacactcagcttctgatctgagtatagggtgaattgatggaggggcatagctagtgagacagagctcgcctcctacaaggaggagaatgttgcaaaccgttttccccttcccaacctgggactatatgatttcttacccccagggattatgatagaaatatgaagccaccaagtctagacttgatggtgttcaagaataaataatactgattgcctccctagtccttgtccagctaactcagctgtttataattgaagggattcaacaaaattatctctagcatcaggtgctagacatggttagaatctcaccatggtttagtgactggtagatagctattaggtaggtagataaataaatgatgctagaggcaacaggtctagggttaaggattaaggcctgggaattggagtctcaccatggctccccttccttgtctggggcctggacacactgaggacaatgcggctatagcagatggccatggcagtcagtggcagcagaaagaggcagcagaaggtgaagaggttataggtggtctcttgccattgagccttgaagctgcctttggtgacacactgagtgaaagggactgggccagctcagtggaccgtgtggaacaggaacagctggagtggagttgaggactattagaactggttcccctcaccacccaacctacccacctatgtcatactgtctcctcccaattcatccttaattccaagtgaagcagcacagtgctgagaaacagttcatccatggtgccatgttaaagaagttggaaatatatcttgaaaatcctatcttccttttaggcttgaatatgatgctgaacagtaagtttgttaaatcttggaacttaaaacaatcctgctttctcaagtactattctaacattgcgctttataagggatgatatttctaccacctcactcatatttttagctgaaatgattttcctggtatgtctgttattttgtggaaaaagaaatattgtgtaaaatgggtgctgccaaaattccaggccattttgcagggactctgaagtgacctttagtagtaatagtcttatgtgcagtaactataatggtaaagaatgttaaataataaaatttaacattttccaaatgct

SEQ ID NO: 688 - DNA, 3694 bp, human
cagtccggccgggcggagctaggggcgggcccctgcgtctctgggcgctggagcgcggcgactatcacgccgcgtggcggacggacggactgacggacgcgcagccttacccgaaaggccatggcggagcacgcccctcgccgctgctgcctgggctgggacttcagcacgcagcaggtaaaggttgttgctgttgatgcagagttgaatgtcttctatgaggaaagtgtgcattttgacagagatcttccagaatttgggactcagggcggtgttcatgtgcacaaggatgggctgacggtcacttctccagtactaatgtgggtccaggcactggatatcatcttggagaagatgaaggcttcgggcttcgacttctctcaagtcctagccttgtccggggcgggccagcaacacggaagtatatactggaaggctggagcccagcaggcactgacaagcttatcaccagacctccggctacaccagcagcttcaggactgtttctccatcagcgactgcccggtgtggatggactccagcaccacagcccagtgccgccagctggaggctgctgtgggtggtgctcaggctctcagctgcctcacggggtcccgtgcctatgagcgttttacagggaaccaaattgcaaaaatttaccagcagaaccccgaggcctactcacatacagagagaatttctttggtcagtagctttgctgcttccctgttccttggctcttactcccctattgactacagtgatggttctggaatgaatttgttgcagatacaggataaagtctggtcccaggcttgccttggtgcctgtgcacctcatttagaggagaagcttagcccaccagtaccatcatgctcagttgtgggagccatttcttcctactacgtccagcgctacggatttcctccaggatgcaaagtggtggccttcactggggacaacccagcgtcgctggcaggcatgagactggaggaaggtgacattgcggtcagcctgggcaccagtgacaccctgtttctctggctccaagagcccatgcctgccctggaaggccacatcttctgcaacccggttgactcccagcactacatggcactcctgtgctttaaaaatggctccctcatgagagagaagatccgcaacgagtctgtatcccgttcctggagcgatttctctaaggcactgcagtccacagagatgggcaacggtggaaacctgggtttttattttgatgtaatggagatcacccctgaaattattggacgtcataggtttaacacagaaaaccacaaggttgcagcattccctggggatgtggaggttcgagcactaattgaaggacaattcatggccaagaggattcacgcagaaggcctgggctatcgagtcatgtccaagacaaagattttggccacaggaggagcatctcacaatagagaaatcttacaggtgcttgcagatgtgtttgatgccccggtgtatgttatagacactgccaactcggcctgtgtgggttctgcataccgagcttttcatggtcttgcaggtggaacagatgtgcccttttcagaggttgtgaagttagctccaaatcccagactagctgctaccccaagcccgggagcttctcaggtctacgaggcccttctcccccagtatgccaaactcgagcagagaatcttgtctcagacccgggggcctccggagtgaacaggcatccctgttgcccctgcctgcccagatttactgaccccatttgtcgacatggccccagacaggagggatccacttctctgttctgaacagctcttcctgcccctactgactccttggagtgtccaggaccatcttaaagccgccctcagcacatctgcatgaagatagataggcactcctgtccctgtgcccgtgtgccccagggcaggaaagcatctctcttttcctgtcttttatcccaggaggcaggacaacactgagactgggatatgtccaataaaaactatgacttttccccttgcagaggcagaattaaagctaatctagggactcaaatcagcagaatgggggagacaaagcccggtctcaccccctaacctcatcctatctctttctccaaccctgactgcccactcctccacaaaccgtgacccatagccgcccccaccccataccttgatctaccatccatcctcttccccaatccaaaccccacagtctcttctctcccacaccctgccctccttgtttcagctgtctgaggtgcctcgcagggcctctcttacttgccccatgctcaccctttccatgctgtccccattctctcctttcaccatctctcctctccccctccttcatctctcctccctccccaaactcacttggcataattcacaacctcccacccaaacaatgggcctggtggacgtgcttcctgtgccctccctttagctatgcccacagatcactgagagggaccatctcccaagtggtgcagtttagaacttctctccctttttctccctcattccctctctcttcttgcagtccacttgctgaagaagttgtgtcatttctctggaagaatttccaaaattctggatttcttttttattttggagtatttcatcagctgaaaagtgattctcactttgagttttcttcctatatttgtatagtgagttcctttttccttcctctttatccctcctgttttactttatacctctctattccttgctcaaattattgcaaaagcctctatagaaagtcctctgtgatctgactcctgcagactcttccagatttttctgcccaaggcctttactgagctcaggactccagctaaatcaaaatacgcatgttctcacccagagtgacaaaatcctgcagataggtttaagacctagtggctcagagcagtagctactgggaagttaaaaggaaggggcttagaaaatgaatgggaccaaaggcatcacttctgatggagatgaagccatcttgaaagtgagtggtgtcctttggaggcatggtggatgaaaggcgcaaaggaagcaagaggttaaagataatggcccattagatacaacagcaagcccaagattccgaagaagacagacaactccccctagtaccacctagacattactttttaaagacattttacattattgtccagcagaaaaaggctgtcttggaccatgaaacagtaaactgtaactaaacacttcaacatgaatttgaaaataaataattgtggatataaaagaacaccagagatcagaaattcaaaaactcagaataaaaatgaaaaagctacaagcatatatgagaagagaactgactgaacttgggaaataatttgaacaaaaagataaatcttcacagatatgaatactaaattatatcttaatgaaaatagatatggtcacaagtacattaaggcacgtagaaggtaggagtaagaaaagctaagagaagcaaaacaaacaaagcaatattaaaggaagagccaaaaagacccagaaataaaatgacagataaagaagattgtcaaagaaaagatgatacaggtaagattggaactcatgaagacaaaagataagacagtggcatagagttaatatttaaaattcaaatattaaaactcaaataaaccccaaagaacttttgg

SEQ ID NO: 689 - DNA, 2338 bp, human
ggcctttgtcaagtcatcccctcttctcctcaggaactgctcaaacctgtgccccaaagatgagggcccaggaggacctcgagggccggacacagcatgaaaccaccagggacccctcgaccccgctacccacagagcctaagtttgacatgttgtacaagatcgaggacgtgccaccttggtacctgtgcatcctgctgggcttccagcactacctgacatgcttcagtggtaccatcgccgtgcccttcctgctggctgaggcgctgtgtgtgggccacgaccagcacatggttagtcagctcatcggcaccatcttcacgtgcgtgggcatcaccactctcatccagaccaccgtgggcatccggctgccgctgttccaggccagtgcctttgcatttctggttccagccaaagccatactggctctggagagatggaaatgccccccggaagaggagatctacggtaactggagtctgcccctgaacacctctcatatttggcacccacggatacgggaggtgggtttgcatgtccagggtgcaatcatggtgtccagcgtggtggaggtggtgattggcctgctggggctgcctggggccctgctcaactacattgggcctctcacagtcacccccactgtctccctcattggcctttctgtcttccaagctgctggcgaccgagctggctcccactggggcatctcagcttgctccattctcctgatcatcctcttctcccagtacctgcgcaacctcaccttcctgctgcctgtctaccgctggggcaagggcctcactctcctccgcatccagatcttcaaaatgtttcctatcatgctggccatcatgaccgtgtggctgctctgctatgtcctgaccttgacagacgtgctgcccacagacccaaaagcctatggcttccaggcacgaaccgatgcccgtggtgacatcatggctattgcaccctggatccgcatcccctacccctgtcagtggggcctgcccacggtgactgcggctgctgtcctgggaatgttcagcgccactctggcaggcatcattgagtccatcggagattactacgcctgtgcccgcctggctggtgcaccaccccctccagtacatgctatcaacaggggcatcttcaccgaaggcatttgctgcatcatcgcggggctattgggcacgggcaacgggtccacctcgtccagtcccaacattggcgtcctgggaattaccaaggtgggcagccggcgcgtggtgcagtatggtgcggctatcatgctggtcctgggcaccatcggcaagttcacggccctcttcgcctcgctccctgaccccatcctggggggcatgttctgcactctctttggcatgattacagctgtggggctgtccaacctgcaatttgtggacatgaactcctctcgcaacctcttcgtgctgggattttccatgttcttcgggctcacgctgcccaattacctggagtccaaccctggcgccatcaatacaggcattcttgaagtggatcagattctgattgtgctgctgaccacggagatgtttgtgggcgggtgccttgctttcatacttgacaacacagtgccagggagcccagaggagcgtggtctgatacagtggaaagctggggctcatgccaacagtgacatgtcttccagcctcaagagctacgatttccccattgggatgggcatagtaaaaagaattacctttctgaaatacattcctatctgcccagtcttcaaaggattttcttcaagttcaaaagatcagattgcaattccagaagacactccagaaaatacagaaactgcatctgtgtgcaccaaggtctgaaaaatgacttccaggaaaggaagcatggtatataacaggaaaagaaaactacatggggaaccagaagacctaagcctgaaatcccagccctgcccctaactaacttctgtgtaaactcagataagtcacctttctctgggattcaaatttttgcatcagttaaaaaaaaaggggtgggggggaatgggccaaagtctgagtcttagagacttgtaccaatgttatgctatgtctctaaatctttactctcctaagtagacttgtcagcatctaggaagaacagctagaaattttcctctgtgatattttagactgcaagttgaaaaaaataaaaagaaatgagggcaggttccagggcctgaaatgtaggtatgctgcaaggcttttacattgaatttgaccctacatcacttcaagactaatgcataatattaaacatcatgttgaagaaaaaaaaaaaaaaaaaaaaa

SEQ ID NO: 690 - DNA, 1485 bp, human
tccctgggactgcgtcactggtgcgcgccgcgggtcagggcgcaatggcggcgctgggcggggatgggctgcgactgctgtcggtgtcgcggccggagcggccgcccgagtcggcggcgctgggcggcctgggccccgggctgtgctgctgggtgtcagtgttctcctgcctcagcctcgcctgctcctacgtgggcagcctctacgtctggaagagcgaactgcccagggaccatcccgcggtcatcaagcgacgcttcaccagcgtcctggtggtgtccagtctctcacccctgtgcgtgctgctctggagggaactcacaggcatccagccaggcacatccctgctcaccctgatgggcttcaggctggagggcattttcccagcggcgctgctgcccctgttgctgaccatgattcttttcctgggcccactgatgcagctctctatggattgcccttgtgacctggcagatgggctgaaggttgtcctggccccccgctcctgggcccgctgcctcacagacatgcgttggctgcggaaccaagtgatcgccccgctgacagaggagctggtgttccgggcctgtatgctgcccatgttagcaccgtgcatgggcctgggccctgctgtgttcacctgcccgctcttttttggagttgcccattttcaccatattattgagcagctgcgtttccgccagagcagcgtggggaacatcttcttgtctgctgcgttccagttctcctacacagctgtcttcggtgcctacactgctttcctcttcatccgcacaggacacctgattgggccggttctctgccattccttctgcaattacatgggtttcccagctgtttgcgcggccttggagcacccacagaggcggcccctgctggcaggctatgccctgggtgtgggactcttcctgcttctgctccagcccctcacggaccccaagctctacggcagccttcccctttgtgtgcttttggagcgggcaggggactcagaggctcccctgtgctcctgacctatgctcctgggatacgctatgaactctcaccggctccccaagccctccccaccaaggggtactgcaggggaagggctggctggggtccccgaagatctcaggaatttttgtagggattgaagccagagctagttgcgtcccagggaccaagagaaagaagcagatatccaaagggtgcagccccttttgaaaggggtgtttacgagcagctgtgagtgaggggacaaggggcaggtcccaggagccacacactcccttcctcactttggactgctgcttctcttagctcctctgcctctgaaaagctgctcggggttttttatttataaaacctctccccaccccccaccccccaacttcctgggttttctcattgtctttttgcatcagtactttgtatgggatattaaagagatttaacttgggtaacatggcttgggcctttggg

SEQ ID NO: 691 - DNA, 3767 bp, human
ctggaaggaagtttaaatacagaaagagcaaagtattatctaactataacaatgccacattttactgtgactaaggtagaggacccagaggagggggcagcggcttcgatctctcaagagcctagtttagcagacataaaagcccggattcaggattcagatgaaccagacctgagtcagaactccatcacaggggaacacagccaactgttagacgacggacataagaaagctcgaaatgcttatctcaataattccaattatgaagaaggagatgaatattttgataaaaatttggcactctttgaggaagaaatggacaccagaccgaaggtgtcttccctcctcaaccgcatggccaattacactaatctgactcaaggagcaaaggaacatgaagaggcagaaaacatcactgaagggaaaaagaagcccaccaagaccccccaaatgggtaccttcatgggtgtctacctcccatgtctacaaaatatttttggagtgatcctttttttacgccttacatgggtggtgggcacagctggagttcttcaggcttttgcaattgtccttatctgctgctgctgtacaatgttgactgctatctccatgagtgccattgccactaatggagtggtgccagctgggggctcatactttatgatttcccgggcactgggcccagagtttggtggggctgttggcctctgcttttatcttggtaccacatttgcagcagccatgtacatccttggtgccattgaaatctttctggtctatatcgtcccccgagctgccatctttcacagtgatgacgcactcaaggaatcagcagccatgctaaataacatgcgtgtctacggcacagctttcttggtccttatggtattagtggtatttatcggcgtacgctatgtgaacaagtttgcctcacttttcctggcctgtgtcattgtgtccatcttggccatctatgctggagccatcaagtcttcttttgctcctccacacttcccggtctgcatgctgggtaaccgcaccctttcatcaagacacattgacgtttgctctaagaccaaggaaattaacaacatgacagtcccatcaaagttatggggattcttctgtaactcgagtcaatttttcaatgccacctgtgatgaatactttgttcacaataacgtcacttcaatccagggcattcctggattggctagtggtataattacagagaatctttggagtaattacctacccaagggagagatcatcgaaaagccttcagccaaatcttctgatgtcttaggcagcttaaaccatgaatatgttcttgttgacatcaccacctccttcacgcttctggtgggaatcttctttccctctgttacaggtatcatggctggatcaaacagatctggagatctgaaagatgctcagaagtctattccgattggtactatccttgccatcctgaccacctcctttgtttatttaagcaatgttgtcctttttggtgcatgtattgaaggggttgttctcagagacaagttcggtgatgctgtgaaaggtaatttggtggtaggcaccttatcttggccatccccatgggtgattgttattggctccttcttttcaacatgtggggctggacttcagagcctcacaggtgcaccgaggctgctacaagctattgccaaggataacatcataccgtttctgagggtttttggccacagcaaagccaatggggaacctacctgggctttacttctaactgctgccattgcagagcttggaatactcattgcctccctggatcttgtggccccaattctttccatgttttttctcatgtgttacctctttgtaaacttggcatgtgccttgcaaacattacttcgaacacccaactggagaccccgattccgctactaccattgggccctttctttcatgggaatgagtatctgtctggctctgatgttcatttcttcctggtattatgccattgtagccatggtaatagctggtatgatctacaagtacattgaataccaaggagctgagaaagaatggggtgatggtatccgtgggctgtccctcagtgcagcccggtttgctttgcttcgattggaggaaggacctccacacactaaaaactggaggcctcagttgcttgtattactgaaactagatgaagacttacatgtcaagcatcctcgcctcctcacctttgcctcacagctcaaagcaggaaaaggtctcactattgtgggctctgtcatcgtggggaacttcctagagaactacggtgaagctttagctgctgagcagaccataaagcacctaatggaggcagagaaggtaaaaggattctgccagctggtggtggccgccaagctgagagagggcatttcccacctcatccagtcatgtggccttgggggcatgaagcacaacacggtggtgatgggctggcctaatggctggcgtcaaagcgaagatgcccgcgcttggaagacttttattggcacagttcgagtgacaactgctgcccatcttgcactgctggtggctaaaaacatctccttctttcccagcaatgtggagcaattttctgagggcaacattgatgtgtggtggattgtgcatgatggggggatgcttatgctactaccattcctactgaaacagcacaaggtgtggcgaaagtgcagcatacggatcttcacagtagcccaattagaagacaacagtatccaaatgaagaaggacctagccaccttcctatatcacttacgcattgaggcggaggtagaagtggtggagatgcatgacagtgatatatcagcatatacttacgagcgcactttgatgatggaacaaaggtcccagatgcttcggcacatgcggctatccaaaacagagcgagacagagaggcacaattggtgaaagaccgaaactcaatgctacgattgaccagcattggctctgatgaggacgaagagacagaaacctatcaggagaaggtgcacatgacttggacaaaagacaagtacatggcatcccggggacaaaaagcgaagtcaatggaaggattccaggacctgcttaacatgcgtccggaccagtccaatgtgaggcggatgcatacagcagtgaaactcaacgaggttatagttaacaagtcccatgaagcaaagctggttttattgaatatgccagggccaccccgaaaccctgagggtgatgaaaactacatggagttcctagaggtgcttaccgagggactagagcgagtcctacttgtccggggtggtggcagtgaagtgatcaccatttattcataacctactctgaatgaccgtgcttgacctgttttcttaaaaggcctacgtcctccatggaagtgccagctcattactaccactcccactcaactagaagcctgtgttctgtacacatcatactgaactcttgatgagctgagcctcaagtacctgtgtaaaagagctcccatctgatctgcagtcattacagaaaaagcaaatattccctcaacatcagaacaatgctcaagtctttcaagccacgtctgagcagtcaaaggcaaattagaattaacaagctgagccaataaatgaattggtaaaagggatgctagaaattcaactgaagaaaaaaagcaagtcaagtacgtattcagcattaaagatgaatctcagaagtcatggttcaatgttgacactgtgaggataacaactag

SEQ ID NO: 692 - DNA, 1703 bp, human
gcagcagcagagaatccaaaccctaaagctgatatcacaaagtaccatttctccaagttgggggctcagaggggagtcatcatgagcgatgttaccattgtgaaagaaggttgggttcagaagaggggagaatatataaaaaactggaggccaagatacttccttttgaagacagatggctcattcataggatataaagagaaacctcaagatgtggatttaccttatcccctcaacaacttttcagtggcaaaatgccagttaatgaaaacagaacgaccaaagccaaacacatttataatcagatgtctccagtggactactgttatagagagaacatttcatgtagatactccagaggaaagggaagaatggacagaagctatccaggctgtagcagacagactgcagaggcaagaagaggagagaatgaattgtagtccaacttcacaaattgataatataggagaggaagagatggatgcctctacaacccatcataaaagaaagacaatgaatgattttgactatttgaaactactaggtaaaggcacttttgggaaagttattttggttcgagagaaggcaagtggaaaatactatgctatgaagattctgaagaaagaagtcattattgcaaaggatgaagtggcacacactctaactgaaagcagagtattaaagaacactagacatccctttttaacatccttgaaatattccttccagacaaaagaccgtttgtgttttgtgatggaatatgttaatgggggcgagctgtttttccatttgtcgagagagcgggtgttctctgaggaccgcacacgtttctatggtgcagaaattgtctctgccttggactatctacattccggaaagattgtgtaccgtgatctcaagttggagaatctaatgctggacaaagatggccacataaaaattacagattttggactttgcaaagaagggatcacagatgcagccaccatgaagacattctgtggcactccagaatatctggcaccagaggtgttagaagataatgactatggccgagcagtagactggtggggcctaggggttgtcatgtatgaaatgatgtgtgggaggttacctttctacaaccaggaccatgagaaactttttgaattaatattaatggaagacattaaatttcctcgaacactctcttcagatgcaaaatcattgctttcagggctcttgataaaggatccaaataaacgccttggtggaggaccagatgatgcaaaagaaattatgagacacagtttcttctctggagtaaactggcaagatgtatatgataaaaagcttgtacctccttttaaacctcaagtaacatctgagacagatactagatattttgatgaagaatttacagctcagactattacaataacaccacctgaaaaatgtcagcaatcagattgtggcatgctgggtaactggaaaaaataataaaaatcggcttcctacagccagcagcacagtcacccatggaactgttggctttggattaaatgtggaattgaacgactacccagaagtgttctggaaagaagcgagatgtgtggcctgcctcaccgtcctcacccatcaaaagcaccagcaggcacgttaactcgaattctcacaaggaaaaggccattaaagctcaaggtgcatttcaaactccaggctac

SEQ ID NO: 693 - DNA, 4099 bp, human
gggcagtcccctgaggagcggggctggttgaaacgctaggggcgggatctggcggagtggaagaaccgcggcaggggccaagcctcctcaactatgacctcaaccggccaggattccaccacaaccaggcagcgaagaagtaggcagaacccccagtcgccccctcaggactccagtgtcacttcgaagcgaaatattaaaaagggagccgttccccgctctatccccaatctagcggaggtaaagaagaaaggcaaaatgaagaagctcggccaagcaatggaagaagacctaatcgtgggactgcaagggatggatctgaaccttgaggctgaagcactggctggcactggcttggtgttggatgagcagttaaatgaattccattgcctctgggatgacagcttcccggaaggccctgagcggctccatgccatcaaggagcaactgatccaggagggcctcctagatcgctgcgtgtcctttcaggcccggtttgctgaaaaggaagagctgatgttggttcacagcctagaatatattgatctgatggaaacaacccagtacatgaatgagggagaactccgtgtcctagcagacacctacgactcagtttatctgcatccgaactcatactcctgtgcctgcctggcctcaggctctgtcctcaggctggtggatgcggtcctgggggctgagatccggaatggcatggccatcattaggcctcctggacatcacgcccagcacagtcttatggatggctattgcatgttcaaccacgtggctgtggcagcccgctatgctcaacagaaacaccgcatccggagggtccttatcgtagattgggatgtgcaccacggtcaaggaacacagttcaccttcgaccaggaccccagtgtcctctatttctccatccaccgctacgagcagggtaggttctggccccacctgaaggcctctaactggtccaccacaggtttcggccaaggccaaggatataccatcaatgtgccttggaaccaggtggggatgcgggatgctgactacattgctgctttcctgcacgtcctgctgccagtcgccctcgagttccagcctcagctggtcctggtggctgctggatttgatgccctgcaaggggaccccaagggtgagatggccgccactccggcagggttcgcccagctaacccacctgctcatgggtctggcaggaggcaagctgatcctgtctctggagggtggctacaacctccgcgccctggctgaaggcgtcagtgcttcgctccacacccttctgggagacccttgccccatgctggagtcacctggtgccccctgccggagtgcccaggcttcagtttcctgtgctctggaagcccttgagcccttctgggaggttcttgtgagatcaactgagaccgtggagagggacaacatggaggaggacaatgtagaggagagcgaggaggaaggaccctgggagccccctgtgctcccaatcctgacatggccagtgctacagtctcgcacagggctggtctatgaccaaaatatgatgaatcactgcaacttgtgggacagccaccaccctgaggtaccccagcgcatcttgcggatcatgtgccgtctggaggagctgggccttgccgggcgctgcctcaccctgacaccgcgccctgccacagaggctgagctgctcacctgtcacagtgctgagtacgtgggtcatctccgggccacagagaaaatgaaaacccgggagctgcaccgtgagagttccaactttgactccatctatatctgccccagtaccttcgcctgtgcacagcttgccactggcgctgcctgccgcctggtggaggctgtgctctcaggagaggttctgaatggtgctgctgtggtgcgtcccccaggacaccacgcagagcaggatgcagcttgcggtttttgctttttcaactctgtggctgtggctgctcgccatgcccagactatcagtgggcatgccctacggatcctgattgtggattgggatgtccaccacggtaatggaactcagcacatgtttgaggatgaccccagtgtgctatatgtgtccctgcaccgctatgatcatggcaccttcttccccatgggggatgagggtgccagcagccagatcggccgggctgcgggcacaggcttcaccgtcaacgtggcatggaacgggccccgcatgggtgatgctgactacctagctgcctggcatcgcctggtgcttcccattgcctacgagtttaacccagaactggtgctggtctcagctggctttgatgctgcacggggggatccgctggggggctgccaggtgtcacctgagggttatgcccacctcacccacctgctgatgggccttgccagtggccgcattatccttatcctagagggtggctataacctgacatccatctcagagtccatggctgcctgcactcgctccctccttggagacccaccacccctgctgaccctgccacggcccccactatcaggggccctggcctcaatcactgagaccatccaagtccatcgcagatactggcgcagcttacgggtcatgaaggtagaagacagagaaggaccctccagttctaagttggtcaccaagaaggcaccccaaccagccaaacctaggttagctgagcggatgaccacacgagaaaagaaggttctggaagcaggcatggggaaagtcacctcggcatcatttggggaagagtccactccaggccagactaactcagagacagctgtggtggccctcactcaggaccagccctcagaggcagccacagggggagccactctggcccagaccatttctgaggcagccattgggggagccatgctgggccagaccacctcagaggaggctgtcgggggagccactccggaccagaccacctcagaggagactgtgggaggagccattctggaccagaccacctcagaggatgctgttgggggagccacgctgggccagactacctcagaggaggctgtaggaggagctacactggcccagaccacctcggaggcagccatggagggagccacactggaccagactacgtcagaggaggctccagggggcaccgagctgatccaaactcctctagcctcgagcacagaccaccagacccccccaacctcacctgtgcagggaactacaccccagatatctcccagtacactgattgggagtctcaggaccttggagctaggcagcgaatctcagggggcctcagaatctcaggccccaggagaggagaacctactaggagaggcagctggaggtcaggacatggctgattcgatgctgatgcagggatctaggggcctcactgatcaggccatattttatgctgtgacaccactgccctggtgtccccatttggtggcagtatgccccatacctgcagcaggcctagacgtgacccaaccttgtggggactgtggaacaatccaagagaattgggtgtgtctctcttgctatcaggtctactgtggtcgttacatcaatggccacatgctccaacaccatggaaattctggacacccgctggtcctcagctacatcgacctgtcagcctggtgttactactgtcaggcctatgtccaccaccaggctctcctagatgtgaagaacatcgcccaccagaacaagtttggggaggatatgccccacccacactaagccccagaatacggtccctcttcaccttctgaggcccacgatagaccagctgtagctcattccagcctgtaccttggatgaggggtagcctcccactgcatcccatcctgaatatcctttgcaactccccaagagtgcttatttaagtgttaatacttttaagagaactgcgacgattaattgtggatctccccctgcccattgcctgcttgaggggcaccactactccagcccagaaggaaaggggggcagctcagtggccccaagagggagctgatatcatgaggataacattggcgggaggggagttaactggcaggcatggcaaggttgcatatgtaataaagtacaagctgtt

SEQ ID NO: 694 - DNA, 3132 bp, human
gaagcagaggaggaaggagagaagaggtggaggtggccgcaggctgagtcgcggccgggatgtccgggcagccgccgccgccgccgccgcagcagcagcaacagcagcagcagctgtcgccgccaccgccggcggccttggccccagtctccggagtcgtcctgccggcgcccccggccgtcagcgccggctcttctccggccggctcgcccggcggcggtgcgggcggcgaaggcttaggggccgcggcggccgccctgctcctccaccctccgccgccgccgcccccggccaccgcggccccgccgcccccgccgccgcccccgcctccccctgcctcagcggctgcccccgccagcgggccgcccgctcccccgggccttgcagcgggccccggcccggctggaggagccccgaccccagctctggtggcgggcagcagcgccgcggcccccttccctcacggggactcggccctgaacgagcaggagaaggagttgcagcggcggctgaagcgtctctacccggccgtggacgaacaagagacgccgctgcctcggtcctggagcccgaaggacaagttcagctacatcggcctctctcagaacaacctgcgggtgcactacaaaggtcatggcaaaaccccaaaagatgccgcgtcagttcgagccacgcatccaataccagcagcctgtgggatttattattttgaagtaaaaattgtcagtaagggaagagatggttacatgggaattggtctttctgctcaaggtgtgaacatgaatagactaccaggttgggataagcattcatatggttaccatggggatgatggacattcgttttgttcttctggaactggacaaccttatggaccaactttcactactggtgatgtcattggctgttgtgttaatcttatcaacaatacctgcttttacaccaagaatggacatagtttaggtattgctttcactgacctaccgccaaatttgtatcctactgtggggcttcaaacaccaggagaagtggtcgatgccaattttgggcaacatcctttcgtgtttgatatagaagactatatgcgggagtggagaaccaaaatccaggcacagatagatcgatttcctatcggagatcgagaaggagaatggcagaccatgatacaaaaaatggtttcatcttatttagtccaccatgggtactgtgccacagcagaggcctttgccagatctacagaccagaccgttctagaagaattagcttccattaagaatagacaaagaattcagaaattggtattagcaggaagaatgggagaagccattgaaacaacacaacagttatacccaagtttacttgaaagaaatcctaatctccttttcacattaaaagtgcgtcagtttatagaaatggtgaatggtacagatagtgaagtacgatgtttgggaggccgaagtccaaagtctcaagacagttatcctgttagtcctcgaccttttagtagtccaagtatgagccccagccatggaatgaatatccacaatttagcatcaggcaaaggaagcaccgcacatttttcaggttttgaaagttgtagtaatggtgtaatatcaaataaagcacatcaatcatattgccatagtaataaacaccagtcatccaacttgaatgtaccagaactaaacagtataaatatgtcaagatcacagcaagttaataacttcaccagtaatgatgtagacatggaaacagatcactactccaatggagttggagaaacttcatccaatggtttcctaaatggtagctctaaacatgaccacgaaatggaagattgtgacaccgaaatggaagttgattcaagtcagttgagacgccagttgtgtggaggaagtcaggccgccatagaaagaatgatccactttggacgagagctgcaagcaatgagtgaacagctaaggagagactgtggcaagaacactgcaaacaaaaaaatgttgaaggatgcattcagtctactagcatattcagatccctggaacagcccagttggaaatcagcttgacccgattcagagagaacctgtgtgctcagctcttaacagtgcaatattagaaacccacaatctgccaaagcaacctccacttgccctagcaatgggacaggccacacaatgtctaggactgatggctcgatcaggaattggatcctgcgcatttgccacagtggaagactacctacattagctatgcatttcaagagctcacacttatattgtggcatatagtcaacatggaagtagaccagctctgctgatttgaaatttagattttttaaattatgtactggggacaggtttttgtcgctttacattgcttcctagtttacagcatgatgcaaatgattttctaacttagtgttaggagaaattattttccatctttaacctcttagttgtctaagagttaaatattactgaatttcagacgttcaaattgatcatcacaaatcctttaaaacaattacctaaaagaaaccaaaaatcctgccttctttgtgggggaggggggagagaggggaaggaaatggaacaagttgtgtttgtgttagcatgtgggtgatgtaaacttcaaattgggagatgttccgacccccactcccatataagcattcaatcagtgtaacttgcaaaatgcataaacatccgacagtttgaatttatagtgttgatggaagaaatcatttttaatgtgtactgtaaaacttgaaatactcaggagctgagtgaatatgtttgttgctacttacaatcccgacctgttagtcccagtagttttgttttaacatggtctttttcaactttgtttcctgtttaactacagatgacttctgttgtagactcacaagtttaactgttgtattataacagtattacatgtcaacggtgtggttatgacctttatttatataaaaaccaaatatttagtcaatttaccgtgtcttaatttaatctttgtacaccttccatttttaagtgcttaaatgagtactatattgcaataaaatgtagtgatataattaaccagccattaaaaatttacttctacagaaaaaaaaaaaaaaaaaaaa

SEQ ID NO: 695 - DNA, 1568 bp, human
ggagaaaggagagaaaggaaagcgcgaggagccgccgccaccaccagcgcagcagtcctggagctgtgaggagattcgggccgtcaccctgcctcccctgcgtcccgccaccggccgcttctgtcctcggacccattccaacaatctcgtaaaacatggtggattactatgaagttctaggcgtgcagagacatgcctcacccgaggatattaaaaaggcatatcggaaactggcactgaagtggcatccagataaaaatcctgagaataaagaagaagcagagagaaaattcaagcaagtagcggaggcatatgaagtgctgtcggatgctaagaaacgggacatctatgacaaatatggcaaagaaggattaaatggtggaggaggaggtggaagtcattttgacagtccatttgaatttggcttcacattccgtaacccagatgatgtcttcagggaattttttggtggaagggacccattttcatttgacttctttgaagacccttttgaggacttctttgggaatcgaaggggtccccgaggaagcagaagccgagggacggggtcgtttttctctgcgttcagtggatttccgtcttttggaagtggattttcttcttttgatacaggatttacttcatttgggtcactaggtcacgggggcctcacttcattctcttccacgtcatttggtggtagtggcatgggcaacttcaaatcgatatcaacttcaactaaaatggttaatggcagaaaaatcactacaaagagaattgtcgagaacggtcaagaaagagtagaagttgaagaagatggccagttaaagtccttaacaataaatggtaaggagcagctgctgcgcttggataacaagtaattcaacgcacgcacttaacagaaatgttaaactataacaagcaccatttgaggattaacaggaacatttttttgaagatttcaaacgaactcgactttcagtataattgtacctaaagtatttataaacagctcatcggagcctctatttgtcatagacttttgagttgattgttgggaccacataataggaccattttttttttgtctttaaaattgttgtaaatctctgtatgcactttgcttttttattaaacgtactccaaggtgagtcttgactctttagtgtaggacaagattgtacactaacaccagcatggacctgcttttcattgtgtctgaaatgtgagccacgtagtgtcggcctgctgtgaagttaacattgccaggacgattcttctacagaaataatttcaatttttttcagtatttagtagtgaaagatattaatacattaatggtaatacatttctggtttaatataaattaaggatgttttctagttgtgcatgaatgctggcaacttagtaagttttgacaattgtttaaatatgtaatgttaagcttaggtttaaaaaagtaaagctggtaaactgggtctttgtcatttgctttaaaaaaaaaaaaaaagaaaataaatgcgaatgtgttggtgcattcttcctgagtgggatctggaaaaaaaaaa

SEQ ID NO: 696 - DNA, 2993 bp, human
gggcctgcagttggcagaagggtcccgggcccagagccagcggggccgtgctgagacggcgtacgtgccctgcgtgagtgcgtggcggcggcgcgtgcgctaggggagtgggcggtgaggcctggtccacgtgcgtcccttcccgggacccccgcagcttggcgcccagcggctacgtgagccaaggcacccggatgtccgcgcccctctccgagtgacaagtcccggcctccggtcccgcagtgcccgcagcctcggccggcgtccacgcattgccatggtgactgtgggcaactactgcgaggccgaagggcccgtgggtccggcctggatgcaggatggcctgagtccctgcttcttcttcacgctcgtgccctcgacgcggatggctctagggactctggccttggtgctggctcttccctgcagacgccgggagcggcccgctggtgctgattcgctgtcttggggggccggccctcgcatctctccctacgtgctgcagctgcttctggccacacttcaggcggcgctgcccctggccggcctggctggccgggtgggcactgcccggggggccccactgccaagctatctacttctggcctccgtgctggagagtctggccggcgcctgtggcctgtggctgcttgtcgtggagcggagccaggcacggcagcgtctggcaatgggcatctggatcaagttcaggcacagccctggtctcctgctcctctggactgtggcgtttgcagctgagaacttggccctggtgtcttggaacagcccacagtggtggtgggcaagggcagacttgggccaacaggttcagtttagcctgtgggtgctgcggtatgtggtctctggagggctgtttgtcctgggtctctgggcccctggacttcgtccccagtcctatacattgcaggttcatgaagaggaccaagatgtggaaaggagccaggttcggtcagcagcccaacagtctacctggcgagattttggcaggaagctccgcctcctgagtggctacctgtggcctcgagggagtccagctctgcagctggtggtgctcatctgcctggggctcatgggtttggaacgggcactcaatgtgttggtgcctatattctataggaacattgtgaacttgctgactgagaaggcaccttggaactctctggcctggactgttaccagttacgtcttcctcaagttcctccaggggggtggcactggcagtacaggcttcgtgagcaacctgcgcaccttcctgtggatccgggtgcagcagttcacgtctcggcgggtggagctgctcatcttctcccacctgcacgagctctcactgcgctggcacctggggcgccgcacaggggaggtgctgcggatcgcggatcggggcacatccagtgtcacagggctgctcagctacctggtgttcaatgtcatccccacgctggccgacatcatcattggcatcatctacttcagcatgttcttcaacgcctggtttggcctcattgtgttcctgtgcatgagtctttacctcaccctgaccattgtggtcactgagtggagaaccaagtttcgtcgtgctatgaacacacaggagaacgctacccgggcacgagcagtggactctctgctaaacttcgagacggtgaagtattacaacgccgagagttacgaagtggaacgctatcgagaggccatcatcaaatatcagggtttggagtggaagtcgagcgcttcactggttttactaaatcagacccagaacctggtgattgggctcgggctcctcgccggctccctgctttgcgcatactttgtcactgagcagaagctacaggttggggactatgtgctctttggcacctacattatccagctgtacatgcccctcaattggtttggcacctactacaggatgatccagaccaacttcattgacatggagaacatgtttgacttgctgaaagaggagacagaagtgaaggaccttcctggagcagggccccttcgctttcagaagggccgtattgagtttgagaacgtgcacttcagctatgccgatgggcgggagactctgcaggacgtgtctttcactgtgatgcctggacagacacttgccctggtgggcccatctggggcagggaagagcacaattttgcgcctgctgtttcgcttctacgacatcagctctggctgcatccgaatagatgggcaggacatttcacaggtgacccaggcctctctccggtctcacattggagttgtgccccaagacactgtcctctttaatgacaccatcgccgacaatatccgttacggccgtgtcacagctgggaatgatgaggtggaggctgctgctcaggctgcaggcatccatgatgccattatggctttccctgaagggtacaggacacaggtgggcgagcggggactgaagctgagcggcggggagaagcagcgcgtcgccattgcccgcaccatcctcaaggctccgggcatcattctgctggatgaggcaacgtcagcgctggatacatctaatgagagggccatccaggcttctctggccaaagtctgtgccaaccgcaccaccatcgtagtggcacacaggctctcaactgtggtcaatgctgaccagatcctcgtcatcaaggatggctgcatcgtggagaggggacgacacgaggctctgttgtcccgaggtggggtgtatgctgacatgtggcagctgcagcagggacaggaagaaacctctgaagacactaagcctcagaccatggaacggtgacaaaagtttggccacttccctctcaaagactaacccagaagggaataagatgtgtctcctttccctggcttatttcatcctggtcttggggtatggtgctagctatggtaagggaaagggacctttccgaaaaacatcttttggggaaataaaaatgtggactgtgaaaaaaaaaaaaaaaaaaaaa

SEQ ID NO: 697 - DNA, 2311 bp, human
gcaggaagatggcggcggtagcggaggtgtgagtggacgcgggactcagcggccggattttctcttcccttcttttcccttttccttccctatttgaaattggcatcgagggggctaagttcgggtggcagcgccgggcgcaacgcaggggtcacggcgacggcggcggcggctgacggctggaagggtaggcttcattcaccgctcgtcctccttcctcgctccgctcggtgtcaggcgcggcggcggcgcggcgggcggacttcgtccctcctcctgctcccccccacaccggagcgggcactcttcgcttcgccatcccccgacccttcaccccgaggactgggcgcctcctccggcgcagctgagggagcgggggccggtctcctgctcggttgtcgagcctccatgtcggataatcagagctggaactcgtcgggctcggaggaggatccagagacggagtctgggccgcctgtggagcgctgcggggtcctcagtaagtggacaaactacattcatgggtggcaggatcgttgggtagttttgaaaaataatgctctgagttactacaaatctgaagatgaaacagagtatggctgcagaggatccatctgtcttagcaaggctgtcatcacacctcacgattttgatgaatgtcgatttgatattagtgtaaatgatagtgtttggtatcttcgtgctcaggatccagatcatagacagcaatggatagatgccattgaacagcacaagactgaatctggatatggatctgaatccagcttgcgtcgacatggctcaatggtgtccctggtgtctggagcaagtggctactctgcaacatccacctcttcattcaagaaaggccacagtttacgtgagaagttggctgaaatggaaacatttagagacatcttatgtagacaagttgacacgctacagaagtactttgatgcctgtgctgatgctgtctctaaggatgaacttcaaagggataaagtggtagaagatgatgaagatgactttcctacaacgcgttctgatggtgacttcttgcatagtaccaacggcaataaagaaaagttatttccacatgtgacaccaaaaggaattaatggtatagactttaaaggggaagcgataacttttaaagcaactactgctggaatccttgcaacactttctcattgtattgaactaatggttaaacgtgaggacagctggcagaagagactggataaggaaactgagaagaaaagaagaacagaggaagcatataaaaatgcaatgacagaacttaagaaaaaatcccactttggaggaccagattatgaagaaggccctaacagtctgattaatgaagaagagttctttgatgctgttgaagctgctcttgacagacaagataaaatagaagaacagtcacagagtgaaaaggtgagattacattggcctacatccttgccctctggagatgccttttcttctgtggggacacatagatttgtccaaaaggttgaagagatggtgcagaaccacatgacttactcattacaggatgtaggcggagatgccaattggcagttggttgtagaagaaggagaaatgaaggtatacagaagagaagtagaagaaaatgggattgttctggatcctttaaaagctacccatgcagttaaaggcgtcacaggacatgaagtctgcaattatttctggaatgttgacgttcgcaatgactgggaaacaactatagaaaactttcatgtggtggaaacattagctgataatgcaatcatcatttatcaaacacacaagagggtgtggcctgcttctcagcgagacgtattatatctttctgtcattcgaaagataccagccttgactgaaaatgaccctgaaacttggatagtttgtaatttttctgtggatcatgacagtgctcctctaaacaaccgatgtgtccgtgccaaaataaatgttgctatgatttgtcaaaccttggtaagcccaccagagggaaaccaggaaattagcagggacaacattctatgcaagattacatatgtagctaatgtgaaccctggaggatgggcaccagcctcagtgttaagggcagtggcaaagcgagagtatcctaaatttctaaaacgttttacttcttacgtccaagaaaaaactgcaggaaagcctattttgttctagtattaacaggtactagaagatatgttttatctttttttaactttatttgactaatatgactgtcaatactaaaatttagttgttgaaagtatttactatgtttttt

SEQ ID NO: 698 - DNA, 1494 bp, human
ctcgcgaaagggcaggcatcgcggggctggccacttccgtacttccgctttccggcccagccagcgcccgcgatgactgccactctccgcccctacctgagtgccgtgcgggccacattgcaggctgccctctgcctggagaacttctcctcccaggttgtggaacgacacaacaagccggaagtggaagtcaggagtagcaaagagctcctgttacaacctgtgaccatcagcaggaatgagaaggaaaaggttctgattgagggctccatcaactctgtccgggtcagcattgctgtgaaacaggctgatgagatcgagaagattttgtgccacaagttcatgcgcttcatgatgatgcgagcagagaacttctttatccttcgaaggaagcctgtggaggggtatgatatcagctttctgatcaccaacttccacacagagcagatgtacaaacacaagttggtggactttgtgatccacttcatggaggagattgacaaggagatcagtgagatgaagctgtcagtcaatgcccgtgcccgcattgtggctgaagagttccttaagaatttttaaaccatctggctggatctcgtggccttccccctcagactacccatgtctccacgaaggcgtcctggagtcactccccgagcagcgcggcggcggcagggagttgggttggggtgggcatttgatgcgggaggtgggtggtgtgcttgctagctgggcaagaaagcagcagtggacctgccccaaggccacacgtgcctggtcaggctggcttctgatgttcagtcccctgggccgggacagattttttttaacgtcttgaaacttaaactctgtgcttgtaggatactgtaacctttttgtctttttttttttttttttttttaaacctccacctccagtggctgtgactggtcccagtgattatacgttattggttgctgtgggtctgggcgggcctggagccagaaggcgacttattttttctctcctatgccaccccaggtggggagggagggaggtttcagactccagtttctcccttgcccttttattcccaagcctccttggccccagtataagtgttgggaactctctgccagcttcctgagttctgcctaaagatggccccccagcactggttggggacaagggccaaattggtgaccaccagtcatgcctaggacctggggcccaaaagccgggcaacctctggctacaggggccattgggtgccctcccagttgagaggggccgctgtttcgccttgtccgtcagtgccagtgcctgtgccagaggtggcgaggtgagtcctccagagcttcctggccgggccctcctcctgcctgttctggctcctctgctcccacgctagctgtcccttttctgattctggtggatcctccctcccctaattaaagtctctttttgcccctttggggctgcatgaaaaaaaaaaaaaaaaaaaaaaaaaaaaaa

SEQ ID NO: 699 - DNA, 912 bp, human
cgcttccgcctacctcgcccaggctgccagaccggaagcgctccgctgtacctggatcctgctcctctgggttgaaacccgggcgccgccaagatgccggcttaccactcttctctcatggatcctgataccaaactcatcggaaacatggcactgttgcctatcagaagtcaattcaaaggacctgcccccagagagacaaaagatacagatattgtggatgaagccatctattacttcaaggccaatgtcttcttcaaaaactatgaaattaagaatgaagctgataggaccttgatatatataactctctacatttctgaatgtctgaagaaactgcaaaagtgcaattccaaaagccaaggtgagaaagaaatgtatacgctgggaatcactaattttcccattcctggagagcctggttttccacttaacgcaatttatgccaaacctgcaaacaaacaggaagatgaagtgatgagagcctatttacaacagctaaggcaagagactggactgagactttgtgagaaagttttcgaccctcagaatgataaacccagcaagtggtggacttgctttgtgaagagacagttcatgaacaagagtctttcaggacctggacagtgaagggagcccgggcagccaccgtctccagagccctgggcagcattttccagcaagatgtacacaatcttttgcctttatttcgtaaagttttatacagaagagagaagagcatgtctttacttgaaaaactcttgatcaagaatttgggtgggagaaaagaaagtgggttatcaagggtgatttgaaattttctgcagcattaaagctggcgcttaataagaataagtaataataaagaaatttctaacattccaaaaaaaaaaaaaaaaaaaaaaaaaaaaa

SEQ ID NO: 700 - DNA, 2728 bp, human
atcttggcttcccggggaaaggcggcgtgaggggaagaagttgtagggtgggggcaggagtgaggaggagggaagagagagggggaggaggccgcggcggggcagggcggggactgcctgcctgcctgggttgcggaagtgatagccgccgaccgagcctgctgctttcttgctactgcttcggcttcccggctaccccccggacggtgaaggcggcccagctgtggatggtcagatagcccttgtctcccgccgccaatctctggcccctagcagcacggagcagacggcggcagcagcagcagcaggcgaggaggaagatggcgggacggctgccggcctgtgtggtggactgtggcacggggtatacaaaactaggatatgctggaaatacagaaccacagtttatcatcccttcctgtattgctattaaggagtcagcaaaagtgggtgatcaagctcaaaggagggtgatgaaaggtgttgatgacctagacttcttcattggtgatgaagcaatagaaaaacctacatatgcaacaaagtggccaatccgccatggtatagttgaagattgggacttaatggaaaggtttatggagcaagtgatctttaaatatttaagggcagaacctgaagaccattattttcttttgactgaacctccattgaatactccagaaaacagggaatatactgctgaaataatgtttgagtccttcaatgttccaggcttgtacattgctgtgcaggctgttcttgccttagctgcatcttggacctcaagacaagtaggagaacggacgttgaccggtacggtaatagacagtggagatggtgtcactcatgtcattcctgtggctgaagggtatgtgattggcagctgtattaaacacattccaatcgcaggacgagatataacatattttattcagcaactgctgagagaccgagaagtaggaatccctccagaacaatccttggaaactgctaaggcagtaaaggagcgctatagttatgtctgcccagatttagtaaaagaatttaacaagtatgatacagatgggtcaaaatggattaaacagtatactggaatcaatgctatctcaaagaaagagttttctatcgatgttggttatgagagatttttgggacctgaaatcttttttcatccagagtttgctaatccagactttacacaacctatctcagaagttgtagatgaagtaattcagaattgtcctattgatgtcagacgtcctctctacaagaatattgtcctctctggaggttcaaccatgttcagggactttggacgtcgcttgcaaagagatttgaaaagaactgtagatgcccggctgaaattaagtgaggaattgagtggtggtagattgaagccaaaacctattgatgtacaagtcattacacaccacatgcagcgatatgcagtttggtttggaggatcaatgctggcttccacgcctgagttctaccaagtatgccacaccaaaaaggattatgaagaaattggacctagcatttgtcgtcacaatccagtgtttggagtcatgtcgtaaaattggcttcatagttattggggttagggaggtggggaagagataatctttctgattacctgttttgtctggatggctggttttgaggttttaaacctgacttgaaatagtaacaccaaacatgattatacaggaatattttaataagtgtatcaccatgcagatgtagaagagagcgaaagtgattgtgtttttctttagattgaatatttgaatcttatgtgtaacaaaaagaagtgggttttagttctttctgtgccctgatattttgtatattaatgaattatccaagattcgatgggatttatcagtgtgtagatagctctataatgcttgaattgtacacttctaagtgtgcagtgcaagagcttgtttatatttcatactttttatactttgaggaaaaaaagtcaaagaaaaattgtatttgagggaaaaaaccatgaccaagtaaaggataaattcaaaaaatagcctcatgagacttggcatacacactcgtgggattccagttattatggagtgcttccatccctctccaccccttccccccaaaaggttttctttgcaagtgcttttggaactaagagctagtatcttggattaactgatgcctgctagtgctttctgattactcgcattctgtttcttgctttaaaagaagagtaaagacaagagtgttggaccagtattgcagttctgtagtgtcatttcttataaaaaacaaaacaacaacaataatttatcaaaattggcatatttaaagcctaacattctaataaaggcacaaatttctttttaatacttgtttcagcctctttaatctctttataagttaactaataaatctattttcttcagacttctgcaatagttctttaaaatcacaacagttagcaagctgacttttgtaatgtgctcaatacaaatacttgtgaacttttaatatgttgagtgctttcattttgataactggatctccatttgatattttcatttgtataactcatttgcagtctgaaaattttttttagtgccagtccctgaacatatcattgaaagttaattttctttgcattttaaaatatctggattatgaagaaaaagtgatgaaaataaattaaaactgaattacaaaaaaaaaaaaaaaa

SEQ ID NO: 701 - DNA, 1351 bp, human
ctgggaggctgacggcccgcgggcgtaagcggactgcagccgcgagctcctggaggcggcgggatggaggcggcggccgagcctggaaacctggccggcgtcaggcacatcatcctggtcctctcaggaaaggggggcgttgggaaaagcaccatctccacggagctggccctggcactgcgccatgcaggcaagaaggtgggaatcctggatgtggacctgtgtggccccagtatcccccgcatgctcggggcgcagggcagggctgtgcaccagtgcgaccgcggctgggcacccgtcttcctggaccgggagcagagcatctcgctcatgtctgtgggcttcctgctggagaagccggacgaggccgtggtgtggagaggccccaagaaaaacgcgctgataaagcagtttgtgtccgacgtggcctggggggagctggactacctggtggtggacacgcccccggggacctccgatgagcacatggccaccatagaagccctgcgtccctaccagcccctgggggccctcgtggtcaccacgccccaggcggtgtccgtgggggacgtgaggcgcgagctgaccttctgtaggaagacgggcttgcgggtgatgggaatcgtggagaatatgagcggcttcacgtgcccacactgcacggagtgcaccagcgtcttctccaggggcggcggagaggagctggcccagctcgccggggtgcccttcttaggctccgtgcccctggaccctgcgctcatgaggactctggaggagggccacgacttcatccaggagttccccgggagccccgccttcgctgcactcacctccatagcccagaagattctggacgcgacgcccgcgtgcctcccctgactaaggccaccttgcagccgctttccagggccaccaagggctctgctccagcctctcagagaaacagaggcctgggctcggttcccgggccctgcaggggcaggcccaggcagcgtccagccggagagcttctccccgaccagcccagccccaggatgtgtcgcaccagcagctctgcctggttggcctgcagtgccgtggtctgcgtgctctgcagctgtgagacgggggcggcctgggctctcttcccatccatgttgcctacctgtgcccctggcagccgcgtgtccacacagttagcggagcgcaggacttctgcagtcctcaggtgaccccgggcctccagcaccctgggtcgctgtcatctgtgtttagctcggggcatgctccctaagggggcgaactgacctcaggcatgtcttgtaactgtagaggcgcctgccattaaacgtgtccgctgctgtggcgacag

SEQ ID NO: 702 - DNA, 1253 bp, human
ggggggagggtgtttatcgcggctagagagatgtcgctgctgcggtcgctgcgcgtgtttctggtcgcgcggaccgggagctacccggctgggtctcttctgcgtcagtcgccccagccaaggcacacattttatgctgggccccgtctgtctgcctcggcctccagcaaggagctcctcatgaagctgcggcggaaaacaggctactcctttgtaaattgcaagaaagctctggagacttgtggcggggacctcaaacaggcagagatctggctccacaaggaggcccagaaggagggctggagcaaagctgccaagctccaagggaggaagaccaaagaaggcctgattgggctgttgcaggaaggaaacacaactgtattagtagaggtaaactgtgagacagattttgtttctagaaatttaaaatttcaactgttggtccagcaagtagcccttggaaccatgatgcattgtcagaccctaaaggatcaaccctctgcatacagtaaagtgcagtggctcacgcctgtaaacctagcactttgggaggctgaagcaggtggatcacttgagggtttcttgaattcctctgagctttctggacttccagctgggcctgacagagaaggctcactcaaggatcagttggctttagcaattggaaaactgggagaaaacatgattcttaaacgagctgcatgggtgaaggtgccatctgggttctacgttggctcttatgtccacggagcaatgcagagtccctcacttcacaagctggtgctggggaagtatggggccctggtcatctgtgagacgtctgaacagaaaacaaaccttgaagacgttggccgccgccttgggcagcatgtggtgggcatggcccccctctctgttggctccctggacgatgagcctgggggagaggcagagactaagatgctgtcccagccgtatttgctggatccctccattaccttggggcagtatgtgcagcctcagggggtgtcggtagtagactttgtgcggtttgaatgtggagaaggtgaagaggcagcagaaactgaataggttccagagacttttggcccaggaggaatatttacttttagctctggacatcattacaaaaaggaatatttcccaaacctcttcagaccgagaatgcatgggtaaaattattaaatagttgtataataaaaataattttttccttgtttgcacaaaaaaaaaaaaaaaaaaaaaaaaaaaaa

SEQ ID NO: 703 - DNA, 1424 bp, human
ctccctccgtccttgcctcccttacccaccctcaccggcccttgtttctccttcccctgggggcagccgccgccatgatcctgctggaggtgaacaaccgcatcatcgaggagacgctcgcgctcaagttcgagaacgcggccgccggaaacaaaccggaagcagtagaagtaacatttgcagatttcgatggggtcctctatcatatttcaaatcctaatggagacaaaacaaaagtgatggtcagtatttctttgaaattctacaaggaacttcaggcacatggtgctgatgagttattaaagagggtgtacgggagtttcttggtaaatccagaatcaggatacaatgtctctttgctatatgaccttgaaaatcttccggcatccaaggattccattgtgcatcaagctggcatgttgaagcgaaattgttttgcctctgtctttgaaaaatacttccaattccaagaagagggcaaggaaggagagaacagggcagttatccattatagggatgatgagaccatgtatgttgagtctaaaaaggacagagtcacagtagtcttcagcacagtgtttaaggatgacgacgatgtggtcattggaaaggtgttcatgcaggagttcaaagaaggacgcagagccagccacacagccccacaggtcctctttagccacagggaacctcctctggagctgaaagacacagacgccgctgtgggtgacaacattggctacattacctttgtgctgttccctcgtcacaccaatgccagtgctcgagacaacaccatcaacctgatccacacgttccgggactacctgcactaccacatcaagtgctctaaggcctatattcacacacgtatgcgggcgaaaacgtctgacttcctcaaggtgctgaaccgcgcacgcccagatgccgagaaaaaagaaatgaaaacaatcacggggaagacgttttcatcccgctaatcttgggaataagaggaggaagcggctggcaactgaaggctggaacacttgctactggataatcgtagcttttaatgttgcgcctcttcaggttcttaagggattctccgttttggttccattttgtacacgtttggaaaataatctgcagaaacgagctgtgcttgcaaagacttcatagttcccaagaattaaaaaaaaaaaaaaaagaattccacttgatcaacttaattccttttctttatcttccctccctcacttcccttttctcccaccctcttttccaagctgtttcgctttgcaatatattactggtaatgagttgcaggataatgcagtcataacttgttttctcctaagtatttgagttcaaaactcctgtatctaaagaaatacggttggggtcattaataaagaaaatctttctatcttaaaaaaaaaaaaaaa

SEQ ID NO: 704 - DNA, 2211 bp, human
cctgcgcggagggagccgcgagacaggtgcgcatgcgcagtgcgcgtctgcgagaccgacttggacggagccgagctgaggctcggcttcctgctgatggtcagggttttggcaactccccggtgtgagaggggtagggagtgctcccggcggcgacggggccgagttcaccagccgccggggcagtagtcgaaggcccggcgcggcatgtcctgggtgccgcggtgcgggcagtgaacgcgcgccgggcgggatgggccggcgccgggcgccagagctgtaccgggctccgttcccgttgtacgcgcttcaggtcgaccccagcactgggctgctcatcgctgcgggcggaggaggcgccgccaagacaggcataaagaatggcgtgcactttctgcagctagagctgattaatgggcgcttgagtgcctccttgctgcactcccatgacacagagacacgggccaccatgaacttggcactggctggtgacatccttgctgcagggcaggatgcccactgtcagctcctgcgcttccaggcacatcaacagcagggcaacaaggcagagaaggccggttccaaggagcaggggcctcgacaaaggaagggagcagccccagcagagaagaaatgtggagcggaaacccagcacgaggggctagaactcagggtagagaatttgcaggcggtgcagacagactttagctccgatccactgcagaaagttgtgtgcttcaaccacgataataccctgcttgccactggaggaacagatggctacgtccgtgtctggaaggtgcccagcctggagaaggttctggagttcaaagcccacgaaggggagattgaagacctggctttagggcctgatggcaagttggtaaccgtgggccgggaccttaaggcctctgtgtggcagaaggatcagctggtgacacagctgcactggcaagaaaatggacccaccttttccagcacaccttaccgctaccaggcctgcaggtttgggcaggttccagaccagcctgctggcctgcgactcttcacagtgcaaattccccacaagcgcctgcgccagccccctccctgctacctcacagcctgggatggctccaacttcttgccccttcggaccaagtcctgtggccatgaagtcgtctcctgcctcgatgtcagtgaatccggcaccttcctaggcctgggcacagtcactggctctgttgccatctacatagctttctctctccagtgcctctactacgtgagggaggcccatggcattgtggtgacggatgtggcctttctacctgagaagggtcgtggtccagagctccttgggtcccatgaaactgccctgttctctgtggctgtggacagtcgttgccagctgcatctgttgccctcacggcggagtgttcctgtgtggctcctgctcctgctgtgtgtcgggcttattattgtgaccatcctgctgctccagagtgcctttccaggtttcctttagcttccctgcttcctgggaatcaggagcctggacactgccatctctagagcagagtggaggcctggactccctttgctcactccattcgggtccacagctgaggttgcctctgacaagatgaatgggcactgcctgcccttctagtgaaaaggcttggctatggccctgtgtgactccaggtcccaggaaccttgccttcgtcatctgtggatccatccagaacagcggtatctgaagcccaggccatactccctgcctcctttcttctgcctaccagaggctccagagttgagcttgtccttatctagaaacatgtgaagatgcccaagagcctggaggcactgctgtccttcctgcagaaacagtttctcctcctcccctcagccttgtggccagttcctcttcacatgaagcccctggcatttgctggggaagggactggcctggtacttgctgttagggcaggaaggggcaaaaggaagacttgggtagtaatctgggggttcagatgggtagcactaagccagctggcctaaagatgcaataagttcctaggtagtctacccttaccttgaggaatgggaaaatgaacctcagcccattaggcaggaaaagttgatatttaataaacaaggaaagagtgaactgagaccccaaaaaaaaaaaaaaaaaaaaaaaaaaaaaaaaaaaaaaaaaaaaaaaaa

SEQ ID NO: 705 - DNA, 10709 bp, human
agggggcggcgctcccggcccatcccttagccccgcggcggccgtgtgggccggaggctgcctgcaccgcgtcagggaggccggcctagaaaccctccctcccagaagaaagccgatcccagttcaggtggggtcttcctcggttgcgtacctggctggagccgagctggtgggcggccggcagccggcgtttctggtgatgacagccccgaaatgaaagcagcgcggccgccgcctccgagggctgcagggagatcagcgtccagcaaataagaagcaagtcctggacccggaggaggaggagcggccgagcatctctctctgctccgccgtgtcctttagatgagcactcccggccggagccggaggtggatccgcagagctgcctctgggcgcctgaccccgcgctgacatcacaacctgtgacaggcgcatcacgcccggtacctgctcccggccgctgcccgtcctcccagcctctttgtatgccgcagacatggccagccagcaggattcgggcttctttgagatcagtatcaaatatttactgaaatcctggagtaatacttctcccgttggcaacggttacatcaagcctccggttccacctgcttctggcacgcacagggagaaagggccgccaaccatgctacccatcaatgtggacccagacagtaaaccaggagaatatgtcctcaaaagtttatttgtcaacttcaccactcaggctgaacgcaagattcgtatcattatggcagagcccctggaaaagccattgacgaaatctctgcaacgtggagaagacccccaatttgatcaggtcatcagctcaatgagctccctttctgagtactgcctgccttccattctacgtacattatttgactggtataaaaggcaaaatggcattgaggatgaatcacatgaatacagaccaagaacaagcaataaatcaaaaagcgatgaacaacagcgagattatttaatggaaagacgggacctcgccattgattttattttttctttagtattaatagaagttttgaaacagattccacttcatcctgtaatagacagtttaatacatgatgttattaacttggctttcaagcactttaaatacaaagaagggtaccttggtcccaacactggcaatatgcatattgtggcagacctgtatgcagaagtcattggagtgttggcacaagccaaattccctgctgtaaagaagaaatttatggcggagctaaaagaattacggcacaaagagcagaacccatatgtggttcaaagcattatcagcttaataatgggcatgaaattctttcgaattaagatgtatccagtggaggattttgaggcctctcttcagtttatgcaggaatgtgcacattacttcctcgaggtcaaagacaaagatatcaagcatgccttggctgggctttttgttgaaatacttgttccagttgctgctgctgttaaaaatgaagtaaatgttccctgccttagaaattttgtggaaagcctgtatgacaccacgctggaactttcttctcgaaagaagcattccttggccttgtaccccctggtgacctgtttgctctgtgtcagtcagaagcagctgttcctgaacaggtggcacattttcctcaacaactgcttgtccaaccttaaaaacaaagatcccaagatggctcgagttgcactggaatctctctacagattactttgggtttacatgattcgaattaaatgtgaaagcaacacagctactcagagccgacttataaccatcatcacaacacttttccccaaagggtcccgcggtgtggtaccaagggacatgcctctgaacatctttgtgaaaatcatccagttcattgcccaggaacgtttagattttgcaatgaaagaaatcattttcgattttctttgtgtgggaaaaccagcaaaagcattcagtctcaacccagagagaatgaacattggtttacgggcattcttggtcatagctgatagcttgcagcagaaagatggggaacctcccatgccggttacaggagccgttcttccttcaggaaacacgttaagagtaaagaaaacatatttgagtaaaacactaactgaagaggaagccaaaatgataggcatgtccttatattactctcaagtacgaaaagctgtagacaacattttaaggcaccttgataaagaagtaggaaggtgtatgatgctgactaatgtacagatgttaaacaaagaaccggaagacatgatcacgggtgagagaaagccaaaaatagatcttttcaggacctgtgttgctgctattcctcgactgcttcctgatgggatgtcaaaacttgaacttattgacttactggctaggctctctattcatatggatgatgaattgcgacatattgcacaaaattctcttcagggtttacttgttgacttctcagattggagggaagatgtactatttggctttaccaacttcctgctccgggaagtaaatgatatgcatcacacactccttgattcgtccctgaagttgctgctgcagctgctcacccagtggaaactagtcatccagacacaaggaaaagtctatgaacaagccaacaaaatcagaaattcagagctcatcgcaaatggctccagtcacagaattcagtcggaacgaggtccccactgcagtgtactccacgctgtagaaggttttgctctggttttactctgcagtttccaggtggccacacgcaaactgtccgttttaatactcaaggaaattcgagcgttgtttattgccctggggcagcctgaggatgacgacaggccgatgattgatgtcatggatcagctaagttcttccattctagaaagttttattcatgtagcagtttcggattcagcaacattaccactcacccacaatgtggatctgcagtggttggtggaatggaacgcagtcctggtcaatagccattatgatgtgaaaagcccttcccatgtctggatatttgcacagtctgtcaaagacccctgggtcctctgcctcttcagcttcctccggcaggagaacttacccaagcactgccccacagccctcagctatgcctggccttatgccttcactcggctccagtcggtgatgcctctggtggacccaaatagcccaattaatgccaagaaaaccagcactgccggcagcggagacaactatgttactttgtggagaaattacctaattctttgttttggagttgcaaaacccagtattatgagcccaggacacttaagagcttccactccagaaataatggcgaccacacctgatggtacagtgagctacgataacaaggccataggcaccccatcggtgggagttctgttaaagcagttggtgcctttgatgagactagagagcattgagatcacagagtccttagttttaggatttggaagaacaaattcccttgttttcagagaattggtagaagaacttcatccattaatgaaagaagctctggaaagaagaccagagaacaagaaacgccgagaacggcgagacttgttaaggctacaactacttcgaatttttgaacttttggctgatgctggtgtaataagtgacagcacaaatggagccctagagcgggatactttagccctgggagctttgttcttagaatatgtggacttgacccgcatgctcctagaagctgaaaatgacaaagaagttgaaattcttaaagatatccgggcacattttagtgcaatggtggccaacttgattcagtgtgttccagttcaccaccgaagatttctcttcccccagcaaagtctgaggcaccaccttttcatcttattcagccagtgggcaggacccttcagcattatgttcactcctctggatcgttacagtgacagaaatcatcagattacaagatatcagtattgtgcattaaaagcaatgtcagcagtactgtgctgtggccctgtctttgacaatgtgggcctttccccagatggctacctatataaatggcttgacaacattctggcttgtcaagatttacgagttcatcaacttggctgcgaagttgttgtcttgctactggaacttaatcctgaccaaataaatctttttaactgggcaattgaccgatgctacacaggttcctaccaacttgcatctggctgcttcaaagccatagcaactgtgtgtggaagcaggaactatcccttcgacatagtgacattgttaaaccttgttctattcaaggcctctgacaccaacagagagatttatgaaatctccatgcagctcatgcagatccttgaagcaaagctttttgtatactcaaagaaagtcgctgagcaaagaccgggaagtattctctatggaacacacggcccgctgccacccctctacagcgtgtcactcgccctcttgtcatgtgagctggccaggatgtaccctgagctcacactccccctcttctcaggtaagccagcgattccccacaacacaccccaacgggcgccagatcatgcttacctacctgctgccctggctgcacaacatcgagctggtggacagcaggctcctcctcccgggtcgagccccagcagcccagaggacgaagtcaaggaccgggaaggtgacgtgactgcttctcacgggctgagaggaaatggctggggctctccagaagccacgtcactggtcctgaacaacctcatgtacatgacggccaagtatggagatgaagttcctgggccagaaatggaaaatgcttggaatgctttagccaacaatgagaaatggagcaacaacctgaggatcaccttgcagttcctgattagcctctgtggggtcagcagcgacacagttctcctaccctatattaaaaaagtggcaatatacttgtgccgtaacaacaccattcaaaccatggaagagcttctctttgagctgcagcagacagaacccgtgaaccccatcgtccagcattgtgacaacccgcccttctaccgcttcacggccagtagcaaggcttccgcagcagcctcaggaaccacctctagcagcaatacagtggttgctggccaggaaaatttcccagatgctgaggagaacaagatattgaaagaatctgatgaaaggtttagtaatgtcatcagagcccacactcgcctcgagtcaagatacagcaatagctctggaggatcctacgatgaagataaaaatgatccaatttctccctacacgggctggttgctgactattacagagaccaagcagccgcagcccttaccgatgccttgtactggaggatgctgggcccccctggttgactatctcccggagaccatcactccccgggggccactccacaggtgcaatattgctgtaatttttatgactgaaatggtggtggatcacagtgtacgagaagactgggcgcttcatctaccattattacttcatgctgtcttcttaggtttagaccactaccggcctgaagtctttgaacacagcaaaaaactgcttcttcacctcttgattgccctctcttgcaacagcaatttccattccattgcttccgtgctcctgcagacccgagagatgggtgaagctaagactctaaccgtgcagccagcctaccaacctgaatatctctatacaggtggctttgacttcctgagagaggaccagtcatccccggtgcctgactcagggcttagttcaagctccacctcctctagcatcagtctgggaggcagcagtggaaacctcccacagatgacccaggaggtagaagatgtggacacagctgctgaaacagatgagaaggcaaacaagctcattgagtttctcacgaccagggcatttggtccactttggtgccatgaagacatcacacctaaaaatcaaaattcaaagagtgctgaacagctcactaattttctacgtcacgttgtatctgtatttaaagattccaaatcaggcttccatctggagcaccagttgagtgaagttgcattgcagacagccctcgcaagctcttcaaggcactatgctggtcggtccttccagatattccgggccctcaagcaacctctgtcagcacatgccttatctgaccttctctcaagattggtggaggtgataggagaacatggagatgagattcagggttatgtaatggaagcgctcctaaccttggaggcggctgtggataacttgtctgactgcttgaagaacagtgacctcctaactgtattgtcccgctcttcctcaccagatttaagctccagcagtaaactaacagcaagcagaaagagcacaggacaactaaacatgaacccgggaaccaccagcggcaacaccgcaactgccgaacggagccggcatcaacgaagcttctctgtgcccaagaagtttggtgtcatcgaccgatcctctgacccacctcgaagtgccacactggacagaattcaggcttgtacccaacaaggcctctcctcaaaaaccagaagctcatcctccttgaaggacagtctcacggacccatcccacataaaccatcccaccaacctgctggccaccatattctgggtcacagtggccttgatggagtctgattttgagtttgaatacttaatggccttaaggctgttgagcagactactggcacatatgccactcgataaggctgagaaccgagaaaagcttgagaaactccaggcacagctgaagtgggccgacttctccgggctgcagcagctgctgctgaaaggattcacatccctcaccaccacagacctgaccctgcagctcttcagtctgctgacaccagtgtccaaaatatccatggtggatgcatcccacgctattgggtttccactgaatgtcttgtgtctcctgcctcagctgattcagcattttgaaaatcccaatcagttctgtaaggatatagccgaaaggattgctcaggtttgtttagaagagaagaaccccaaactttcaaatcttgcacatgtcatgactctttataaaacgcacagctacacgagggactgtgccacgtgggtcaatgtggtctgtcgataccttcatgaagcatatgctgacattaccttgaatatggttacctacctggcagagctgctggagaagggcctccctagtgtgcagcagcccctgctccaggtgatctacagtcttctcagctacatggacctttctgtcgttcctgtcaaacagttcaatgtggaagttctgaagacaattgaaaaatatgtgcaaagtgttcactggagagaagctctgaatatcttgaagctggtagtttctcggtcagccagccttgttttaccttcataccagcacagtgacctctcaaaaatagaaatacatcgagtgtggactagtgcttccaaggaattacctgggaaaaccctggacttccacttcgatatttcggagactccaatcatcgggaggcggtatgatgagctgcagaattcttctgggcgtgatgggaagcccagggccatggccgtcacccggagcacatcttccacttcctcaggctccaactccaacgtccttgttccagtgagctggaaaaggccccagtattctcagaagagaacaaaagagaagttggtacatgtcctttctctgtgtggccaagaagtaggattgagcaaaaatccatcagtgattttttcatcgtgtggggatctggatctgcttgagcaccagacaagcttggtatcttctgaggacggtgcccgagagcaggagaacatggatgacacaaacagcgagcagcagtttagagtcttcagagacttcgacttcctagatgtggagctggaggatggagagggtgagagtatggacaatttcaactggggagtgcgcagacgttctctggacagcctggataagtgtgatatgcagattctggaggagcgccaactgtcaggaagcactcctagcctgaataaaatgcaccatgaggactccgatgaatcatccgaggaggaggacctcacagccagccagatcctggagcactcagacctaatcatgactctctccccctctgaagagacgaatcccatggagctgctcaccacagcctgtgactcgacccctgcagaacctcattcctttaacaccagaatgtccagctttgatgcttccttgcctgatatgaataatctgcagatttctgagggttcaaaggctgaagctgttcgtgaggaggaggacaccaccgtgcatgaggatgatctttctagttccatcaatgaactcccagcagcttttgaatgcagcgacagctttagcctggacatgactgagggggaagaaaaaggcaatcgggcactggaccagtttaccctggcgagctttggagaaggtgacaggggagtctctccccctccctcgcccttcttctcagccatccttgccgcctttcagcccgcagcctgtgacgatgccgaggaggcctggcgcagccacatcaaccagcttatgtgtgactcagatggctcctgtgctgtgtatacatttcatgtgttctcctccttgtttaagaatattcagaaaaggttctgcttcctaacctgtgatgcagccagttaccttggagataacctccggggaatcggatccaaatttgtcagctcttcccagatgctcacctcctgctctgaatgtcctacactttttgtggatgccgagactctcctttcatgtggacttctggacaagctcaagttcagtgtgttagaactgcaagaatatttggatacctacaacaacaggaaagaggccacactctcttggcttgcaaattgtaaggcaacatttgcagggggatcaagagatggagtaattacctgtcaaccaggggactccgaagaaaagcaattggaactgtgtcagagattatataagctacacttccagctgctattgctttttcagtcctactgtaagctcatcggccaggtgcacgaagttagctccatgccagagctgctgaatatgtccagggaactgagtgacctaaagaaacacctgaaggaagccagtgcagtcattgcagctgaccctctctattcagacggcgcgtggtccgagcccaccttcacgtccactgaagcagccatccagtccatgctggagtgcctgaagaacaacgaactcggcaaagctttgcggcagatcagggagtgcagaagtctgtggcccaatgacatctttggaagcagttctgatgatgaggtccagacactactgaatatttatttccgtcaccaaactctgggacagacgggtacttatgccctggtggggtctaaccagagcctgaccgagatctgcaccaagctgatggagctgaacatggagatccgggacatgatccgcagggcccagagttaccgagtcctcactacttttcttccagactccagtgtttctggcactagtctctgacaggagcctcctgtccccactgggttccaaactgcagtgctgccatgctggggcaacgtcattcagtgtcttctcggccttcaaaaggcttggacagactgttctccctcttgttacctgtagggctttttctaaagaggatggcagaacttccaacgtgtagcaatactataagaaccaaggtagcttagaacgtcctggacagactccactcatcatgctgtgtggcacaaatgtgttacatttgaccgagcatatgcaactcgctactgaagaagtgacttccgttgcataccaaagccgactacactgaacagtaccttcctttctagaaacaattttagattggcaaaagtgcaatgttttcttcactcaaaaaattttatattctcaaacatgtatattctttccctgtcttgttccattttcttttcttttttcttttttctttttcctttctttcgtgggctgagaaaggggcaggcaaaatgaagctggccactgaaaactgtaagatggtcaaaagctgacagcctgtgtatgtgaaaagggaattgtaaatggactgcaatgtaatgtacactgtaatttgaatacaattactgtatctaaaaggagctgctatgaagtacctttcttatgttgctaggctactgtttctgaaagccctggatctctttgcaccaaaaatggtccagatagactctttttaaggatcttggctgctttttactagaaggttgcttttatgagcatatttatactgctgaaggatgagtgttaattttaattaactttgccgttttgtagagaaaactattcacaagataaattccaagtcttttcacctgtcaggcatgcatattttaatatctgtttggatagtcagaagtagaatcataaaggtaaaatatgagttgttactttgtttcttcgatgtcatattttatgtgtaatatatatgtaaagggccattcttaagttctctccttaaacttaatgctgtcaagtgttagatgtgtgcatgtgaacttgttgcactgcagaaacatattcagagtttatctatgtaacttattcactctgtaaatacatttaaagtttttgtgatgtaagcttaattgatattctgttcagaactttctttagactaaaaaaaaaaaaaaaagacaaa

SEQ ID NO: 706 - DNA, 2344 bp, human
ggcccgcccccgcgcggccgcccctcggaccaccggactggcctggggcgggacgtgggcgcgggggcgcggcgtgcggcacgctgcagggctgaagcggcggcggcggtggggactgcacgtagcccggcgctcggcatggctctcctggtgctcggtctggtgagctgtaccttctttctggcagtgaatggtctgtattcctctagtgatgatgtgatcgaattaactccatcgaatttcaaccgagaagttattcagagtgatagtttgtggcttgtagaattctatgctccatggtgtggtcactgtcaaagattaacaccagaatggaagaaagcagcaactgcattaaaagatgttgtcaaagttggtgcagttgatgcagataagcatcattccctaggaggtcagtatggtgttcagggatttcctaccattaagatttttggatccaacaaaaacagaccagaagattaccaaggtggcagaactggtgaagccattgtagatgctgcgctgagtgctctgcgccagctcgtgaaggatcgcctcgggggacggagcggaggatacagttctggaaaacaaggcagaagtgatagttcaagtaagaaggatgtgattgagctgacagacgacagctttgataagaatgttctggacagtgaagatgtttggatggttgagttctatgctccttggtgtggacactgcaaaaacctagagccagagtgggctgccgcagcttcagaagtaaaagagcagacgaaaggaaaagtgaaactggcagctgtggatgctacagtcaatcaggttctggcctcccgatacgggattagaggatttcctacaatcaagatatttcagaaaggcgagtctcctgtggattatgacggtgggcggacaagatccgacatcgtgtcccgggcccttgatttgttttctgataacgccccacctcctgagctgcttgagattatcaacgaggacattgccaagaggacgtgtgaggagcaccagctctgtgttgtggctgtgctgccccatatccttgatactggagctgcaggcagaaattcttatctggaagttcttctgaagttggcagacaaatacaaaaagaaaatgtgggggtggctgtggacagaagctggagcccagtctgaacttgagaccgcgttggggattggagggtttgggtaccccgccatggccgccatcaatgcacgcaagatgaaatttgctctgctaaaaggctccttcagtgagcaaggcatcaacgagtttctcagggagctctcttttgggcgtggctccacggcacctgtaggaggcggggctttccctaccatcgttgagagagagccttgggacggcagggatggcgagcttcccgtggaggatgacattgacctcagtgatgtggagcttgatgacttagggaaagatgagttgtgagagccacaacagaggcttcagaccattttcttttcttgggagccagtggatttttccagcagtgaagggacattctctacactcagatgactctaccagtggccttttaaccaagaagtagtacttgattggtcatttgaaaacactgcaacagtgaacttttgcatctcaagaaaacattgaaaaattctatgaattgttgtagccggtgaattgagtcgtattctgtcacataatattttgaagaaaacttggctgtcgaaacatttttctctctgactgctgcttgaatgttcttggaggctgtttcttatgtatgggttttttttaatgtgatcccttcatttgaatattaatggctttttccattaaagaataaaatattttggacaatgccgataaatgtatgaagttagtatccacatcataaattcagagtgatgtttagcagtaaatcaatattttgaagtgatacacagatgtctttcctccccacaaacttttttaaacaaaaaacaagacctcttttctttagatggtgccacctatgcccaccacaacagagattttacatggaaaccgggctcagtgagaactgatttcctgcccaatatttgtctttgggctgtctctagtgactaattattaaggaatctagctggttatacagttcaaggctttctatgttgttaatgaacctcaaaatagccgttaagacatgaaatacagcagcaggttaccaatgcgaacaggtagttcgcatttatgtaaaacattcagaaaatgaagttttgaatttgttggaacattcaaaggacttgagagcattttattgtaacttaaaaaaataaatacaactgtcactaaaaaaaaaaaaaaaaaa

SEQ ID NO: 707 - DNA, 1314 bp, human
tttccggccgcggtatgaggggcggggccggggctgctgtgggagagttcggttgctgcggcggggcctgcacgttgactgtgggaaactcggaaacaagctcacatcttcctgtgggaaaccttctagcaacaggatgagtctgcagtggactgcagttgccaccttcctctatgcggaggtctttgttgtgttgcttctctgcattcccttcatttctcctaaaagatggcagaagattttcaagtcccggctggtggagttgttagtgtcctatggcaacaccttctttgtggttctcattgtcatccttgtgctgttggtcatcgatgccgtgcgcgaaattcggaagtatgatgatgtgacggaaaaggtgaacctccagaacaatcccggggccatggagcacttccacatgaagcttttccgtgcccagaggaatctctacattgctggcttttccttgctgctgtccttcctgcttagacgcctggtgactctcatttcgcagcaggccacgctgctggcctccaatgaagcctttaaaaagcaggcggagagtgctagtgaggcggccaagaagtacatggaggagaatgaccagctcaagaagggagctgctgttgacggaggcaagttggatgtcgggaatgctgaggtgaagttggaggaagagaacaggagcctgaaggctgacctgcagaagctaaaggacgagctggccagcactaagcaaaaactagagaaagctgaaaaccaggttctggccatgcggaagcagtctgagggcctcaccaaggagtacgaccgcttgctggaggagcacgcaaagctgcaggctgcagtagatggtcccatggacaagaaggaagagtaagggcctccttcctcccctgcctgcagctggcttccacctggcacgtgcctgctgcttcctgagagcccggcctctccctccagtacttctgtttgtgcccttctgcttcccccattcccttccacagctcatagctcgtcatctcggcccttgtccacactctccaagcacattacaggggacctgattgctacacgttcagaatgcgtttgctgtcatcctgcttggcctggccaggcctggcacagccttggcttccacgcctgagcgtggagagcacgagttagttgtagtccggcttgcggtggggctgacttcctgttggtttgagcccctttttgttttgccctctgggtgttttctttggtcccgcaggagggtgggtggaacaggtggactggagtttctcttgagggcaataaaagttttcatggtgg

SEQ ID NO: 708 - DNA, 1741 bp, human
agcggagcgcggaggccgctgggacgcggttcagctcattccctgaggccggcccgcgtcccgtcaggcgccgcgcggggttagcgcggggtcagcggaggtcagcgggggtcagcagcagcggctccgagggcgcggcggacgcaggatgtacacgctgctgtcgggcttgtacaagtacatgtttcagaaggacgagtactgcatcctgatcctgggcctggacaatgctgggaagacgaccttcctggagcagtcgaaaacccgatttaacaagaactacaaggggatgagtctatccaaaatcaccaccaccgtgggcctaaacatcggcactgtggatgtgggaaaggctcggctcatgttctgggacttaggagggcaggaagagctgcagtctttgtgggacaagtattatgcggagtgtcacggcgtcatctacgtcattgactccaccgacgaggagaggctggctgagtccaagcaggcgtttgagaaggtggtgaccagcgaggcgctgtgcggtgtccccgtcttggtgctggccaacaagcaggatgtggagacgtgcctctcaatccctgacatcaagacggccttcagcgactgcaccagcaagatcggcaggcgagattgcctgacccaggcctgctcggccctcacaggcaaaggggtgcgcgagggcatcgagtggatggtgaagtgtgtcgtgcggaatgtgcaccggccgccgcggcagagggacatcacgtaggcgcagccgcgctgccgtcgggacggctggtcccctggtgctggaggagtggcctcctgttggctcccatgctgctgatctggggggtgggtttgctttgctttggggttcttctatttactttgttttctcgaagacaaactttcctctatgtctggaaaagcgtaggcatccggaggctttggaggggagtctggcagcccggctggcccaggccctgcagcggcagcctttccacagggcgcagcggcggcctttcgaggccctttctggggggtctgagggagacctggttgggaattggggctccagtgctcaggctggcttgggctgcatgaggacagccctgtgggaccctcgggagaccccgtggctgtctccgccccatcgaggaggaggcccgtcagccatggctgccatctggcttctgccctgtgaccccgtgaccccgtgaccccggaagtggtctggggctgatcttgccttgaggaagacccaggccatgttcccaaaggccagcgggggccctggattgtgatgcagcctcgggacagggctgaggcctgcgggggaagacctataccccacgcctgggcctggcttcacctcaccctaatcccccgggagggagctgactgatgcaaaaagctgagggggcctgctgggagtggctgtttttatgccccagccccgcaagttggggagtgtttgtgggggtccagagccctcccccagccaggagagaacctcccggaggggttctctgtggggccctgtgtcccctgctcgggagtaaggctggtcctggggtcctccctgcacggaccccactgggcctgccgagtgctgtgttcttcctcagtctggctgtgggcaggagcggcctgcccagtgtcacccagggtgagtgcaaaataaagacggcgagtgtggctctgtccatcccttccctcctggagggtggaggctcctggctgttggacacgg

SEQ ID NO: 709 - DNA, 2044 bp, human
ctggacgagtccgagcgcgtcacctcctcacgctgcggctgtcgcccgtgtcccgccggcccgttccgtgtcgccccgcagtgctgcggccgccgcggcaccatggctgtgtttgtcgtgctcctggcgttggtggcgggtgttttggggaacgagtttagtatattaaaatcaccagggtctgttgttttccgaaatggaaattggcctataccaggagagcggatcccagacgtggctgcattgtccatgggcttctctgtgaaagaagacctttcttggccaggactcgcagtgggtaacctgtttcatcgtcctcgggctaccgtcatggtgatggtgaagggagtgaacaaactggctctacccccaggcagtgtcatttcgtaccctttggagaatgcagttccttttagtcttgacagtgttgcaaattccattcactccttattttctgaggaaactcctgttgttttgcagttggctcccagtgaggaaagagtgtatatggtagggaaggcaaactcagtgtttgaagacctttcagtcaccttgcgccagctccgtaatcgcctgtttcaagaaaactctgttctcagttcactccccctcaattctctgagtaggaacaatgaagttgacctgctctttctttctgaactgcaagtgctacatgatatttcaagcttgctgtctcgtcataagcatctagccaaggatcattctcctgatttatattcactggagctggcaggtttggatgaaattgggaagcgttatggggaagactctgaacaattcagagatgcttctaagatccttgttgacgctctgcaaaagtttgcagatgacatgtacagtctttatggtgggaatgcagtggtagagttagtcactgtcaagtcatttgacacctccctcattaggaagacaaggactatccttgaggcaaaacaagcgaagaacccagcaagtccctataaccttgcatataagtataattttgaatattccgtggttttcaacatggtactttggataatgatcgccttggccttggctgtgattatcacctcttacaatatttggaacatggatcctggatatgatagcatcatttataggatgacaaaccagaagattcgaatggattgaatgttacctgtgccagaattagaaaagggggttggaaattggctgttttgttaaaatatatcttttagtgtgctttaaagtagatagtatactttacatttataaaaaaaaatcaaattttgttctttattttgtgtgtgcctgtgatgtttttctagagtgaattatagtattgacgtgaatcccactgtggtatagattccataatatgcttgaatattatgatatagccatttaataacattgatttcattctgtttaatgaatttggaaatatgcactgaaagaaatgtaaaacatttagaatagctcgtgttatggaaaaaagtgcactgaatttattagacaaacttacgaatgcttaacttctttacacagcataggtgaaaatcatatttgggctattgtatactatgaacaatttgtaaatgtcttaatttgatgtaaataactctgaaacaagagaaaaggtttttaacttagagtagccctaaaatatggatgtgcttatataatcgcttagttttggaactgtatctgagtaacagaggacagctgttttttaaccctcttctgcaagtttgttgacctacatgggctaatatggatactaaaaatactacattgatctaagaagaaactagccttgtggagtatatagatgcttttcattatacacacaaaaatccctgagggacattttgaggcatgaatataaaacatttttatttcagtaacttttccccctgtgtaagttactatggtttgtggtacaacttcattctatagaatattaagtggaagtgggtgaattctactttttatgttggagtggaccaatgtctatcaagagtgacaaataaagttaatgatgattccaaaaaaaaaa

SEQ ID NO: 710 - DNA, 1556 bp, human
ggcgtccaaggtgatatcgcgcgaggttcgcagccaataaggaggcggatgtgacggcccgtttgcagccgccggcagctactgcaaggcaaaagccggagtggacgtgtcttttgaaactgctgctctttcacttctcaggcgtcaccgagagctcagcacccaggctgaactctgtaccatttggaagaatggaagctgatgcatctgttgacatgttttccaaagtcctggagcatcagctgcttcagactaccaaactggtggaagaacatttggattctgaaattcaaaaactggatcagatggatgaggatgaattggaacgccttaaagaaaagagactccaggcactaaggaaagctcaacagcagaaacaagaatggctttctaaaggacatggggaatacagagaaatccctagtgaaagagacttttttcaagaagtcaaggagagtgaaaatgtggtttgccatttctacagagactccacattcaggtgtaaaatactagacagacatctggcaatattgtccaagaaacacctcgagaccaaatttttgaagctgaatgtggaaaaagcacctttcctttgtgagagactgcatatcaaagtcattcccacactagcactgctaaaagatgggaaaacacaagattatgttgttgggtttactgacctaggaaatacagatgacttcaccacagaaactttagaatggaggctcggttcttctgacattcttaattacagtggaaatttaatggagccaccatttcagaaccaaaagaaatttggaacaaacttcacaaagctggaaaagaaaactatccgaggaaagaaatatgattcagactctgatgatgattagagctcaataattctttgtaaattgtctttttttttctgcttcagatttaaatgtgtttttaaaattctattaatgtctatacattggtcacctaaatactcatattctcgagttttatacagttgtatcacatcgaaaagtgtctttactgttttctgtgtggccatcatgtttaagttgaggaaaactcagttcttaaattatctgggaagggtctggattctctatttttgagattgactttatcacaatatgattcttacatctttataccatttacaattgtgttttagatctacagagttagaaattcgaaaactattccaggactaattcttaatcggcattatttatacaagaggtcaagtaacatttactagcgcaatactgcacttgtaaatgaattataaacgctcttctggaatatatttaaataaccattaaagaactgcttattcattctggacactgcatgttgatgttgaatcaactgatgccagcagaaagctattttgatttgtgaacatactgccttatttaaagggtcctgattgcttgtattttaagacattcattaaaaagaaaccaggaaacacttttgaaataacagcataaggaacttcactgtctctgctcaataaaatacctgtaactggaaaaaaaaaaaaaaaaaaaaaaaaaaaa

SEQ ID NO: 711 - DNA, 3189 bp, human
ggcgtgagcggcgaaagccgggagggcgagcgagagagcaagcaggcagcaggctgccggcgggcgggcggacggcacagagggagggagcgagcgagcagtgagtaagccagcaagggcggtcgggtcccgaggtcagccgagatttctcaggtccctccggccccctccctggagtccacagcgcctccggtgtccagaggatcggacacggcccggcccggccatggcctcgttgctgaaggtggatcaggaagtgaagctcaaggttgattctttcagggagcggatcacaagtgaggcagaagacttggtggcaaattttttcccaaagaagttattagaacttgatagttttctgaaggaaccaatcttaaacatccatgacctaactcagatccactctgacatgaatctcccagtccctgaccccattcttctcaccaatagccatgatggactggatggtcccacttataagaagcgaaggttggatgagtgtgaagaagccttccaaggaaccaaggtgtttgtgatgcccaatgggatgctgaaaagcaaccagcagctggtggacattattgagaaagtgaaacctgagatccggctgttgattgagaaatgtaacacggtcaaaatgtgggtacagctcctgattcccaggatagaagatggaaacaactttggggtgtccattcaggaggaaacagttgcagagctaagaactgttgagagtgaagctgcatcttatctggaccagatttctagatattatattacaagagccaaattggtttctaaaatagctaaatatccccatgtggaggactatcgccgcaccgtgacagagattgatgagaaagaatatatcagccttcggctcatcatatcagagctgaggaatcaatatgtcactctacatgacatgatcctgaaaaatatcgagaagatcaaacggccccggagcagcaatgcagagactctgtactgaggccagggccagggccaggggactctgtgagtctggctcaagaccgacattgccttggtttgttacatgactatcgtgatggggaaactggctggaaatagtaatcacacctctctgtttttagttagagtctaatgaaactctcatctagttctgtgatgtgtttacctcttttttcaggcctcaggaactcttctatttccttccctaataccccacacccaacctgtcgtaatttctggagaactccaggtttgtgtgtgcaggatgttggcacaaaaatacctgtgttttcattctccccctctctccctcctgtgtcttgcgctttatgttttcttccgtttgataattagttggttaaaagctgagggaaccggaaggaaagtgctaggtgttttttaggaactagggtggcggggggacgaacttctcttcctcacatgaggttactgtttctttcctctgtggggcattggatcctcccacagttgccctggtgatgacttagggcttcccatctgtgtacatcccactttgaatcttgatcgtgacaagaaataccttaggccttcagtcaattccgaagctccttcagttgtttttataatgggcgttttcacatgcacatatgtgtatgcatgtatacgcccatacagacatgcacacacagactcctactccattagctaacataccctccctctccacaacccctgtcacatacctttcaggaggtgacagttgtcttagttgtcatctacccagacaaacgtcctgggcccgtcctccctcctgatactgtagcctcttggtacccagggtgagttggtggagaacagagagatgagaagcagagggcttggggaaagcctgttcctctctgactcagccctttttggcattattgcaagagcttgactcctggttgccttttcccagccagttttcagttggggtgaaggtttctgcaagtgtgaggtccagatgctgctgctcatgttgggctttccttttgggaactatttctctttatttatagtgtcgggcttccggggaaagcaatcattggtgtgtatgtgtatgtgcatgcacacacgtgcatatacacatttgtgtatgtggaaatgtgctgggcaagtcaaaactatagaagagttgcctcctgtctctcgaatcttccagagatatcacttaattgttaacagcttttgtgttaatccccttcagcccctagctcttttattctaccacggctggagagttgatacctgcagtcagcctgccagtgactcttagtgtctgtttctgacttatttttcctgtctctgtcttccaacccccaataatatttccaccggggatgcatcatttttactcccaatattctgtagagagggagtcaggatgctgtcttcccacgaatagtactcagtaacaaaccaattgcattttagttgggcagtgctcccacccaccctccagatcccttccagctaaaacccttcccccttccctccatgtgtttctcagtttcccgtttcgtttgttggactgttccactgcccctcctcctcaccctatcacccatggatcgtaatgtaaaattcttttaccatgtcaagaaattattaaaaatacaggtactttgacctctttctaaagccgcagaccctggtgcaatgctctggtggctagggatgtactcatgctcatatgtgtgcacgcttggacacccacctccatggacacctagccaccctgttgtgtgtccttatgccagttgagctgaatcttttccccagtatagtggaaagactgaggcttctgcctactgagcaaggttgggtgcttcatttgtgttcagtctgaattatgggaaagttagctcttcccagacctaagctgccttctctccctactttcagaagatcctagttccttccttcccgagtgatacccatgaactgccagtagaggctgctatcgttccatgtgtaaggaatgaactggttcaaggcgcgtcctacccagtcattttctttaccttatactaattcttcctgaataatgtcttcagtttcttgaggagactcctagttttggttttcaaattacttggagggctgcctaggaatctatctccctctgaaataaagtttcctcatcttccaccttgcaaaaaaaaaaaaaaaaaa

SEQ ID NO: 712 - DNA, 4163 bp, human
gagggagtgaaatgcttaattcaggaatggattttggagtttctgggtgctgaagaaatagggcctttccgcctgcgggcccagtgagtcgacacggtgggggcccgcgatccccgggacttaccactgaataaatccagtccagcgtgcgacgacttactggcttcatggggtcgcagccgccgctggggtctccgctgtctcgcgaggagggtgaagcgcccccgcctgctcccgcttcggagggtaggcggagaagtcgccgggtacgccttcgcggatcctgccgacaccgacctagctttctgggctgccgggagctcgcggcgagcgccccagccaggcctgcgccggcatcctccgagataatggcatcagctgctaaggaatttaaaatggacaacttttcacctaaagctggcactagcaaattgcaacagacagtaccagctgatgcatctcctgattctaagtgtcctatatgcttggatagatttgataatgtgtcttacttagatcgctgcttacataagttctgttttcgctgtgtacaggagtggtcaaaaaacaaagctgaatgcccactatgtaaacagccctttgattctattttccattctgtgagggcagaagatgacttcaaggagtatgtcctaaggccttcgtataatggttcttttgtcacccctgatcgacgatttcgctaccgtacaactctgacaagggaacgaaatgcttctgtgtattcacctagtggtcctgtgaacagaagaacaacaactccaccggatagtggagtactgtttgaagggttaggcatttcaacaagacctagagatgttgaaattcctcagtttatgagacagattgcagtaaggaggccaactacggcagatgaaagatctttgcggaaaattcaagaacaagatattattaattttagacgaactctttatcgtgctggtgctcgagttagaaatattgaagatggtggccgctacagggatatttcagctgaatttttccgtagaaatccagcttgccttcacagattagtcccctggttaaaacgtgaacttacagttctttttggagctcatggatctttagtgaatattgtccagcatattatcatgagtaatgttactcgctatgacttggagagtcaggcatttgtgtctgatttaagaccatttttacttaatcgaactgagcattttatacatgaatttatcagttttgcccgatctccttttaacatggcagcctttgaccagcatgccaattatgattgccctgctccttcatacgaagaaggcagccattctgattcttcagtcataacaatatctccagatgaggctgagacccaagagctggatattaatgtagccactgttagtcaggcaccatgggatgatgaaactccaggaccatcttactcaagctcagagcaggtacacgttactatgtcttctcttttaaatacttctgacagttcagatgaagaacttgtcacaggaggagccacgtctcagatacaaggagtacaaaccaatgacgacctaaataatgacagtgatgattcttcagataattgtgtcattgttgggtttgttaaaccactagctgagaggaccccagaacttgttgaactgtcctctgattctgaggacttaggttcttatgagaaaatggagacagtgaagacacaagaacaggagcaatcttacagttctggtgatagcgatgttagtagatgctcatctccacactctgtccttggaaaggatgaacaaataaataaaggtcattgtgattctagtacaagaatcaaatcaaagaaggaagagaaacgatctacatcattgtcatctcccagaaacctgaactcatctgtaagaggagacagagtatattctccatataaccatagacacagaaagaggggaagatcaagaagttcagattcacgttctcagagtagaagtgggcatgatcagaagaatcatagaaagcatcatgggaagaaaagaatgaaaagtaaacgatccagaagcagggaaagtagcagacctagagggagaagagacaaaaagagatcaagaactagagatagcagttggtccagaagaagccaaactctgtctctaagtagtgaaagcacaagcagatcaaggtctcgtagcagtgatcatggtaaaagaagatcacggagcagaaatagagatcgttattatttaagaaataattatggaagcagatacaaatgggagtatacttattacagtagaaacaaggacagggatgggtacgaatcatcttacaggaggaggactctgtccagagctcattattctagacagtcttcaagtccagaatttagagttcagtccttttctgaaagaacaaatgctaggaaaaaaaataatcacagtgagaggaagtattactactatgaaaggcacagatcaaggagcctgtctagtaacagatcaaggactgcatctaccgggactgaccgggtgagaaatgaaaagcctggagggaaacgaaaatacaaaacacggcatttggagggtactaacgaagtggctcagccatctcgtgaatttgcttctaaagcaaaggacagtcattaccaaaaatcttcatcaaaattggatggaaactacaaaaatgagagtgataccttttcagacagccgatcatcagacagagagacaaaacacaaaaggagaaaaaggaagacccggagcctaagtgtagagatagtttatgaaggaaaagctactgatacaactaaacaccataaaaagaaaaagaagaaacataagaagaagcataagaaacaccatggagataatgcttcacgttccccagttgtaattaccattgacagtgacagtgataaggattctgaagtaaaggaggatacagaatgtgacaatagtggtcctcaagaccctctacaaaatgagtttttggctccttccttggaaccatttgaaactaaagatgtagttacaatagaagctgaatttggtgtgctggacaaggaatgtgatattgccacacttagtaacaacttgaataatgccaacaaaactgtagataatattccacctctggcagcttcagttgaacaaactctcgatgtaagagaagagagcacctttgtttctgatttggagaaccagcccagtaacattgtgtctcttcaaactgagccatcaaggcaattgccatcgccacggacatcattaatgtcagtatgtcttggtagagactgtgatatgtcttaaaactgccaaagcatttcattgagaattatgatgttataaaaaggaaaaaggaagaatgtcgtctactgcagtctatttaaagatgacatttggtgaaaactctcttcctccttacaatattttaaatgattttttttttggtgttaatttgtaaaaatcattatttgttcaaaatgtatgtcccaccctcaaagatatgcacttttaagtgaagaaaatgatactgctagcagcttatttaaaacttggggtcctttttaaataagaaaaattatataaattttagaagttatttcataaagccatacggtattgacatatttttaaggtagtcaatgagtatttttgaattttttttttttgagagttattctggaaatgtgttataagctaggagaatccctttggacagtctttatttttcttcttaaaaatttatatgattcaaaaccatttcttcaggttaaattgaggcattttaatctgcacagtttatcttctgccaaaataaaaatttactatttcctttatatacttgtttatctggactgccagtaaaacaaatgtgtattcaacaaaagaaaaaaaataaaacagtaacactttaaaacaagaatcagacattttcctatgcagtatttttttttaaagtttattttagtaaagttaaaatcttgaaagtagctaagggcataattatgtcataaatactgaacttcaggtgaacaaatactttatagttttaattattttctttgattttgaggagtatcttatttgctttctatcatcagtaaaaacagcatttaacttgctaaataaacatgaaaaacccttgtcataaaaaaaaaaaaaaaa

SEQ ID NO: 713 - DNA, 1561 bp, human
gctggaccagcggccgtcctgtgcacctggcctgtgcgcgtgcccgctgctcggcttcacccagactaaggcgcgggcagctgcgggaacaggcggggtgggcggagggagaccgggaggcacgggcgccctgtgcgcggaggaggtgaaggcggccggggccgggacgccatgtccatggaggaccccttctttgtggtgaaaggagaggtacagaaagcagtcaacactgcccagggattgtttcagagatggacagagctcctccaggacccctccacagcaacaagggaagaaatcgactggaccaccaacgagctgagaaataacctccggagcatagagtgggatctagaggaccttgatgaaaccatcagcatagttgaagcaaatcctagaaaatttaaccttgatgcaactgaattgagtataagaaaagccttcattacaagtactcggcaagttgtcagggacatgaaagatcagatgtcaacttcatctgtgcaggcattagctgaaagaaaaaatagacaggcactgctgggagacagtggcagccagaactggagcactggaacaacagataaatatgggcgtctggaccgagagctccagagagccaattctcatttcattgaggagcagcaggcacagcagcagttgatcgtggaacagcaggatgagcagttggagctggtctctggcagcatcggggtgctgaagaacatgtcccagcgcatcggaggggagctggaggaacaggcagttatgttggaagatttctctcacgaattggagagcactcagtcccggctggacaatgtgatgaagaaacttgcaaaagtatctcatatgaccagtgatcggcgccaatggtgtgccatagccatcctctttgcagtcctgttggttgtgctcatcctcttcttagtgctgtgacggcggggcctctgggtgcgagttcctcctgcatatgaaccgaggggaggaggagaagctgagcacgtgtgacattgccgtctactcacattcctatcctggaaacatactgctgcactgacttttctccgtgtgaccccacaattgacatggctcctccatcccagcgctggaagggccagtgggaagaggaaatagatgtctgcactcctggctgcagctggacaacagaagccccatgccgcctgtccagttcggaggagaactagctgctgccttgccttccgggacctcgtttgctgaggagggacttacagactccactggtgttttgctgttgctcattccatgcatctttggcagctcttttcttctgctcagacccttccccgtgctcagacagtgcaccgctgtcccatctaaagaaacctgtcaggaatacgagcttctgggtatgtttcgtttcccattgctgtagcatttcttatcccctgagagctgatgattattgaggacagaaggctcagaaacagtttgtgacagaaaatgcagtgtttcatttttcagggataaatgctaagataaaattgcttttccaggtcaaaaaaaaaaaaaaaaaaaa

SEQ ID NO: 714 - DNA, 3184 bp, human
ctctgctgtgctgcctcaaacgcggagggctgcgtgcagtgggagcgggctccaggagcccgagcctccagccgtcctcagagcaaggcagcaccgaggcctggccacagcaatatccatctggaagctcttcccttcactcccaactctgaggttgcctaactctttattaaaaattcagaagggggaatgccagcccctagcatggactgtgatgtttccactctggttgcctgtgtggtggatgtcgaggtctttaccaatcaggaggttaaggaaaaatttgggggactgtttcggacttatgatgactgtgtgacgttccagctatttaagagtttcagacgtgtccgtataaacttcagcaatcctaaatctgcagcccgagctaggatagagcttcatgaaacccaattcagagggaaaaaattaaagctctactttgcacaggttcagactccagagacagatggagacaaactgcacttggctccaccccagcctgccaaacagtttctcatctcgcccccttcctccccacctgttagctggcagcccatcaacgatgccacgccagtcctcaactatgacctcctctatgctgtggccaaactaggaccaggagagaagtatgagctccatgcagggactgagtccaccccaagtgtcgtcgtgcacgtgtgcgacagtgacatagaggaagaagaggacccaaagacttccccaaagccaaaaatcatccaaactcggcgtcctggcctgccaccctccgtgtccaactgagctgcctgctccttctcgataatagccgtctcctctttatcatgctttttccccctgttgtttgtcaaaaaaaattgcctttaaattcctgggtgtttggttgtttgagattccttccttgttatcaagcctctcggacaaaagggctaggaaaaggtgatatgtctcctgatcatatcatacccattaagtataacccattatttagaaggttctagggaaaaaagtagtattttcttattaaacaatcagcacagcctatatctttgttctctcatgttgatccaagccagagacatcggtaacaaatagcacctgtgttgtttgtgaggtgtttcagtcccagtcctgatgtgtgtgcgttgttctctcctggccacttaaataggaccatatgtaaacttgactttgactgcatgagatatccctatctggtctcactcagtcctctgcatcccaacattcccaggacatgcatgatcaccagcatttattttcattatttgaggatatcttataactcacagattgtcagcatccagccatgtcctatctagattaggaaaatgatcagaatattccagctcaacaagtctgggtatactcactattgtgagtcaatacaccatagctctgttgaaattcctggaggcaaaattgaccttggccccaaagatattcctcaatagatttcaaacaccactcccctgtagaactctcccagcctcgttggggaggcttgtccagggtgatagagactgatttcagacaaacctatttattacaaaagtttcatggtgtctgaatgattgttttctctctttgtatatttgtacaaatgtttcagctgtgcttttaaaaaatctggatgttttttatttagtgattgttcgacaattagctgcttcaaaacataatgtgcattgcttatgaatgccttcatatactaatacagatactctgataatattacactctaataaggataatgctgaattttgaaaggacacaaaacatctaatgccaatatatacatggttagccaacatctttgctatcaagaccacttgttttaaataaagatgcaagtgtcagttgtagattattgggatgaagctaaatccccagaatgcagcagcagctgagcatgttaaaatggggaaggatgatagctacatgtatgccggtcctactcacgcgacacccgtgtgctcaaaaaagttacttgtttttgttacgtgtgattttcctatttctctagcccaaagtgcattacagaagatacacctatagaaccattaccttctgctatgtgtgccagggctcatctactcctgtacattaatggattactttagatgcaaatgcagattacaatggagtggggaagtactttcattacccaagcctcagaaaaacacacaagaacaataacacagcaaacagattgagggattgttgtggtttttgactaaggtgtatgttagtttcatcagaaacttaaaacatagactgatcactcagaaattaaagtccgttttactgtgaatatagcaatatagtactggacacagtactggtgaaactgaggagagcattgcttgtaaaatcctgagtttccataaggaaaatgaaaactccttttaaaaataaaatctgaggagtgtacaataagcatatgctttgactttcctttgctgtggaggtttttggtttttcattgatgataaacgactacagacttagtagtggagaaatggtgtcctctagtggaagaaatagtagctccgctattcagatgcagagcactgcagcatccagcctttcaaagctgactcttctcaatcatctgtgggtcatttgacttgattttttaagctaccctgaatttccagaatgcaggttctaaagaaatctagatgagagaaagtatttgaaaatgatttttaaatgttttttaaaagacacatctgacatttttaacaacttagtaaaagttgaaatgaccattctgtgtagtcataaaagaaacacaatgaagtgtatggcctctggagttagtcttagtaaaacttattgctctgtgtcaatgttaacctgtctcagatcaagtaattccttcactaggttgggtttggggaggggggaaaagaggggcttttcctaggagaacgataagaaatggaaagactccttgaagtgttgcaagggaacctcctagcactgtgaaagtcagaatcgcctcagcatttccatgacgcacattatgcaaatctctttagcactattttaaggttgaaaactttaacaatgaaggggaaggggaagatttccaccaactgaatcatttgtgcacgtgtatagctcaaagagcttagacttcaaatatatctggtgaatg

SEQ ID NO: 715 - DNA, 1284 bp, human
ggttcatttcgtgtctcggcgatgtttcctagagtctcgacgttcctacctcttcgccccctttcccgccaccctttgtcctctggaagcccggagacatcagcggctgcgattatgctactcactgttcggcacggaacagtcaggtaccgcagttcagcgctgttggcccggacaaaaaataacatccaaagatattttggcactaacagtgtgatctgtagcaagaaagataagcagtctgttcgaactgaggagacttccaaggagacttcagagagccaagacagtgaaaaggaaaatacgaaaaaagacttgttaggcattattaagggcatgaaagttgaattaagcacagtaaatgtacgaacaacaaagccccccaaaagaagaccacttaaaagtttggaagctacacttggcaggcttcgaagagctacagaatatgctccaaagaagagaattgagcccctgagtcctgagttggtggcagctgcatctgctgtggcagattctctcccttttgataagcaaacaaccaagtcagagctgctgagccagctccagcagcatgaggaagagtcaagggcacagagagatgcaaagcgacctaaaattagtttcagtaacataatatcagatatgaaagttgccagatctgctacagctagagttcgttcaagaccagagcttcggattcagtttgatgaaggctatgacaattatcctggccaggagaagacggatgatcttaaaaaaaggaaaaatatattcacagggaaaagacttaatatttttgacatgatggcagttactaaagaagcacctgaaacagacacatcaccttcactttggaatgtggaatttgctaagcagttagccacagtaaatgaacaaccccttcagaatggatttgaagagctgatccagtggacaaaagaggggaaactatgggagttcccaattaacaatgaagcaggttttgatgatgatggttcagaatttcatgaacatatatttctggagaaacacctggagagctttccaaaacaaggaccaattcgccacttcatggagctggtgacttgtggcctttccaaaaacccatatcttagtgttaaacagaaggttgaacacatagagtggtttagaaattattttaatgaaaaaaaggatattctaaaagaaagtaacatacagttcaattaagaccatggaaatttttatttcaaacaattagagatggatattacaactaaataaaataattttactagagtttgt

SEQ ID NO: 716 - DNA, 1020 bp, human
ggcgctgctgtggttggtcagtccagtaagaagccagcagggctggtgctggggcttcttctcctgaaggggctgcaagagggaaggcttagccatgtcgtccttgatcagaagggtgatcagcaccgcgaaagccccaggggccattggaccctacagtcaagctgtattagtcgacaggaccatttacatttcaggacagataggcatggacccttcaagtggacagcttgtgtcaggaggggtagcagaagaagctaaacaagctcttaaaaacatgggtgaaattctgaaagctgcaggctgtgacttcactaacgtggtgaaaacaactgttcttctggctgacataaatgacttcaatactgtcaatgaaatctacaaacagtatttcaagagtaattttcctgctagagctgcttaccaagttgctgctttacccaaaggcagccgaattgaaattgaagcagtagctatccaaggaccactgacaacggcatcactataagtgggcccagtgctgtgtagtctggaattgttaacattttaatttttacaattgatgtaacatcttaattaaccttttaattttcacaattgatgacagggtgagtttgatgaaaatatctgaagctattatggaaataccatgtaatagggagagttgaacatgaatattagagaaggaatccagttacttttttaaattacacctgtgtgcacctgtattactgaatataggaaagagatacccattacatagttactcagtaaacaaaagagaaataccaggtaggaaagaagagttactattcctgagaaataatcaagaacatatttaatttaaactaatgatgtgaactatttagttttgatgtccgttatgtgattctgcttttacttgagtaaaattaaagtgtttaaatttgagatcaaggagaagatagtggaacaaaatgttatatagataatatttttctaatggaaataaaataggcagatttccaaaaaaaaaaaaaa

SEQ ID NO: 717 - DNA, 5871 bp, human
ggacaggcgtggcggccggagccccagcatccctgcttgaggtccaggagcggagcccgcggccaccgccgcctgatcagcgcgaccccggcccgcgcccgccccgcccggcaagatgctgcccgtgtaccaggaggtgaagcccaacccgctgcaggacgcgaacatctgctcacgcgtgttcttctggtggctcaatcccttgtttaaaattggccataaacggagattagaggaagatgatatgtattcagtgctgccagaagaccgctcacagcaccttggagaggagttgcaagggttctgggataaagaagttttaagagctgagaatgacgcacagaagccttctttaacaagagcaatcataaagtgttactggaaatcttatttagttttgggaatttttacgttaattgaggaaagtgccaaagtaatccagcccatatttttgggaaaaattattaattattttgaaaattatgatcccatggattctgtggctttgaacacagcgtacgcctatgccacggtgctgactttttgcacgctcattttggctatactgcatcacttatatttttatcacgttcagtgtgctgggatgaggttacgagtagccatgtgccatatgatttatcggaaggcacttcgtcttagtaacatggccatggggaagacaaccacaggccagatagtcaatctgctgtccaatgatgtgaacaagtttgatcaggtgacagtgttcttacacttcctgtgggcaggaccactgcaggcgatcgcagtgactgccctactctggatggagataggaatatcgtgccttgctgggatggcagttctaatcattctcctgcccttgcaaagctgttttgggaagttgttctcatcactgaggagtaaaactgcaactttcacggatgccaggatcaggaccatgaatgaagttataactggtataaggataataaaaatgtacgcctgggaaaagtcattttcaaatcttattaccaatttgagaaagaaggagatttccaagattctgagaagttcctgcctcagggggatgaatttggcttcgtttttcagtgcaagcaaaatcatcgtgtttgtgaccttcaccacctacgtgctcctcggcagtgtgatcacagccagccgcgtgttcgtggcagtgacgctgtatggggctgtgcggctgacggttaccctcttcttcccctcagccattgagagggtgtcagaggcaatcgtcagcatccgaagaatccagacctttttgctacttgatgagatatcacagcgcaaccgtcagctgccgtcagatggtaaaaagatggtgcatgtgcaggattttactgctttttgggataaggcatcagagaccccaactctacaaggcctttcctttactgtcagacctggcgaattgttagctgtggtcggccccgtgggagcagggaagtcatcactgttaagtgccgtgctcggggaattggccccaagtcacgggctggtcagcgtgcatggaagaattgcctatgtgtctcagcagccctgggtgttctcgggaactctgaggagtaatattttatttgggaagaaatatgaaaaggaacgatatgaaaaagtcataaaggcttgtgctctgaaaaaggatttacagctgttggaggatggtgatctgactgtgataggagatcggggaaccacgctgagtggagggcagaaagcacgggtaaaccttgcaagagcagtgtatcaagatgctgacatctatctcctggacgatcctctcagtgcagtagatgcggaagttagcagacacttgttcgaactgtgtatttgtcaaattttgcatgagaagatcacaattttagtgactcatcagttgcagtacctcaaagctgcaagtcagattctgatattgaaagatggtaaaatggtgcagaaggggacttacactgagttcctaaaatctggtatagattttggctcccttttaaagaaggataatgaggaaagtgaacaacctccagttccaggaactcccacactaaggaatcgtaccttctcagagtcttcggtttggtctcaacaatcttctagaccctccttgaaagatggtgctctggagagccaagatacagagaatgtcccagttacactatcagaggagaaccgttctgaaggaaaagttggttttcaggcctataagaattacttcagagctggtgctcactggattgtcttcattttccttattctcctaaacactgcagctcaggttgcctatgtgcttcaagattggtggctttcatactgggcaaacaaacaaagtatgctaaatgtcactgtaaatggaggaggaaatgtaaccgagaagctagatcttaactggtacttaggaatttattcaggtttaactgtagctaccgttctttttggcatagcaagatctctattggtattctacgtccttgttaactcttcacaaactttgcacaacaaaatgtttgagtcaattctgaaagctccggtattattctttgatagaaatccaataggaagaattttaaatcgtttctccaaagacattggacacttggatgatttgctgccgctgacgtttttagatttcatccagacattgctacaagtggttggtgtggtctctgtggctgtggccgtgattccttggatcgcaatacccttggttccccttggaatcattttcatttttcttcggcgatattttttggaaacgtcaagagatgtgaagcgcctggaatctacaactcggagtccagtgttttcccacttgtcatcttctctccaggggctctggaccatccgggcatacaaagcagaagagaggtgtcaggaactgtttgatgcacaccaggatttacattcagaggcttggttcttgtttttgacaacgtcccgctggttcgccgtccgtctggatgccatctgtgccatgtttgtcatcatcgttgcctttgggtccctgattctggcaaaaactctggatgccgggcaggttggtttggcactgtcctatgccctcacgctcatggggatgtttcagtggtgtgttcgacaaagtgctgaagttgagaatatgatgatctcagtagaaagggtcattgaatacacagaccttgaaaaagaagcaccttgggaatatcagaaacgcccaccaccagcctggccccatgaaggagtgataatctttgacaatgtgaacttcatgtacagtccaggtgggcctctggtactgaagcatctgacagcactcattaaatcacaagaaaaggttggcattgtgggaagaaccggagctggaaaaagttccctcatctcagccctttttagattgtcagaacccgaaggtaaaatttggattgataagatcttgacaactgaaattggacttcacgatttaaggaagaaaatgtcaatcatacctcaggaacctgttttgttcactggaacaatgaggaaaaacctggatccctttaaggagcacacggatgaggaactgtggaatgccttacaagaggtacaacttaaagaaaccattgaagatcttcctggtaaaatggatactgaattagcagaatcaggatccaattttagtgttggacaaagacaactggtgtgccttgccagggcaattctcaggaaaaatcagatattgattattgatgaagcgacggcaaatgtggatccaagaactgatgagttaatacaaaaaaaaatccgggagaaatttgcccactgcaccgtgctaaccattgcacacagattgaacaccattattgacagcgacaagataatggttttagattcaggaagactgaaagaatatgatgagccgtatgttttgctgcaaaataaagagagcctattttacaagatggtgcaacaactgggcaaggcagaagccgctgccctcactgaaacagcaaaacaggtatacttcaaaagaaattatccacatattggtcacactgaccacatggttacaaacacttccaatggacagccctcgaccttaactattttcgagacagcactgtgaatccaaccaaaatgtcaagtccgttccgaaggcattttccactagtttttggactatgtaaaccacattgtacttttttttactttggcaacaaatatttatacatacaagatgctagttcatttgaatatttctcccaacttatccaaggatctccagctctaacaaaatggtttatttttatttaaatgtcaatagttgttttttaaaatccaaatcagaggtgcaggccaccagttaaatgccgtctatcaggttttgtgccttaagagactacagagtcaaagctcatttttaaaggagtaggacaaagttgtcacaggtttttgttgttgtttttattgcccccaaaattacatgttaatttccatttatatcagggattctatttacttgaagactgtgaagttgccattttgtctcattgttttctttgacataactaggatccattatttcccctgaaggcttcttgttagaaaatagtacagttacaaccaataggaacaacaaaaagaaaaagtttgtgacattgtagtagggagtgtgtaccccttactccccatcaaaaaaaaaaatggatacatggttaaaggatagaagggcaatattttatcatatgttctaaaagagaaggaagagaaaatactactttctcaaaatggaagcccttaaaggtgctttgatactgaaggacacaaatgtgaccgtccatcctcctttagagttgcatgacttggacacggtaactgttgcagttttagactcagcattgtgacacttcccaagaaggccaaacctctaaccgacattcctgaaatacgtggcattattcttttttggatttctcatttatggaaggctaaccctctgttgactgtaagccttttggtttgggctgtattgaaatcctttctaaattgcatgaataggctctgctaacgtgatgagacaaactgaaaattattgcaagcattgactataattatgcagtacgttctcaggatgcatccaggggttcattttcatgagcctgtccaggttagtttactcctgaccactaatagcattgtcatttgggctttctgttgaatgaatcaacaaaccacaatacttcctgggaccttttgtactttatttgaactatgagtctttaatttttcctgatgatggtggctgtaatatgttgagttcagtttactaaaggttttactattatggtttgaagtggagtctcatgacctctcagaataaggtgtcacctccctgaaattgcatatatgtatatagacatgcacacgtgtgcatttgtttgtatacatatatttgtccttcgtatagcaagttttttgctcatcagcagagagcaacagatgttttattgagtgaagccttaaaaagcacacaccacacacagctaactgccaaaatacattgaccgtagtagctgttcaactcctagtacttagaaatacacgtatggttaatgttcagtccaacaaaccacacacagtaaatgtttattaatagtcatggttcgtattttaggtgactgaaattgcatcagtgatcataatgaggtttgttaaaacgatagctatattcaaaatgtctatatgtttatttggacttttgaggttaaagacagtcatataaacgtcctgtttctgttttaatgttatcatagaattttttaatgaaactaaattcaattgaaataaatgatagttttcatctccaaaaaaaaaaaaaaaaaaaaaaaaaaaaaaaaaaaaaaa

SEQ ID NO: 718 - DNA, 3103 bp, human
ctgtgacactgccagcagcgcgcagagggagggatgggggcgggtatcggcgtaggggccctcggaaagaacggatattgctgtgacaccgcggggacgctctgaagggacgagtgtcggtgtggcaccggtgcacgctgaaggagccggcggaaccgggtggccatggggatgtgggcatcgctggacgctttgtgggagatgccggccgagaagcgtatcttcggggccgtgctgctcttttcctggacagtgtatctttgggagaccttcctagcacagcggcagagaaggatatataaaacaacaactcatgtaccaccggagttaggacagatcatggattctgaaacatttgagaaatctcgactctatcaactggataaaagcactttcagcttctggtcaggactctattcagagactgaaggcactcttattcttctctttggaggaataccttatctctggagactttctggacggttctgtggttatgctggctttggaccagaatatgagatcactcagtccctggtgtttctgctgttggctacacttttcagtgcattgactggtttgccatggagtctttataatacttttgtgatagaagaaaaacatggcttcaatcaacagactttggggttcttcatgaaagatgcaatcaagaaatttgttgtgactcagtgtattttgttgcctgtgtcttcacttctactttacattattaaaattgggggtgactatttttttatttatgcctggctgttcacattagttgtgtctctggttcttgtcacaatctatgctgattatattgcccctttatttgacaaattcacacctctgcctgagggaaagcttaaagaagaaattgaagtaatggcaaagagtattgactttcctttgacgaaggtgtatgttgtggaaggatctaaacgctcttcccacagcaatgcttatttttatggcttcttcaagaacaagcgaatagttttgtttgacactctactagaagagtactctgtactaaacaaagacatccaggaggattctggcatggaaccccgcaatgaggaagaagggaacagtgaagaaataaaagctaaagttaaaaataagaaacaaggatgtaaaaatgaggaggtactcgctgtactaggccatgaactggggcactggaagttgggacatacagtcaaaaatatcattattagccagatgaattctttcctgtgtttttttttatttgctgtattaattggtcgaaaggagctttttgctgcatttggtttttatgatagccaacccactcttattggactattgatcatcttccagtttattttttcaccttacaatgaggttctttctttttgcctaacagtcctaagccgcagatttgagtttcaagctgatgcatttgccaagaaacttgggaaggctaaagacttatattctgctttaatcaaacttaacaaagataacttgggattccctgtttctgactggttgttctcaatgtggcattattctcatcctccactgctagagagacttcaagctttgaaaactatgaagcaacactgagatgtccaggatctgtgactgaagacatttctgattatttctgtcctggcagcatgttccagctcttgatgtttttaaacttttttttagaagaaaaattaagtacagaaaagcccagatttaaatacatttaatatgtcattttaaaaatgattttaataattcatttcttaaaacactgaatgaattttgaagcttaatgtttttaaaggcatagttttatctttgacatctaatttaccatcaagttgtaaaattatttggaaaaatacagaactcgttttatttgtatacttatatggaatctgcatgtgaggtgtttgagggcatatgtttgaaagagggagcatcaccacaggaatcctttctgtgaggtggaaacagtggtcctgaatcattgtgctcacacctaacttgaaatctggtcttactttcatgctgttatgatttcacctggtgaatcagtgttttaaataagaaaggtaatagttggtaaggccaatgttatttaaatgaaagtagttagaaaaatgctctcctattctaccaaatttttaatttctttcttccctttcttgctacacagtgatcaagagtttctcatagtgctttgaagttagaaattatgtataggatattttaaatcattgagttttgtggggtttttttgtttgtttgtttcttttgttttttggaaaatccgtgtctttatctttttttcccacgtggtagatatgatcccattggaggtaaattgtagcttcttctcattcatgcagtaaataatacatcctttcactcagcagagatggccatattaaacacgttttgctatgttaaaagtggcagaacaggaaagacgaattaaaaataacattttttaagcgacataaggatgaaatactgatgaatctctgtgacattacagggaaaaaaatatagttttctatctctttcaagggcagaagagttttcatttttatttttgtaattttatctgtaagtcataaatattacttaatcaggcctgattctacttttgaaaattacagttcttgaaatgcagataatgtttactttgaaaacaaatgtcatgaatgatttccagtttttaaagctatatgtttcactgcttcatatctctgtccactttctgaatgagaacttattttgtgcctagagctctcactcactgataatgcttattaccttctgggcatttattccaaagtgggatcaactgtacgcctttggtatctgaccataaagtcttttgctccgctgacatttgggtgatgtcttcacatggaaatataataaaaataaaaatctagtttaatactgcattatttattttcctaaggctaaagaggagcagtcctatgcttttattcagcatcctttatctgtgacttcatgctctgataactgcctttccttccttctgtgcctttgaatacaaatttcagttctgcaaaagtgaaacattaaacattgccaacgcaaatgt

SEQ ID NO: 719 - DNA, 1226 bp, human
ctgggccgcgaggcgcggagcttgggagcggagcccaggccgtgccgcgcggcgccatgaagggcaaggaggagaaggagggcggcgcacggctgggcgctggcggcggaagccccgagaagagcccgagcgcgcaggagctcaaggagcagggcaatcgtctgttcgtgggccgaaagtacccggaggcggcggcctgctacggccgcgcgatcacccggaacccgctggtggccgtgtattacaccaaccgggccttgtgctacctgaagatgcagcagcacgagcaggccctggccgactgccggcgcgccctggagctggacgggcagtctgtgaaggcgcacttcttcctggggcagtgccagctggagatggagagctatgatgaggccatcgccaatctgcagcgagcttacagcctggccaaggagcagcggctgaacttcggggacgacatccccagcgctcttcgaatcgcgaagaagaagcgctggaacagcattgaggagcggcgcatccaccaggagagcgagctgcactcctacctctccaggctcattgccgcggagcgtgagagggagctggaagagtgccagcgaaaccacgagggtgatgaggacgacagccacgtccgggcccagcaggcctgcattgaggccaagcacgacaagtacatggcggacatggacgagcttttttctcaggtggatgagaagaggaagaagcgagacatccccgactacctgtgtggcaagatcagctttgagctgatgcgggagccgtgcatcacgcccagtggcatcacctacgaccgcaaggacatcgaggagcacctgcagcgtgtgggtcattttgacccggtgaccgggagccccctgacccaggaacagttcatccccaacttggctatgaaggaggttattgacgcattcatctctgagaatggctgggtggaggactactgaggttccctgccctacctggcgtcctggtccaggggagccctgggcagaagcccccggcccctaaacatagtttatgtttttggccaccccgaccgcttcccccaagttctgctgttggactctggactgtttcccctctcagcatcgcttttgctgggccgtgattgtcccctttgtgggctggaaaagcaggtgagggtgggctgggctgaggccattgccgccactatctgtgtaataaaatccgtgagcacgaaa

SEQ ID NO: 720 - DNA, 1513 bp, human
atccggcgcggtgtttagactccactgatgtcgtggcgctttaggggaagaagttggtgtttcgctgggccctggtactgaagacgcggtccgggtcgcccctagctgtttcctactcacccaaagccccgcacccgccttttctctctctcctctggcaggatgaggcgtgcaggcctgggtgaaggagtacctcctggcaactatgggaactatggctatgctaatagtgggtatagtgcctgtgaagaagaaaatgagaggctcactgaaagtctgagaagcaaagtaactgctataaaatctctttccattgaaataggccatgaagttaaaacccagaataaattattagctgaaatggattcacaatttgattccacaactggatttctaggtaaaactatgggcaaactgaagattttatccagagggagccaaacaaagctgctgtgctatatgatgctgttttctttatttgtcttttttatcatttattggattattaaactgaggtgatgcatgtaattgtgaatttggaatttgttccaacttaatggcttgcagtaccactttgataaaaatcagcatcaaaacattcctagtgttcaaatactgtggcattttccattgaaaattgctgaattttgcttattttataaatcacattagttaatacagtggtctttgaatactgtttcttaatgactcattttagcccctattttcaggggtagtgagagggtgtggctccactaatttccagtttgtttttctattgtttgccaactgtcagattaaatagcattataatattttgttgtaatcataaatgcaggtttatgtcccatgtaaggaaacttagtgggagagtaacagaatgcctggagagcctgactctgagctcttgaagtagtcagccagtttgtggtaaaatggtaattgaattttcctaactgcatcaactgtaatgatatactcccttctcctcctttatttagttaaaattgtaggctgatttctttttacctacaatcttcctaataatttttgatgataatgacccctcatttctttctgcccaaagacctcattctttaaataaaacttgttattttggcatatttctggtagggcccattgcacatgtgtatcagtatagttattatttcatattaactttatgaattctcttgacttggcttataatagttttatgatttttactacataggtagcacatttatcatttgtgacagaataatgtgaagttaagtaattactgaactttaaatggaaatagtatgcaagaaactcaggcattgaacttgaagataagagtattattgctttaatccagtgtatttgtttatggaaagaaaaacacaaaggcagactgttgagtaaaaaatattaaatattgttaaatattctgtattttggaatttatccatttataggcttcaaaagtaaatttttaaataaaatatattagtcgaaaaaaaaaaaaaaa

SEQ ID NO: 721 - DNA, 1587 bp, human
tggcactaggggcagccactcagcccttcgagctgtaggggaggcgctgcgcccccggccccagccgatcgggggctcctggcgctactgccctccagagtccctcctgccgtctgacttgagtccctgctgctgcagtgcacgcccccctttcggcagccagggtggggcccagacccaacctggcccctcctgcccccaccccgcctttgggtcgctgacccccaggctgtggtgagggtctgagagctggtaccacggagcctgggcaacctcctccgcccacccatgcccaccccgcatgaggctgagaagcagatcacagggccagaggaggcggaccggcccccttcaatgtccagtcatgatacagcctctccagcggcccccagccgcaacccctgctgcctgtgctggtgctgctgctgtagctgctcctggaaccaagagcggcggcgcgcgtggcaggcctcccgggagagcaagctgcagcccctccccagctgtgaagtatgtgccacgccaagtcctgaggaggtgcagagctgggcgcagtcttttgacaagctgatgcacagcccagcgggacgcagcgtgttccgggcgttcctgcggacagagtacagcgaggagaacatgctcttctggttggcctgcgaggagctgaaggccgaggccaaccagcatgtggtagacgagaaggcgaggctcatctacgaggactacgtatccatcctgtcccccaaggaggtgagcctggactcccgtgtgcgggagggcatcaacaagaagatgcaggagccgtccgcacacacgttcgacgacgcgcagctgcagatctacacgctcatgcaccgggactcctacccccgcttcctcagctctcccacctaccgtgccctgctgctgcaggggccatcacagtcctcctccgaggcctaggccgcccccagcagcacagaccccgccgcctcctacggccgactctgggttcccttcaggtgttggtgtcggcagggctgtcagggcacatgcctggccggctggggtccccacccgcggagacggtcctagacccagtggggagtgctgtgtctcctgggtctgcccacccgtggccaagcaggaactccaggtgcagggcgggcctccaggtgcagggcgggccagaagccccctcatcggcccgcagctggctggcccagtgctcctggctgggggctcttgcgtggtgagagtaggggtccccccaggagccatgctggacccatgagcctcgctggggcctcctccccaggcagccaatgggccccagacaagcctttggtggggaacagaacctccgcatcgtgtagttttgtgacataaggagacctcctacttgagctgtctgtaccccagaatcaaacacagaactcagaaccagatttaggccctcagaatcctgcactcaaggtggcaggacccaatttctgttttatatgttcatgaactttaaacctggaaacatgtccttactaggtgttttatcaaaaaaaagttttttattattgaagatatttttaaagcaaaaaaaaaaaaaaaaaa

SEQ ID NO: 722 - DNA, 2846 bp, human
acggctccgcccttctcaagatggcgctgcactcaatgcggaaagcgcgtgagcgctggagcttcatccgggcacttcataagggatccgcagctgctcccgctctccagaaagacagcaagaagcgagtattttccggcattcaacctacaggaatcctccacctgggcaattacctgggagccattgagagctgggtgaggttacaggatgaatatgactctgtattatacagcattgttgacctccactccattactgtcccccaagacccagctgtccttcggcagagcatcctggacatgactgctgttcttcttgcctgtggcataaacccggaaaaaagcatccttttccaacaatctcaggtgtctgaacacacacaattaagttggatcctttcctgcatggtcagactacctcgattacaacatttacatcagtggaaggcaaagactaccaagcagaagcacgatggcacggtgggcctgctcacatacccagtactccaggcagccgacattctgttgtacaagtccacacacgttcctgttggggaggatcaagtccagcacatggaactagttcaggatctagcacaaggtttcaacaagaagtatggggagttctttccagtgcccgagtccattctcacatccatgaagaaggtaaaatccctacgtgatccttctgccaaaatgtcgaaatcagaccctgacaaactggccaccgtccgaataacagacagcccagaggagatagtgcagaaattccgcaaggctgtgacagacttcacctcggaggtcacctatgacccggctggccgcgctggcgtgtccaacatagtggcggtgcatgccgcggtgacggggctctccgtggaggaagtggtgcgccgcagcgcgggcatgaacactgctcgctacaagctggccgtggcagatgctgtgattgagaagtttgccccaattaagcgtgaaattgaaaaactgaagctggacaaggaccatttagagaaggttttacaaattggatcagcaaaagccaaagaattagcatacactgtgtgccaggaggtgaagaaattggtgggttttctataggaagtttcaacgaatcacagcaaggcttttgtgccttgcactccatgcattctgataacggcagctttcctaaaaagaaaaagttatagttttgggacatttaatttggtatagctgattattggctttatttgatgaatattgctttgtagctttgaaatacgacagtgttccaaatcccatcaacaaaatgctgtgaacaacaacaacaaaaaataaatcaagaaggcatagctgtctgaatccccaattattgaggcacactccttggcctgcagaaatgtgattgaagtaaggagtaatttgggaaatggagtatcatttgtgcttctctctggagtacttactgtaacagatgcacacgttatctacttcaacccttttataaagcaatatatagaggtcttagatgtataatccttgagatgccatttgatcagatgccaatttgtattcagagctcataaaaacaagtccattcttatagtttgtttgtcactgagacggtgcctgatttaatatatttaagctgcttaacttgttttccaagagataacaccaactgttccagcaataatttgttttttaattcagagatatgggatatgatcttctaaggaggttgcattattttgacctgatttatttattgtacaagagcccaagtccctgaattatattcttaataagtgctttcttgcattcatttcagtttagtctcaccaaccccctatgaattaggagaattattgtcattttacacatgaggaaagtgaggctgagagaatccaattagcttgtacgatatcactccataagagaagcaaatctgagagtaaaacccttaccccttattcttaagaatagtgcttgtttattcagtacaaaaaaaatgctgaaaggcagcgttttttagactctaaacattctgattttgaaggtgggtgttggaacgactgatgatgttttttatatcatcaattcagccaatggatgcgaacttaaaatctggattcacagaaccgtggtcacatttccccatcaaaatccccaaggcgggtcccaagttctctcctctacgctcattgcagaaatactttgaaataggttctgccagtctacaatagcagtgaagactgacaaatcagatattcccaatgactgacagcttctcatcttgcctctacctcagttaagtaatgtcaccctgaaacctagcttttctgcacttccatttctgacacctgaaaatgaaaatgataatcctaacttatacaccaagacctgttagcaagatcgattttgtaacagaaattgcttataagttttttatcagtaaggaccatgatcaccatttgtacatacataactaggttgttgagcaaagcatttttgctcatgtttcttaaggaagtagagtagtccttgtgtcagaacacatgttaatccacaaaacgccgcatcccagattccaaattaaaacatcgtttttaggattcttggagctagcctggatcatgggtaaaggaaacattttgccttttgtatcttatactggaatgggatgtctgtaagtcctagaacctctttgagcatatttcttacaagcctctgttttttcccctttaaaggaaactttgaaaggattgtgaatactggaaaatgacaaaactaaaggtagatctatcaagccaaaaaaaaaaaaaaaaaaaaaaaaaaaaaaaaaaaaaaaaaaaaaaaaaa

SEQ ID NO: 723 - DNA, 2214 bp, human
gctggagtcggaggcgatatttctaggggtgtacttgttggggtcagggtaagcaccagccacaaaaacctacaaaagaagggaaattactgtctttaaatattaaaaaaaaacaagatccatgagtgggcatcgatcaacaaggaaaagatgtggagattctcacccggagtccccagtgggcttcgggcatatgagtactacaggatgtgtattaaataaattgtttcagttaccaacaccaccattgtcaagacaccaactaaagcggctagaagaacacagatatcaaagtgctggacggtccctgcttgagcccttaatgcaagggtattgggaatggctcgttagaagagttccctcctggattgccccaaatctcatcaccatcattggactgtcaataaacatctgtacaactattttattagtcttctactgccctacagctacagagcaggcacctctgtgggcatatattgcttgtgcctgtggccttttcatttaccagtctttggatgctattgatgggaaacaggcaagaagaaccaatagtagttctcctctgggagaactttttgatcatggctgtgattcactatcaacagtttttgtggttcttggaacttgtattgcagtgcagctggggacaaaccctgattggatgtttttttgttgttttgcggggacatttatgttctattgtgcgcactggcaaacgtatgtttctggaacattgcgatttggaataattgatgtgactgaagtgcaaatcttcataataatcatgcatttgctggcagtgattggaggaccacctttttggcaatctatgattccagtgctgaatattcaaatgaaaatttttcctgcactttgtactgtagcagggaccatattttcctgtacaaattacttccgtgtaatcttcacaggtggtgttggcaaaaatggatcaacaatagcaggaacaagtgtcctttctccttttctccatattggatcagtgattacattagctgcaatgatctacaagaaatctgcagttcagctttttgaaaagcatccctgtctttatatactgacatttggttttgtgtctgctaaaatcactaataagcttgtggttgcacacatgacgaaaagtgaaatgcatttgcatgacacagcattcataggtccggcacttttgtttctggaccagtattttaacagctttattgatgaatatattgtactttggattgccctggttttctctttctttgatttgatccgctactgtgtcagtgtttgcaatcagattgcgtctcacctgcacatacatgtcttcagaatcaaggtctctacagctcattctaatcatcattaatgatgtaattggtatataggaacatcatgttttctgcaggaaagaaagtaacatattaaggagaatgggggtggataagaacaaatataatttataataatcaatgttgtataacttttattctttattattggtaacacgccctaactatcctgtgtgagaatgggaatttcaagtcccatcttgtaaattgtatatgttgtcatgcagggtttgggccaagaaagcatgcagaaaaaaatgccatgtgattgtaattatcctggattcagaataatactgtgatggggagccagatccgcagtggtggagagttctaatgttgactgtttgcaggccaaaagatgattgctttataattttaacaaatcattgtcttttagtaacatccttgtttagtgtcttctcaagctttctttactgaggaattcagcttgtgacacagatacatcccactagcttgtgaggtggaactagtaataaagaccttgaatttggattgaaaagtttcctatctttacattgttgaggaagtccttttttttttttttttttttttaattgctcaagaaatgattctctcacaggcttgggaaatcctgttagcatgcagaataatgtggtaactttgtcaatttcccattttatttttttaaataaatatatgatctaaaagccaactttttctcagttttactcagtggaaagataaactaagttttaatgttatttttttaaatttaagcaaaatttatttctgttctttaataaataagaaaatgtggtccactgaaaaaaaaaaaaaaaaaaaaaaaaaaaaaaaaaaaaaaaaaaaaaaaaaa

SEQ ID NO: 724 - DNA, 1807 bp, human
gcacgagggaagagggtgatccgacccggggaaggtcgctgggcagggcgagttgggaaagcggcagcccccgccgcccccgcagccccttctcctcctttctcccacgtcctatctgcctctcgctggaggccaggccgtgcagcatcgaagacaggaggaactggagcctcattggccggcccggggcgccggcctcgggcttaaataggagctccgggctctggctgggacccgaccgctgccggccgcgctcccgctgctcctgccgggtgatggaaaaccccagcccggccgccgccctgggcaaggccctctgcgctctcctcctggccactctcggcgccgccggccagcctcttgggggagagtccatctgttccgccagagccccggccaaatacagcatcaccttcacgggcaagtggagccagacggccttccccaagcagtaccccctgttccgcccccctgcgcagtggtcttcgctgctgggggccgcgcatagctccgactacagcatgtggaggaagaaccagtacgtcagtaacgggctgcgcgactttgcggagcgcggcgaggcctgggcgctgatgaaggagatcgaggcggcgggggaggcgctgcagagcgtgcacgcggtgttttcggcgcccgccgtccccagcggcaccgggcagacgtcggcggagctggaggtgcagcgcaggcactcgctggtctcgtttgtggtgcgcatcgtgcccagccccgactggttcgtgggcgtggacagcctggacctgtgcgacggggaccgttggcgggaacaggcggcgctggacctgtacccctacgacgccgggacggacagcggcttcaccttctcctcccccaacttcgccaccatcccgcaggacacggtgaccgagataacgtcctcctctcccagccacccggccaactccttctactacccgcggctgaaggccctgcctcccatcgccagggtgacactggtgcggctgcgacagagccccagggccttcatccctcccgccccagtcctgcccagcagggacaatgagattgtagacagcgcctcagttccagaaacgccgctggactgcgaggtctccctgtggtcgtcctggggactgtgcggaggccactgtgggaggctcgggaccaagagcaggactcgctacgtccgggtccagcccgccaacaacgggagcccctgccccgagctcgaagaagaggctgagtgcgtccctgataactgcgtctaagaccagagccccgcagcccctggggcccccggagccatggggtgtcgggggctcctgtgcaggctcatgctgcaggcggccgaggcacagggggtttcgcgctgctcctgaccgcggtgaggccgcgccgaccatctctgcactgaagggccctctggtggccggcacgggcattgggaaacagcctcctcctttcccaaccttgcttcttaggggcccccgtgtcccgtctgctctcagcctcctcctcctgcaggataaagtcatccccaaggctccagctactctaaattatggtctccttataagttattgctgctccaggagattgtccttcatcgtccaggggcctggctcccacgtggttgcagatacctcagacctggtgctctaggctgtgctgagcccactctcccgagggcgcatccaagcgggggccacttgagaagtgaataaatggggcggtttcggaagcgtcagtgtttccatgttatggatctctctgcgtttgaataaagactatctctgttgctcac

SEQ ID NO: 725 - DNA, 4755 bp, human
gctgctctcgttcgcttggctcagctcagctcagctcagcgcagctccgcggccgccaagccgaggcgggcacggtctccgagtcgcggacgccagctccgagctccctctctccgccgcgcctccgccaggtcgcgccttcgtcgggaccacttcgggcaggagtcgcgtggcgaaggcctgcggccgcggcacaaagttgggggccgcgaagatgaggctgtccccggcgcccctgaagctgagccggactccggcactgctggccctggcgctgcccctggccgcggcgctggccttctccgacgagaccctggacaaagtgcccaagtcagagggctactgcagccgtatcctgcgcgcccagggcacgcggcgcgagggctacaccgagttcagcctccgcgtggagggcgaccccgacttctacaagccgggaaccagctaccgcgtaacactttcagctgctcctccctcctacttcagaggattcacattaattgccctcagagagaacagagagggtgataaggaagaagaccatgctgggaccttccagatcatagacgaagaagaaactcagtttatgagcaattgccctgttgcagtcactgaaagcactccacggaggaggacccggatccaggtgttttggatagcaccaccagcgggaacaggctgcgtgattctgaaggccagcatcgtacaaaaacgcattatttattttcaagatgagggctctctgaccaagaaactttgtgaacaagattccacatttgatggggtgactgacaaacccatcttagactgctgtgcctgcggaactgccaagtacagactcacattttatgggaattggtccgagaagacacacccaaaggattaccctcgtcgggccaaccactggtctgcgatcatcggaggatcccactccaagaattatgtactgtgggaatatggaggatatgccagcgaaggcgtcaaacaagttgcagaattgggctcacccgtgaaaatggaggaagaaattcgacaacagagtgatgaggtcctcaccgtcatcaaagccaaagcccagtggccagcctggcagcctctcaacgtgagagcagcaccttcagctgaattttccgtggacagaacgcgccatttaatgtccttcctgaccatgatgggccctagtcccgactggaacgtaggcttatctgcagaagatctgtgcaccaaggaatgtggctgggtccagaaggtggtgcaagacctgattccctgggacgctggcaccgacagcggggtgacctatgagtcacccaacaaacccaccattccccaggagaaaatccggcccctgaccagcctggaccatcctcagagtcctttctatgacccagagggtgggtccatcactcaagtagccagagttgtcatcgagagaatcgcacggaagggtgaacaatgcaatattgtacctgacaatgtcgatgatattgtagctgacctggctccagaagagaaagatgaagatgacacccctgaaacctgcatctactccaactggtccccatggtccgcctgcagctcctccacctgtgacaaaggcaagaggatgcgacagcgcatgctgaaagcacagctggacctcagcgtcccctgccctgacacccaggacttccagccctgcatgggccctggctgcagtgacgaagacggccccacctgcaccatgtccgagtggatcacctggtcgccctgcagcatctcctgcggcatgggcatgaggtcccgggagaggtatgtgaagcagttcccggaggacggctccgtgtgcacgctgcccactgaggaaacggagaagtgcacggtcaacgaggagtgctctcccagcagctgcctgatgaccgagtggggcgagtgggacgagtacagcgccacctgcggcatgggcatgaagaagcggcaccgcatgatcaagatgaaccccgcagatggctccatgtgcaaagccgagacatcacaggcagagaagcgcatgatgccagagtgccacaccatcccatgcttgctgtccccatggtccgagtggagtgactgcagcgtgacctgcgggaagggcatgcgaacccgacagcggatgctcaagtctctggcagaacttggagactgcaatgaggatctggagcaggtggagaagtgcatgctccctgaatgccccattgactgtgagctcaccgagtggtcccagtggtcggaatgtaacaagtcatgtgggaaaggccacgtgattcgaacccggatgatccaaatggagcctcagtttggaggtgcaccctgcccagagactgtgcagcgaaaaaagtgccgcatccgaaaatgccttcgaaatccatccatccaaaagctacgctggagggaggcccgagagagccggcggagtgagcagctgaaggaagagtctgaaggggagcagttcccaggttgtaggatgcgcccatggacggcctggtcagaatgcaccaaactgtgcggaggtggaattcaggaacgttacatgactgtaaagaagagattcaaaagctcccagtttaccagctgcaaagacaagaaggagatcagagcatgcaatgttcatccttgttagcaagggtacgagttccccagggctgcactctagattccagagtcaccaatggctggattatttgcttgtttaagacaatttaaattgtgtacgctagttttcatttttgcagtgtggttcgcccagtagtcttgtggatgccagagacatcctttctgaatacttcttgatgggtacaggctgagtggggcgccctcacctccagccagcctcttcctgcagaggagtagtgtcagccaccttgtactaagctgaaacatgtccctctggagcttccacctggccagggaggacggagactttgacctactccacatggagaggcaaccatgtctggaagtgactatgcctgagtcccagggtgcggcaggtaggaaacattcacagatgaagacagcagattccccacattctcatctttggcctgttcaatgaaaccattgtttgcccatctcttcttagtggaactttaggtctcttttcaagtctcctcagtcatcaatagttcctggggaaaaacagagctggtagacttgaagaggagcattgatgttgggtggcttttgttctttcactgagaaattcggaatacatttgtctcacccctgatattggttcctgatgcccccccaacaaaaataaataaataaattatggctgctttatttaaatataaggtagctagtttttacacctgagataaataataagcttagagtgtatttttcccttgcttttgggggttcagaggagtatgtacaattcttctgggaagccagccttctgaactttttggtactaaatccttattggaaccaagacaaaggaagcaaaattggtctctttagagaccaatttgcctaaattttaaaatcttcctacacacatctagacgttcaagtttgcaaatcagtttttagcaagaaaacatttttgctatacaaacattttgctaagtctgcccaaagcccccccaatgcattccttcaacaaaatacaatctctgtactttaaagttattttagtcatgaaattttatatgcagagagaaaaagttaccgagacagaaaacaaatctaagggaaaggaatattatgggattaagctgagcaagcaattctggtggaaagtcaaacctgtcagtgctccacaccagggctgtggtcctcccagacatgcataggaatggccacaggtttacactgccttcccagcaattataagcacaccagattcagggagactgaccaccaagggatagtgtaaaaggacattttctcagttgggtccatcagcagtttttcttcctgcatttattgttgaaaactattgtttcatttcttcttttataggccttattactgcttaatccaaatgtgtaccattggtgagacacatacaatgctctgaatacactacgaatttgtattaaacacatcagaatatttccaaatacaacatagtatagtcctgaatatgtacttttaacacaagagagactattcaataaaaactcactgggtctttcatgtctttaagctaagtaagtgttcagaaggttcttttttatattgtcctccacctccatcattttcaataaaagatagggcttttgctcccttgttcttggagggaccattattacatctctgaactacctttgtatccaacatgttttaaatccttaaatgaattgctttctcccaaaaaaagcacagtataaagaaacacaagatttaattatttttctacttggggggaaaaaagtcctcatgtagaagcacccacttttgcaatgttgttctaagctatctatctaactctcagcccatgataaagttccttaagctggtgattcctaatcaaggacaagccaccctagtgtctcatgtttgtatttggtcccagttgggtacattttaaaatcctgattttggagacttaaaaccaggttaatggctaagaatgggtaacatgactcttgttggattgttattttttgtttgcaatggggaatttataagaagcatcaagtctctttcttaccaaagtcttgttaggtggtttatagttcttttggctaacaaatcattttggaaataaagattttttactac

SEQ ID NO: 726 - DNA, 2413 bp, human
gcgactcgtcccgccttctggggcactagtttgactttgtgattggctactagtatcaaggaatcccggcgtggacagcgcgaggagaaagatggcggcgatggcggtcgggggtgctggtgggagccgcgtgtccagcgggagggacctgaattgcgtccccgaaatagctgacacactaggggctgtggccaagcaggggtttgatttcctctgcatgcctgtcttccatccgcgtttcaagagggagttcattcaggaacctgctaagaatcggcccggtccccagacacgatcagacctactgctgtcaggaagggactggaatacgctaattgtgggaaagctttctccatggattcgtccagactcaaaagtggagaagattcgcaggaactccgaggcggccatgttacaggagctgaattttggtgcatatttgggtcttccagctttcctgctgccccttaatcaggaagataacaccaacctggccagagttttgaccaaccacatccacactggccatcactcttccatgttctggatgcgggtacccttggtggcaccagaggacctgagagatgatataattgagaatgcaccaactacacacacagaggagtacagtggggaggagaaaacgtggatgtggtggcacaacttccggactttgtgtgactatagtaagaggattgcagtggctcttgaaattggggctgacctcccatctaatcatgtcattgatcgctggcttggggagcccatcaaagcagccattctccccactagcattttcctgaccaataagaagggatttcctgttctttctaagatgcaccagaggctcatcttccggctcctcaagttggaggtgcagttcatcatcacaggcaccaaccaccactcagagaaggagttctgctcctacctccaatacctggaatacttaagccagaaccgtcctccacctaatgcctatgaactctttgccaagggctatgaagactatctgcagtccccgcttcagccactgatggacaatctggaatctcagacatatgaagtgtttgaaaaggaccccatcaaatactctcagtaccagcaggccatctataaatgtctgctagaccgagtaccagaagaggagaaggataccaatgtccaggtactgatggtgctgggagcaggacggggacccctggtgaacgcttccctgcgggcagccaagcaggccgaccggcggataaagctgtatgctgtggagaaaaacccaaatgccgtggtgacgctagagaactggcagtttgaagaatggggaagccaagtgaccgtagtctcatcagacatgagggaatgggtggctccagagaaagcagacatcattgtcagtgagcttctgggctcatttgctgacaatgaattgtcgcctgagtgcctggatggagcccagcacttcctaaaagatgatggtgtgagcatccccggggagtacacttcctttctggctcccatctcttcctccaagctgtacaatgaggtccgagcctgtagggagaaggaccgtgaccctgaggcccagtttgagatgccttatgtggtacggctgcacaacttccaccagctctctgcaccccagccctgtttcaccttcagccatcccaacagagatcctatgattgacaacaaccgctattgcaccttggaatttcctgtggaggtgaacacagtactacatggctttgccggctactttgagactgtgctttatcaggacatcactctgagtatccgtccagagactcactctcctgggatgttctcatggtttcccatcctcttccctattaagcagcccataacggtacgtgaaggccaaaccatctgtgtgcgtttctggcgatgcagcaattccaagaaggtgtggtatgagtgggctgtgacagcaccagtctgttctgctattcataaccccacaggccgctcatataccattggcctctagccctgcgtgccaagtgtccagagccttggaagcagcttcaggttcctgctcctgtagtacagaaggtgcagtacatctatgggctgtgattcccccttgcccatcagagaggagcatttcaatctgctttcctgccttacatcaaggtgggcaagggattataattaattgcagggctcaagccaccaatctatgaagacctcaggccagggggtgaggaattagtgctggatttgaagctacgcactcagcctcaagaactccctggaatatccctgagaacatggggtttgaacggattttcagcctttttctgttcttgttttgatggttttgtgtaagaggaaataccaataaagttatagccctttactgccaaaaaaaaaaaaaaaaaaaaaaaaaaaaaaa

SEQ ID NO: 727 - DNA, 1847 bp, human
aattcggcacgaggcgaggcgaccgctgaggccgcggagagtgacggcggcccggccgacgggagccggggcggggcggcggcccagcgaaggagcgcgcgggcggtctggccccgccccctccccgcccgccttcccggtgaccttcaggggcccgggtggcgggcgcaggcccctgcggcggcggcgggatgttcgtgcaggaggagaagatcttcgcgggcaaggtgctgcggctgcacatctgcgcgtccgacggcgccgagtggctggaggaggccaccgaggacacctcggtggagaagctcaaggagcgctgcctcaagcactgtgctcatgggagcttagaagatcccaaaagtataacccatcataaattaatccacgctgcctcagagagggtgctgagtgatgccaggaccatcctggaagagaacatccaggaccaagatgtcctattattgataaaaaagcgtgctccatcaccacttcccaagatggctgatgtctcagcagaagaaaagaaaaaacaagaccagaaagctccagataaagaggccatactgcgggccaccgccaacctgccctcctacaacatggaccgggccgcggtccagaccaacatgagagacttccagacagaactccggaagatactggtgtctctcatcgaggtggcgcagaagctgttagcgctgaacccagatgcggtggaattgtttaagaaggcgaatgcaatgctggacgaggacgaggatgagcgtgtggacgaggctgccctgcggcagctcacggagatgggctttccggagaacagagccaccaaggcccttcagctgaaccacatgtcggtgcctcaggccatggagtggctaattgaacacgcagaagacccgaccatagacacgcctcttcctggccaagctcccccagaggccgagggggccacagcagctgcctccgaggctgccgcgggagccagcgccaccgatgaggccagagatgagctgacggaaatcttcaagaagatccggaggaaaagggagtttcgggctgatgctcgggccgtcatttccctgatggagatggggttcgacgagaaagaggtgatagatgccctcagagtgaacaacaaccagcagaatgccgcgtgcgagtggctgctgggggaccggaagccctctccggaggagctggacaagggcatcgaccccgacagtcctctctttcaggccatcctggataacccggtggtgcagctgggcctgaccaacccgaaaacattgctagcatttgaagacatgctggagaacccactgaacagcacccagtggatgaatgatccagaaacggggcctgtcatgctgcagatctctagaatcttccagacactaaatcgcacgtaggtggcgttgttccactcggctatcaggccacagcagccccctggtgcggcccgagaccgggcagagtggacctcacctggaaactcaccttcagcgcctcagccctggactgttagaggtgctgcagctgctcctgctctctgatcttattgcttataaactttggtgacggtagtgtgtaaggccgtatttttagcatctgacaggtgtttacaaaaaagtggttgtcgcactgggaagtggagtgatggcctcgtctccagtgctcctctgggctcttgagttgctgcttgaattgccgtgtagacatttgcttggagagtccacttgttatttgacggaggtaggtttcaacccagagttaatgtcaagcatgctaatttaactagtcactcacagatgacttttctttaataaagtcccttttcctaaaaaaaaaaa

SEQ ID NO: 728 - DNA, 3892 bp, human
tagaatacttgggtgacatctgcctgagagatctccaagaattacagaagacaaaaatactaatgcatttgagaaagcggtagttttggggggagggggaaaaagcaactgctttcctgatctgcaacttggctggatgctaagatgtcagtggacatgaatagccaggggtctgacagcaatgaagaggactatgacccaaattgtgaggaagaggaagaagaagaagaagacgaccctggggacatagaggactattacgtgggagtagccagcgatgtggagcagcagggggctgatgcctttgatcccgaggagtaccagttcacttgcttgacctacaaggaatctgagggtgccctcaatgagcacatgaccagcttagcttctgtcctaaaggtatctcattcagttgctaaacttatattagttaatttccactggcaagtttcagagatattggacagatacaagtccaattctgctcaactgcttgttgaggctcgagttcagcctaatccatcaaaacatgttcccacatcccatccccctcaccactgtgcagtgtgtatgcagtttgtgcgaaaggaaaacctactctctctggcctgtcagcaccagttttgccgcagctgctgggagcagcactgctcagttctcgtcaaggacggcgtgggcgtgggagtctcttgcatggctcaggactgtccactccgtacaccagaggactttgtgtttccattgcttcccaatgaagaattgagagagaaatacaggcgctacctcttcagggactatgtggagagtcattaccagctccagctgtgccctggtgcagactgccccatggttattcgggtacaggagcctagagctcgccgagtacagtgcaatcggtgcaacgaggtcttctgtttcaagtgtcgtcagatgtatcacgcacccacagactgtgccacaatccggaaatggctcacgaagtgtgcagacgactctgaaacagccaactacattagtgctcacactaaagactgtcccaagtgcaacatctgcattgagaagaatggaggctgcaatcacatgcaatgctccaaatgtaaacacgacttctgctggatgtgtctaggagattggaagactcatggcagtgaatactatgagtgcagtcgttacaaggagaatcctgacatcgtgaaccagagccaacaagcccaggcgagggaagccctcaagaagtacttattctactttgagaggtgggaaaaccacaataaaagcttgcagctagaggcacagacataccagcggattcacgagaagattcaggagagggtcatgaacaatctggggacatggatcgactggcagtacctacagaatgctgccaagctcttggccaagtgtcgatacaccctgcaatacacctacccatatgcatattacatggagtccggacccaggaagaagctgtttgaataccagcaggctcagctggaggctgagatcgaaaacctctcatggaaagtggagcgtgcagacagctatgacagaggggacttggagaaccagatgcatatagcggagcagcggaggagaaccctgctgaaagatttccatgacacctaagttgggatgtggatgtgccggggtgaggaagatgtggctgcaaggtctcccggctgccatactgcatgctgcaggctctgcctttcatgaccccaggcaacagccagggccccactcctgagagacactggcaacacctcttagttgatttctgttttcttctcttttcactttttgtttctaccagggtagaggccatgttgaactggcctcttttcaggacttttatttccccctggatggttgttgggagggagggaaagtgttttctgaatggctattaatagtattagatcattacaacttatgtaactttcaaaggttgtacaattatacaaaaaaaaaaaaaaaggcaaactataggataacacagagccctttttgaaaataaattggcattggagtgttttaccctctagctgttttacttagaatgtaacatatgctgcctacccacctcaaaatgtctgtactgcaagagggccctgggcctctgctttccatattcacgtttggccagagttgtagtcccaaagaagagcatgggtggcagatggtagggaattgaactggcctgtgcaatgggcatggagcacaaggggtcacagcatgcctcctgccttaccgtggcagtacggagacagtccagaacatggtcttcttgccacggggtgttgttgtctctggtggtgctgcatgtctgtggctcacctttattcttgaaactgaggtttacctggatctggctactgaggctagagcccacagcagaatggggttgggcctgtggcccccaaactagggggtgtgggttcatcacagtgttgccttttgtctcctaaagatagggatctacttttgaagggaattgttcctcccaaataaatttgctttaccttggtcctttcttttgtgccagtattcaagtggtatagctctgagcagggtcacatttggccaaacctgacactgtcttgctgcattctcctttggcaaacatcagggtcagaattcaggatagcccttcctagggcactggactttctggcatgggggctgtgtttgcacaagttattttcatgttacctggagagtgtccagaggctgctctgaggctgaggtgtgttcccccttgcctggttccagctgtcagagggataccatcctagggtctgggaatccaaggccacgagactccttggtttgtggtccgagatcctgtactaaggagggtctggccagaggaacagaccagcttttgcacaatgaagcgcaagggaacaagtggtttgcctggtgtcctacctgtcctgaacctggtcctgtgggccattgaaaagttagatctgtgatctctggggtttttgtggctttgttcaatgcttccactctagggcaggcagagcagtctatactctcccaagcctgcttgacctccaagtagagctgatacagagatctgtgaatattgtgatagaaattctttggtattcatacatttcagctgcaagtcagcaatttcccaggtaccatgtaagctataaaacagtcattcttaaagacagaggatagctgtgactcatgggatcatgaggtccatggctggttgcaggttccctttttccttcctcaggttttgtctcttcctgtgttgtccccagcaagggagagactgtggggtggattgggagaacagattaggagtatagcaaatgaacccagaatggaacagtggggagctaactgtgaatgaggagagtacctgctgcaggacctggaggtcaggtgtgaatgctgtattggcacagggaataaatatcctggcgtctggagccttcacctctccgtcaagtccttcctgtgatactgccatggcacaggatctgagttgcagctctgcaccctaaatcacaccctgggcattgtctgggctgcagggctgccaggttctgtacttgtgtccagctgtggccctggatgctggagctggagggttttctgtgctcagactgtagcctgtagctcttggcctgtgtagagccccctcctgtgccctcagtggctgtcgtttgttaacatcatcaggaagatgggaaaggtcaggcagaatttttctgccctacaaagggtggaagagaaaggacacagtattttcatgaatttaccatatatctttgtttttcttcaacgaaaaagttaattgaggcaatgtcatctgctcaaagttgagtggtttattcacaataaactgtaagtttctgattat

SEQ ID NO: 729 - DNA, 1019 bp, human
cactttcaaaatggcagccggaaggaaatttgtgattagaagccgcgctgttcttatttaagagcgttagcgcaacttccggtattgttgcaagatggccgcgcccagtgatggattcaagcctcgtgaacgaagcggtggggagcaggcacaggactgggatgctctgccacccaagcggccccgactaggggcaggaaacaagatcggaggccgtaggcttattgtggtgctggaaggggccagtctggagacagtcaaggtagggaagacatatgagctactcaactgtgacaagcacaagtctatattgttgaagaatggacgggaccctggggaagcgcggccagatatcacccaccagagtttgctgatgctgatggatagtcccctgaaccgagctggcttgctacaggtttatatccatacacagaagaatgttctgattgaagtgaatccccagacccgaattcccagaacctttgaccgcttttgtggcctcatggttcaacttttacacaagctcagtgttcgagcagctgatggcccccagaagcttttgaaggtaattaagaatccagtatcagatcactttccagttggatgtatgaaagttggcacttctttttccatcccggttgtcagtgatgtgcgtgagctggtgcccagcagtgatcctattgtttttgtggtaggggcctttgcccatggcaaggtcagtgtggagtatacagagaagatggtgtccatcagtaactaccccctttctgctgccctcacctgtgcaaaacttaccacagcctttgaggaagtatggggggtcatttgacagtagtagaacctgttctgaaaccagaaactgttgatgtcacatcctttgaccctggtctgagctgactgctggaagatgatctttctgcactgagactgtggagtttggggaagccaaggctgtacatttgctatttgtttatcctatgaatactgttcttgcaaaaaaaaaaaaaaaaaaaaaaaaa

SEQ ID NO: 730 - DNA, 1051 bp, human
ggaccgccgcctggttaaaggcgcttatttcccaggcagccgctgcagtcgccacacctttgcccctgctgcgatgaccctgtcgccacttctgctgttcctgccaccgctgctgctgctgctggacgtccccacggcggcggtgcaggcgtcccctctgcaagcgttagacttctttgggaatgggccaccagttaactacaagacaggcaatctatacctgcgggggcccctgaagaagtccaatgcaccgcttgtcaatgtgaccctctactatgaagcactgtgcggtggctgccgagccttcctgatccgggagctcttcccaacatggctgttggtcatggagatcctcaatgtcacgctggtgccctacggaaacgcacaggaacaaaatgtcagtggcaggtgggagttcaagtgccagcatggagaagaggagtgcaaattcaacaaggtggaggcctgcgtgttggatgaacttgacatggagctagccttcctgaccattgtctgcatggaagagtttgaggacatggagagaagtctgccactatgcctgcagctctacgccccagggctgtcgccagacactatcatggagtgtgcaatgggggaccgcggcatgcagctcatgcacgccaacgcccagcggacagatgctctccagccaccacacgagtatgtgccctgggtcaccgtcaatgggaaacccttggaagatcagacccagctccttacccttgtctgccagttgtaccagggcaagaagccggatgtctgcccttcctcaaccagctccctcaggagtgtttgcttcaagtgatggccggtgagctgcggagagctcatggaaggcgagtgggaacccggctgcctgcctttttttctgatccagaccctcggcacctgctacttaccaactggaaaattttatgcatcccatgaagcccagatacacaaaattccaccccatgatcaagaatcctgctccactaagaatggtgctaaagtaaaactagtttaataagcaaaaaaaaaaaaaaaaaaa

SEQ ID NO: 731 - DNA, 4299 bp, human
tgacagcggaggcggcggcggctgcaggctccgagccgtaggagccggatcgggggaggggccgggcccaggagcctcagccccgccggcagccctaagggcaaggtaaccgccacggggtccccgtcgcgaccccctccctcccggagctcccgtccccgggatcccaagctccgccccgccgacccccgtctcccctggaccccggctctagcctgacgagatccccaacctcctgaggtgctctggccccggattctcccgggctgcattctctgctcctcctcgcctgcgaagcatcacgtccgcttcccgacgctgagggcagccccgtccagggcagtggctctgccaatgatcctgtgagtattcaggaatcactgttgcccctggggatccttgtcctggagtggcccacctgcttgcccccagcatggcgtccgacactcccgagtcgctgatggccctctgtactgacttctgcttgcgcaacctggatggcaccctgggctacctgctggacaaggagaccctgcggctacatccggacatcttcttgcccagcgagatctgtgaccggctcgtcaatgagtatgtggagctggtgaacgctgcctgtaacttcgagccacacgagagcttcttcagcctcttttcggacccccgcagcacccgcctcacgcggatccacctccgtgaggacctggtgcaggaccaggacctggaggccatccgcaagcaggacctggtggagctgtacctgactaactgcgagaagctgtccgccaagagcctgcagacactgaggagcttcagccacaccctggtgtccttgagcctcttcggctgtacaaacattttctatgaggaggagaacccagggggctgtgaagatgagtacctcgtcaaccccacctgccaggtgctggttaaggatttcaccttcgagggcttcagccgcctccgcttcctcaacttgggccgcatgattgattgggtccctgtggagtccctgctgcggccgcttaactccctggctgccttggacctctcaggcattcagacgagcgacgccgccttcctcacccagtggaaagacagcctggtgtccctcgtcctctacaacatggacctgtccgacgaccacatccgggtcatcgtgcagctgcacaagctgcgacacctggacatctcccgagaccgcctctccagctactacaagttcaagctgactcgggaggtgctgagcctctttgtgcagaagctggggaacctaatgtccctggacatctctggccacatgatcctagagaactgcagcatctccaagatggaagaggaagcggggcagaccagcattgagccttccaagagcagcatcatacctttccgggctctgaagaggccgctgcagttcctcgggctctttgagaactctctgtgccgcctcacgcacattccagcctacaaagtaagtggtgacaaaaacgaagagcaggtgctgaatgccatcgaggcctacacggagcaccggcctgagatcacctcgcgggccatcaacttgctttttgacatcgcccgcatcgagcgttgcaaccagctgctgcgggccctgaagctggtcatcacggccctcaagtgccacaaatatgacaggaacattcaagtgacaggcagcgccgctctcttctacctaacaaattccgagtaccgctcagagcagagtgtgaagctgcgccggcaggttatccaggtggtgctgaatggcatggaatcctaccaggaggtgacggtgcagcggaactgctgcctgacgctctgcaacttcagcatccccgaggagctggaattccagtaccgccgggtcaacgagctcctgctcagcatcctcaaccccacgcggcaggacgagtctatccagcggatcgccgtgcacctgtgcaatgccctggtctgccaggtagacaacgaccacaaggaggccgtgggcaagatgggctttgtcgtgaccatgctgaagctgattcagaagaagctgctggacaagacatgtgaccaggtcatggagttctcctggagtgccctgtggaacatcacagatgaaactcctgacaactgcgagatgttcctcaatttcaacggcatgaagctcttcctggactgcctgaaggaattcccagagaagcaggaactgcataggaatatgctaggacttttggggaatgtggcagaagtgaaggagctgaggcctcaactaatgacttcccagttcatcagcgtcttcagcaacctgttggagagcaaggccgatgggatcgaggtttcctacaatgcctgcggcgtcctctcccacatcatgtttgatggacccgaggcctggggcgtctgtgagccccagcgtgaggaggtggaggaacgcatgtgggctgccatccagagctgggacataaactctcggagaaacatcaattacaggtcatttgaaccaattctccgcctccttccccagggaatctctcctgtcagccagcactgggcaacctgggccctgtataacctcgtgtctgtctacccggacaagtactgccctctgctgatcaaagaaggggggatgccccttctgagggacataattaagatggcgaccgcacggcaggagaccaaggaaatggcccgcaaggtgattgagcactgcagtaactttaaagaggagaacatggacacgtctagatagaggcctccgtccccatggccgccaccgctctggaccacaggcggggaggaagcatgctcaagcagcccagcgggcgggccccttccgagggagcctcccacggagtgaagagacatgggggacttttgcacaaccgacgcttttccttaatgttagtgagatatatatatattatatatatatattttttttttggttaggaagtgtgaagttttgtgtgtatgatttctgtgcaaaaacaaaagcaacactcctgagtccttgcagcttccttggccattctcaaacccactcagccttcatcgctgacacacacactcctaccccaaccagactaaatgcctataacgctgtgagtgtccagtccttgtccaggaaactcagatcccggcctggcttcctttcatgagaggagcaggccttggacagcgtatcgagcatcctgacccactgcccctgcctgagaacgccatctcggctcccgggcacagctgatggggtttggggattagaacttaccccactgggtctcccaaaagccttggtgctcccggctgtgggccatctggggcaggaaagtgagccattcctaggctgaggtccaggcagccctgcccctgaagaccctctaggagcagggcacccagtggccctgctgctgtccagccaggcctgcctgaggccacgctgctatggaggctgcctcctagtctcccaccaggtcccaggctgtggaaagccccagcccagggatggtcagaactcgggggcagattccactgccccttctgccaaacacatccagaacctgccctcagccctggaagctagcatcttctggggccaggggcttgcttcctcgctccatagccctcaactgcccaggcgctcccaccagcagaactgagcctgcctcctcctcccagcctgccccgctgcccagaggaccccacgcctctcagaggcagaggtcccatgccagcctttgacccacaacggccacacagccgcctccagaccagcactcggactgccctgcagtggccgcttgggcctccctggcggtcccgccctgccctaggctttaccttggaagcctgagaggcgccggctctcttgctcctccatcgatggacactgcattgcttctcatcggacacttgtggagcgcaggggcctggggagcagcgctaaccctggaggcagcctttgggtgatggctttttcttcccttttcctcccgcgggcctgttttcaggtgttcctagcatttctgcctccaggcaggacggcaggggtgagcagctttgggagagacacctggcctttttctcctggagcctctccctcccggccctgggaagtgggcgcagccctgtgttcccccagcttggcagatgggctgcatgcggcgctcccttccttcccacgctcagcggccccggccagaccctggcagacttcacacctcattgctttaccccctggggcctggggaaatgtctgtactttgggaagtcacagaaatacatttttgtgcaaaatggaaaaaaaaaaaaaaaaaa

SEQ ID NO: 732 - DNA, 1937 bp, human
gtacctcacggaagccggctttggccctgcggctgctaccgtcgccgcggagaaattgttggatctggcagtctaggaatgaatctcctctcagcctttaagctcacctggtcagaatccttggatgagcctgtgggaccgttcctcctagcccggtggtttggaaccagtggctttgggactgtaagaggatggacaaagattctcaggggctgctagattcatccctgatggcatcaggcactgccagccgctcagaggatgaggagtcactggcagggcagaagcgagcctcctcccaggccttgggcaccatccctaaacggagaagctcctccaggttcatcaagaggaagaagttcgatgatgagctggtggagagcagcctggcaaaatcttctacccgggcaaagggggccagtggggtggaaccagggcgctgttcggggagtgaaccctcctccagtgagaagaagaaggtatccaaagcccccagcactcctgtgccacccagcccagccccagcccctggactcaccaagcgtgtgaagaagagtaaacagccacttcaggtgaccaaggatctgggccgctggaagcctgcagatgacctcctgctcataaatgctgtgttgcagaccaacgacctgacctccgtccacctgggcgtgaaattcagctgccgcttcacccttcgggaggtccaggagcgttggtacgccctgctctacgatcctgtcatctccaagttggcctgtcaggccatgaggcagctgcacccagaggctattgcagccatccagagcaaggccctgtttagcaaggctgaggagcagctgctgagcaaagtgggatcgaccagccagcccaccttggagaccttccaggacctgctgcacagacaccctgatgccttctacctggcccgtaccgcgaaggccctgcaggcccactggcagctcatgaagcagtattacctgctggaggaccagacagtgcagccgctgcccaaaggggaccaagtgctgaacttctctgatgcagaggacctgattgatgacagtaagctcaaggacatgcgagatgaggtcctggaacatgagctgatggtggctgaccggcgccagaagcgagagattcggcagctggaacaggaactgcataagtggcaggtgctagtggacagcatcacaggcatgagctctccggacttcgacaaccagacactggcagtgctgcggggccgcatggtgcggtacctgatgcgctcgcgtgagatcaccctgggcagagcaaccaaggataaccagattgatgtggacctgtctctggagggtccggcctggaagatatcccggaaacaaggtgtcatcaagctgaagaacaacggtgatttcttcattgccaatgagggtcgacggcccatctacatcgatggacggccggtgctctgtggctccaaatggcgcctcagcaacaactctgtggtggagatcgccagcctgcgattcgtcttccttatcaaccaggacctcattgccctcatcagggctgaggctgccaagatcacaccacagtgaggagtggtggcaggactcgtgggccctctccggcctgtttcccctgccactccagcccccttgagctgggaactcaggctcctggaaaaacctgggcagtgggaggctcagctgcgggccattgatttgagcctttgagggaggatagggctggcctttgtgaagccagcagaggctgagaacctcaggcttccctagatccagagcccctccccatcttcctctctctaaaaacaaccctaccccccattgccaccttcactcctgtgtctccagctgattagcctcagactcttcttttattgtttttcttttgtaaataaaaagcaccaggttccaaaaaaaaaaaaaaaaaaa

SEQ ID NO: 733 - DNA, 628 bp, human
ggctgcgaggaccgtgggcagccagggtcggtgaaggatcccaaaatggctgggcgaaaacttgctctaaaaaccattgactgggtagcttttgcagagatcataccccagaaccaaaaggccattgctagttccctgaaatcctggaatgagaccctcacctccaggttggctgctttacctgagaatccaccagctatcgactgggcttactacaaggccaatgtggccaaggctggcttggtggatgactttgagaagaagtttaatgcgctgaaggttcccgtgccagaggataaatatactgcccaggtggatgccgaagaaaaagaagatgtgaaatcttgtgctgagtgggtgtctctctcaaaggccaggattgtagaatatgagaaagagatggagaagatgaagaacttaattccatttgatcagatgaccattgaggacttgaatgaagctttcccagaaaccaaattagacaagaaaaagtatccctattggcctcaccaaccaattgagaatttataaaattgagtccaggaggaagctctggcccttgtattacacattctggacattaaaaataataattatacaaaaaaaaaaaaaaaaaaaaaaaaaaaaa

SEQ ID NO: 734 - DNA, 1268 bp, human
ggcacgagggtggtcttgcgagtggagtgtccgctgtgcccgggcctgcaccatgagcgtcccggccttcatcgacatcagtgaagaagatcaggctgctgagcttcgtgcttatctgaaatctaaaggagctgagatttcagaagagaactcggaaggtggacttcatgttgatttagctcaaattattgaagcctgtgatgtgtgtctgaaggaggatgataaagatgttgaaagtgtgatgaacagtgtggtatccctactcttgatcctggaaccagacaagcaagaagctttgattgaaagcctatgtgaaaagctggtcaaatttcgcgaaggtgaacgcccgtctctgagactgcagttgttaagcaaccttttccacgggatggataagaatactcctgtaagatacacagtgtattgcagccttattaaagtggcagcatcttgtggggccatccagtacatcccaactgagctggatcaagttagaaaatggatttctgactggaatctcaccactgaaaaaaagcacacccttttaagactactttatgaggcacttgtggattgtaagaagagtgatgctgcttcaaaagtcatggtggaattgctcggaagttacacagaggacaatgcttcccaggctcgagttgatgcccacaggtgtattgtacgagcattgaaagatccaaatgcatttctttttgaccaccttcttactttaaaaccagtcaagtttttggaaggcgagcttattcatgatcttttaaccatttttgtgagtgctaaattggcatcatatgtcaagttttatcagaataataaagacttcattgattcacttggcctgttacatgaacagaatatggcaaaaatgagactacttacttttatgggaatggcagtagaaaataaggaaatttcttttgacacaatgcagcaagaacttcagattggagctgatgatgttgaagcatttgttattgacgccgtaagaactaaaatggtctactgcaaaattgatcagacccagagaaaagtagttgtcagtcatagcacacatcggacatttggaaaacagcagtggcaacaactgtatgacacacttaatgcctggaaacaaaatctgaacaaagtgaaaaacagccttttgagtctttctgatacctgagtttttatgcttataatttttgttctttgaaaaaaaagccctaaatcatagtaaaacattataaactaaaaaaaaaaaaaaaaaaaaaaaa

SEQ ID NO: 735 - DNA, 3557 bp, human
cgcgccggttgccgctgcggagcgcggcgggtccatgtgcgcagtgagtggcgctattcctggcccagtagcacccgagccccgggtttgaccgagtccgcgctgcgatggaccccaacaccattatcgaggccctgcggggcaccatggacccagccctgcgtgaggccgcggagcgccagctcaatgaagcacacaagtctctgaattttgtctcaacactgctccagattactatgtcggaacagctggatttacctgtgagacaggcaggtgttatctatctgaaaaatatgataacacagtattggcctgatcgagaaacagcaccaggggatatatccccttatactattccagaagaagatcgccattgtattcgagaaaatattgtagaagccattatccattctcctgagctcatcagggtacagcttactacatgcattcatcacatcatcaaacatgattatccaagccgctggactgccattgtggacaaaattggcttttatcttcagtccgataacagtgcttgttggctaggaattcttctttgcctttatcagcttgtgaaaaattatgagtataaaaaaccagaggagcggagtccattggtagcagcaatgcagcattttctgccagttctaaaggatcgttttatccagcttctttctgaccagtctgatcagtctgtcctcatccagaaacagatattcaagatcttctatgctcttgttcagtatacactaccactggaactgataaaccaacagaacctgacagaatggatagaaattttaaagactgttgtgaacagggatgtacctaatgaaacacttcaagttgaagaagatgatcgacctgagttaccatggtggaaatgcaagaagtgggccttacatattttagcaagactttttgaaagatatggaagccctggcaatgtttccaaggagtataatgaatttgctgaagtatttctgaaggcatttgctgttggtgtccagcaagttttattgaaggtgttatatcagtacaaggagaagcaatatatggctcctcgagttttacaacagacattaaattatattaatcaaggagtttctcatgctctcacctggaagaatctgaagccccatatacaaggcattatccaagatgttatttttccattgatgtgctatacagatgctgatgaggaactttggcaagaagacccttacgaatatatacgcatgaagtttgatgtgtttgaagatttcatttctcctaccactgctgcccagacacttttgtttacagcctgtagtaagaggaaagaggtactgcaaaagactatgggattttgttaccagattcttacagaaccaaatgctgaccctcgaaaaaaagatggagccctgcatatgattggctctttagctgaaatacttctgaagaaaaagatctataaagatcagatggaatacatgttgcagaatcatgtattccctctcttcagcagtgaactaggctacatgagagcaagggcttgctgggtacttcactatttttgtgaagtgaagttcaaaagtgatcagaaccttcaaacagccttagagctaacaagaagatgtctgattgatgatagagaaatgcctgtgaaagtggaagctgccattgcccttcaagtattgatcagcaatcaagaaaaagctaaagaatatatcacaccattcatcagacctgtaatgcaggctcttcttcacattataagagaaacagaaaatgatgaccttaccaatgtaattcagaaaatgatctgtgaatatagtgaagaagttactcctattgcagtagaaatgacacaacatttggcaatgacatttaaccaagtaatccagacggggccagatgaagaaggtagtgatgacaaagcagttactgctatgggaattctgaatacaattgatacacttcttagtgtagttgaagatcataaagagataacccaacagcttgagggaatctgcttacaggtcattggtactgttttacaacagcatgtcttagaattctatgaggagatcttctctttagcgcacagtttgacatgtcaacaagtgtctccacagatgtggcagctactaccccttgtatttgaagtctttcagcaagatggctttgattactttacagatatgatgcccctccttcataattatgtaacagttgatacagacacacttctgtctgacaccaagtatcttgaaatgatatacagtatgtgcaaaaaggttcttacaggagttgcaggagaagatgcagagtgtcatgcagcaaaattgttagaggtcatcattctgcagtgcaaagggcgtggcattgaccagtgcattcccttattcgtggaagcagccttagaaagactgacaagagaggttaagacaagtgaacttcgaactatgtgtctgcaagttgcaattgcagctttgtattataatccacacctactactcaataccttagaaaatcttcgcttccctaataatgttgaaccagttacaaatcattttattacacagtggcttaatgatgttgactgtttcttggggcttcatgacagaaagatgtgtgttctcggactctgtgctcttattgatatggaacagataccccaagttttaaatcaggtttctggacagattttgccggcttttatccttttatttaacggattgaaaagagcatatgcctgccatgcagaacatgagaatgacagtgatgatgatgatgaagctgaagatgatgatgaaaccgaggaactggggagtgatgaagatgatattgatgaagatgggcaagaatatttggagattctggctaagcaggctggtgaagatggagatgatgaagattgggaagaagatgatgctgaagagactgctctggaaggctattccacaatcattgatgatgaagataaccctgttgatgagtatcagatatttaaagctatctttcaaactattcaaaatcgtaatcctgtgtggtatcaggcactgactcacggtcttaatgaagaacaaagaaaacagttacaggacatagcaactctggctgatcaaagaagagcagcccatgaatccaaaatgattgagaagcatggaggatacaaattcagtgctccagttgtgccaagttctttcaattttggaggcccagcaccagggatgaattgagttatctctttctttcctgctgtgtgcttgtagtgaagagcttgtgttcctcctagtagtggttccagaactggttcatgttatctattctaaactaataatcaatagatggacaaaagaaacaacaaccccaggagatgggacctgatcatgcaacctggcactggaaaagaaatcagcgggattttgggggtgggggggatgggaggtaccttagagggagtattttctttattttttgaagaaagtaagatcctgactctgaagcttcaaagtgacactgtggaaatctgaaacgaggggatgtcatgaaggcagcttttctttttctga

SEQ ID NO: 736 - DNA, 1475 bp, human
gtcgacgcggccgcgctccgctcccgtgagtaacttggctccgggggctccgctcgcctgcccgcacgccgcccgccacccaggaccgcgccgccggcctccgccgctagcaaacccttccgacggccctcgctgcgcaagccgggacgcctctcccccctccgcccccgccgcggaaagttaagtttgaagaggggggaagaggggaacatggacatgaagaggaggatccacctggagctgaggaaccggaccccggcagctgttcgagaacttgtcttggacaattgcaaatcaaatgatggaaaaattgagggcttaacagctgaatttgtgaacttagagttcctcagtttaataaatgtaggcttgatctcagtttcaaatctccccaagctgcctaaattgaaaaagcttgaactcagtgaaaatagaatctttggaggtctggacatgttagctgaaaaacttccaaatctcacacatctaaacttaagtggaaataaactgaaagatatcagcaccttggaacctttgaaaaagttagaatgtctgaaaagcctggacctctttaactgtgaggttaccaacctgaatgactaccgagagagtgtcttcaagctcctgccccagcttacctacttggatggctatgaccgagaggaccaggaagcacctgactcagatgccgaggtggatggtgtggatgaagaggaggaggacgaagaaggagaagatgaggaagacgaggacgatgaggatggtgaagaagaggagtttgatgaagaagatgatgaagatgaagatgtagaaggggatgaggacgacgatgaagtcagtgaggaggaagaagaatttggacttgatgaagaagatgaagatgaggatgaggatgaagaggaggaagaaggtgggaaaggtgaaaagaggaagagagaaacagatgatgaaggagaagatgattaagaccccagatgacctgcagaaacagaactgttcagtattggttggactgctcatggattttgtagctgtttaaaaaaaaaaaaaaggtagctgtgatacaaaccccaggacacccacccacccaaagagccaaagaatagttcctgtgacattccgccttccttccatgtagtccctcttggtaatctaccaccaagcttgtggacttcaccccaacaaaattgtaagcgttgttaggtttttgtgtaagattcttgctgtagcgtggatagctgtgattggtgagtcaaccgtctgtggctaccagttacactgagattgtaacagcatttttactttctgtacaacaaaaaagctttgtaaataaaatcttaacattttgggtctgttttttcatgctttgctttttaattattattattattttttttacattaggacattttatgtgacaactgccaaaaaagtatttttaagaatttaagcgaaataaacagttactctttggc

SEQ ID NO: 737 - DNA, 2088 bp, human
cgctgtcaactctccaactcagctcagctgatcggttgccgccgccgccgccgccagattctggaggcgaagaacgcaaagctgagaacatggacgttaatatcgccccactccgcgcctgggacgatttcttcccgggttccgatcgctttgcccggccggacttcagggacatttccaaatggaacaaccgcgtagtgagcaacctgctctattaccagaccaactacctggtggtggctgccatgatgatttccattgtggggtttctgagtcccttcaacatgatcctgggaggaatcgtggtggtgctggtgttcacagggtttgtgtgggcagcccacaataaagacgtccttcgccggatgaagaagcgctaccccacgacgttcgttatggtggtcatgttggcgagctatttccttatctccatgtttggaggagtcatggtctttgtgtttggcattacttttcctttgctgttgatgtttatccatgcatcgttgagacttcggaacctcaagaacaaactggagaataaaatggaaggaataggtttgaagaggacaccgatgggcattgtcctggatgccctagaacagcaggaagaaggcatcaacagactcactgactatatcagcaaagtgaaggaataaacataacttacctgagctagggttgcagcagaaattgagttgcagcttgcccttgtccagacctatgttctgcttgcgtttttgaaacaggaggtgcacgtaccacccaattatctatggcagcatgcatgtataggccgaactattatcagctctgatgtttcagagagaagacctcagaaaccgaaagaaaaccaccaccctcctattgtgtctgaagtttcacgtgtgtttatgaaatctaatgggaaatggatcacacgatttctttaagggaattaaaaaaaataaaagaattacggcttttacagcaacaatacgattatcttataggaaaaaaaaaaatcattgtaaagtatcaagacaatacgagtaaatgaaaaggctgttaaagtagatgacatcatgtgttagcctgttcctaaatccctagaattgtaatgtgtgggatataaattagtttttattattctcttaaaaatcaaagatgatctctatcactttgccacctgtttgatgtgcagtggaaactggttaagccagttgttcatacttcctttacaaatataaagatagctgtttaggatattttgttacatttttgtaaatttttgaaatgctagtaatgtgttttcaccagcaagtatttgttgcaaacttaatgtcattttccttaagatggttacagctatgtaacctgtattattctggacggacttattaaaatacaaacagacaaaaaataaaacaaaacttgagttctatttaccttgcacattttttgttgttacagtgaaaaaaatggtccaagaaaatgtttgccatttttgcattgtttcgtttttaactggaacatttagaaagaaggaaatgaatgtgcattttattaattccttaggggcacaaggaggacaataatagctgatcttttgaaatttgaaaaacgtctttagatgaccaagcaaaaagactttaaaaaatggtaatgaaaatggaatgcagctactgcagctaataaaaaattttagatagcaattgttacaaccatatgcctttatagctagacattagaattatgatagcatgagtttatacattctattatttttcctccctttctcatgtttttataaataggtaataaaaaatgttttgcctgccaattgaatgatttcgtagctgaagtagaaacatttaggtttctgtagcattaaattgtgaagacaactggagtggtacttactgaagaaactctctgtatgtcctagaataagaagcaatgatgtgctgcttctgatttttcttgcattttaaattctcagccaacctacagccatgatctttagcacagtgatatcaccatgacttcacagacatggtctagaatctgtacccttacccacatatgaagaataaaattgattaaaggtta

SEQ ID NO: 738 - DNA, 1883 bp, human
agttccgcgcggggctgtcggggaaccatggctgccccgagagacaatgtcactttattattcaagttatactgcttggcagtgatgaccctgatggctgcagtctataccatagctttaagatacacaaggacatcagacaaagaactctacttttcaaccacagccgtgtgtatcacagaagttataaagttattgctaagtgtgggaattttagctaaagaaactggtagtctgggtagattcaaagcatctttaagagaaaatgtcttggggagccccaaggaactgttgaagttaagtgtgccatcgttagtgtatgctgttcagaacaacatggctttcctagctcttagcaatctggatgcagcagtgtaccaggtgacctaccagttgaagattccgtgtactgctttatgcactgttttaatgttaaaccggacactcagcaaattacagtgggtttcagtttttatgctgtgtgctggagttacgcttgtacagtggaaaccagcccaagctacaaaagtggtggtggaacaaaatccattattagggtttggcgctatagctattgctgtattgtgctcaggatttgcaggagtatattttgaaaaagttttaaagagttcagatacttctctttgggtgagaaacattcaaatgtatctatcagggattattgtgacattagctggcgtctacttgtcagatggagctgaaattaaagaaaaaggatttttctatggttacacatattatgtctggtttgtcatctttcttgcaagtgttggtggcctctacacttctgttgtggttaagtacacagacaacatcatgaaaggcttttctgcagcagcggccattgtcctttccaccattgcttcagtaatgctgtttggattacagataacactcacctttgccctgggtactcttcttgtatgtgtttccatatatctctatggattacccagacaagacactacatccatccaacaaggagaaacagcttcaaaggagagagttattggtgtgtgattttagcctcacgtgagactccttttaagactaaaccatttgcattaaactagagccttaagtcaatctcagaaggtagcataaacaaataaaaattaactgtatggcatgatcagtgcggttatgtggaaacaacaacaaacaaacgaagctatctgagtgaactgctaatacagaaacttaatgtagacctgtttggggtctactattgttttagaatgaaggaattgtattattgtgtgtatatataatttgtaaataaaaagtatggagatgatacggtgttaaaaaaaatcatggtgaggctacaatactcaagtaacaaggtttgggacaatgtctaagggttaaagtgccaaagccatttctgtactaactgttctcttgttccggtaccggggagaaggatgacccctccttattctccaattcatgtacagtattttgtcctagcagcataaagacctagctcttttcttacaagaggcagaaacaagacaggctagttcataaacaaactgaatgtgtaactaacttctcaaaatgaatctatttcataactcggacaatttctgggtggtgactgagtacccctttagtgagtacccctttagtgctatatttgtgccattcattatctggttcatatttctttgctgttagatgatacacatttcttcaaaaaaatttctaatgtcacttttgtacttttttaaataaagtatgtttaactgttgggctctcaataatttgtgaaatttcagtgttttctataatgttaatggggaaattcagcaataaactttatttgcaaaaaaaaaaaaaaaaaaaaaaaaaaaaaa

SEQ ID NO: 739 - DNA, 5860 bp, human
atgcaggagagccagaccaagagcatgttcgtgtcccgggccctggagaagatcctagccgacaaggaggtgaagcggccccagcactcccagctgcgcagggcctgccaggtggcgctcgatgaaattaaagcagaaatagaaaagcagaggcttggcactgctgcaccaccaaaggcaaacttcattgaagctgacaagtattttcttccattcgagctagcttgccagtccaagtccccaagggtagtcagcacatcccttgactgcttgcagaaactcatcgcatacgggcacatcactggcaacgcccctgacagtggagcccctgggaagcggctgatcgacagaattgttgaaaccatttgcagttgttttcagggccctcagactgatgaaggggttcagttacaaataattaaggctcttctgactgcagtgacttccccacacattgaaattcatgagggtactatcctgcagacagtgagaacatgttacaatatctatttggccagcaaaaatctcatcaatcaaaccactgccaaggctacccttactcagatgctgaacgtcattttcacccgcatggaaaaccaagtgttgcaggaggccagaagactggaaaaaccaatccagtcaaaaccccagtcccctgtgatccaagctgcagcagtatccccaaagttcgttcgtttgaagcacagtcaggcacaaagcaaaccaacaactcccgaaaaaacagatttaaccaacggtgaacatgccaggagtgattctggaaaagtaagcacagaaaatggagacgcacccagagaaagaggctcatcactgtcagggactgatgacggagcccaggaggtggtgaaggacatcttggaagatgtagtcacatctgccattaaagaagcagcggaaaagcatggtctgacagaacctgagagagttctaggtgaactggagtgccaggaatgtgctattcccccaggagttgatgaaaactcacagaccaacgggatagccgatgacaggcagtccttgtcgtcagcagataatctggaatcggatgcacaaggacatcaagtggctgccaggttctcccacgttctgcagaaggatgccttccttgtgttccgctccctgtgcaagctgtccatgaaaccccttggtgaaggccctccagacccaaaatcccatgagctgcgttccaaggtggtttccctgcagctgctcctctctgtgttgcaaaatgctggccccgtattcaggactcacgagatgttcatcaatgcaatcaagcaatatctctgtgtggccttgtccaaaaacggcgtctcttcagtgcctgatgtctttgagctctctcttgccatttttcttactcttctttcaaactttaaaatgcacttgaaaatgcagatagaggtctttttcaaagagattttcctgaacattttagaaacatcaacaagttcttttgagcacaggtggatggtcattcagactctgacgaggatctgtgcagatgcccagtgtgttgtggatatttatgtcaactacgactgtgatttaaatgctgctaacatttttgagcgccttgtaaatgatttatccaaaattgctcagggaagaagtggacatgagctgggaatgacacctctgcaggagctcagcctgaggaagaaaggcctggagtgcctcgtgtccattctcaagtgcatggtggagtggagcaaagacctgtatgtgaatcccaaccaccagaccagcctcggtcaggagaggctcacggatcaggaaataggggatgggaaaggccttgacatggcaagacggtgtagtgtgacgtccatggagtccacagtgtcctcggggacccagacaactgttcaggatgaccctgagcaatttgaggtcatcaagcaacaaaaagaaatcattgaacacggcatcgagctgttcaacaagaaacccaagagggggatccagtttctccaggagcagggcatgctgggaacgtcagttgaagacatagcccaattcctgcaccaggaggagcgcctggattccacccaagtaggcgattttctgggagatagcgcaaggttcaacaaggaggtgatgtatgcctacgtggaccaacttgacttctgtgaaaaagaatttgtctcagccctgcggacattcctagaaggtttccgcctacctggagaagcccaaaagattgaccgattaatggagaagtttgccgcaagatacatagaatgcaaccaagggcaaactctgtttgctagtgctgacactgcttatgtcctagcgtattcaattattatgctgactacagacttgcacagtcctcaggtaaaaaataaaatgacgaaagagcagtatattaaaatgaatcggggtatcaatgatagtaaagatctgccagaagagtatctctcaagcatctatgaagagatagaaggcaagaaaattgcaatgaaagaaacaaaagagctaacgattgcaaccaaatctactaagcagaatgtagctagtgaaaagcagcggcggctgctgtacaacttagagatggagcaaatggctaaaacagccaaagctctgatggaggctgtgagccatgccaaagccccgtttaccagtgccactcacctggaccatgtccggccaatgttcaaactggtgtggacgccactattggcagcctacagcatcggactccagaactgtgatgacactgaagtggcctccttgtgtttggaaggcatccgatgtgcaatccgaatcgcctgcatctttggaatgcagctggaacgagatgcctatgttcaggctcttgctcgcttctccctactcacagccagctccagcatcacaaaaatgaagcagaaaaacatcgacaccattaagacgcttatcacagtggctcacaccgatggcaactaccttgggaattcctggcatgagatcttgaaatgcatcagccagctggagctcgctcagctgataggaaccggtgtgaagacgcgctacctgtctggatctgggcgtgaaagagaagggagcctgaagggccacacattggcaggagaagagttcatgggccttggcctcggtaatttggtgagtggcggagtgaataaaagacagatggccagcttccaagaatcggttggtgagaccagctcgcagagtgtggttgtagctgtggacaggatttttactgggtctaccagactggatggaaatgcaatagttgactttgtccgctggctgtgtgctgtgtccatggatgaactggcttccccccaccatcctcgcatgttcagcttgcagaagattgtggagatatcatactacaacatgaatcggatccgactacagtggtctcgaatatggcatgtgattggagatcacttcaataaggttggctgcaaccctaatgaagatgtggctatctttgctgttgactcattaaggcaactctccatgaagtttcttgagaagggtgaattagccaacttccgtttccagaaagattttctgaggccctttgagcatattatgaagaaaaacaggtctcccaccatccgggacatggcgatccgctgcattgcccagatggtgaactcccaggcggccaacatccgctcaggctggaagaacatctttgccgtgttccaccaggcagcctctgatcatgatgggaacattgtggagctggccttccagaccacttgccacattgtcacaactattttccagcaccattttcctgcagccatcgattcctttcaggatgctgtgaagtgcttatcagagttcgcctgcaacgccgctttccctgacacgagcatggaagcgattcggctcatccgcttctgtggcaaatacgtctctgagaggcctcgggtgctacaagaatacacaagtgatgacatgaatgtagctcctggtgacagagtctgggtccgaggctggttccccatcttattcgaactctcctgcatcattaatagatgcaagttagatgtacgaacaaggggactcacagtcatgtttgagatcatgaagagctatggccacacctttgaaaagcactggtggcaggacctgttcagaatcgtgtttcggatttttgacaatatgaaactccctgagcaactgtcagagaaatctgagtggatgacaacaacctgcaatcacgcactttatgctatttgtgatgtttttacccagttttatgaagctttgaatgaagttcttctttctgatgtatttgcacaattgcagtggtgtgtcaaacaagataatgaacagttggcgcgatcaggtacaaattgcttagaaaacttagtaatatccaatggagagaaattcagtcctgaagtctgggatgaaacctgcaactgtatgttggatattttcaaaacaaccatcccacatgttttgctgacatggagacctgtaggaatggaggaagattcatcagaaaagcatttggatgtggatctggaccgccagtctttaagcagcatagataaaaatccctctgagaggggacagagccagctctctaacccaacagatgacagctggaagggtagaccatacgcaaatcagaaactgtttgccagcctcctcatcaagtgtgtggtccagttggaattgatacagaccattgacaacattgtgttctaccctgcgacgagcaaaaaggaggatgcagagcacatggttgccgcccagcaagacacgctggatgcagatatccacatagagacggaggatcagggcatgtataagtacatgtcttcccagcacctcttcaagctgttggactgtttgcaggaatcccattcattctcaaaggccttcaactccaattacgagcagcggactgtcctgtggcgagcaggttttaagggcaagtctaaacccaatcttctaaaacaagaaaccagcagcctggcctgttgtttgaggatcctgtttcgaatgtatgttgatgagaaccgcagggattcctgggaagaaatacagcagagacttttaactgtttgcagtgaagctcttgcctatttcatcactgtgaattctgagagccatcgggaggcctggacaagtctcttgttgttacttctaactaaaaccctcaaaataaatgatgaaaagttcaaagcacatgcttcaatgtactacccctacttgtgtgaaattatgcagtttgacctgatccctgagctccgagcagttctgcggaagttcttcctacggataagtgttgtgtataagatatggataccagaagagccatcacaggtaccagcagcactgtcaccagtgtggtagccctggctgcccaggccagtgctgcagctctgcagaatgttcagcatgccatttctgactggcacatctcgtgaagtttcatagaaacaaggagttggcatcttggatctcagaatggcctggaaacggatggcctctacgctgttccatcacagtctccaactaaggcttatggtatttcattaaactgttgcatacccagttagcacagtaggtggggagtctgcttcatttctatcattccatttttctgattaaactgtcaaatctgtcattgcatatgccatcgttttctagcaaaatcccatgattggctataaacgttttgtaagaagtcactctccttgaaaatactgaacatagctgtataggtttgtgattattagagaatatgttaataaaacttcttgtaacggctaactgccacctaaaatatgctgggttttctgttgtttgagtgtgttagagaaatttgaatgtttttgtcagttacgagtcagcc

SEQ ID NO: 740 - DNA, 6969 bp, human
tcctgccgctgccctccacgcctccaatcccccacctccaccccctctcctttctctcttctcttccttcctctcctcctcctcccctccagccgctgggagccgcgggtcggacgagccgcagcctccttctctgcgtccatgtatgaggggaagaagacgaagaacatgttcctgacccgggctctggagaagatattggccgacaaggaagtgaagaaggcgcatcactcccagctgcgcaaagcttgcgaggtggcgttagaggaaataaaagcggaaactgaaaaacagagtcctcctcatggagaagcaaaagctggatcaagcacccttccaccagtgaaatcaaagacaaattttattgaagcagacaagtacttcttgccttttgagttggcatgccagtccaaatgtcctcgcatagttagtacatctctagattgcttacagaaacttattgcttatgggcacttgactggcaatgctccagatagtacaacaccaggcaaaaaattaattgatagaattattgaaacaatatgtggctgctttcagggccctcagacagatgaaggagttcagctgcagataataaaggctttacttactgcagtaacatcacaacacatagaaattcatgaagggactgtactgcaagctgtgagaacatgttacaatatctacttagcaagcaaaaatctcatcaatcagacaacagccaaagctactctcactcagatgctaaatgttatctttgcacgcatggaaaaccaagcattacaggaagcaaaacaaatggaaaaagaaaggcatcggcagcatcatcatctgttaccgtctccagtaagccatcacgagcctgaatcacctcaacttagatatttgccacctcagactgttgatcatatatcccaagaacacgaaggggaccttgacctccatacaaatgatgtagataaaagtcttcaggatgacacagagcctgaaaatggatctgatatttccagtgcagaaaatgaacagactgaagctgatcaggcaactgcagctgaaacattatctaaaaatgaagtgttatatgacggagaaaaccatgattgtgaggaaaagccacaagacattgtacagaacattgtagaagaaatggtgaacattgttgttggagatatgggagaagggactactataaatgcaagtgcagatggcaacattggaactatagaggatggtagtgacagtgaaaatattcaagcaaatggaattccaggaacaccaatttctgttgcatatacaccatccttacctgatgatagattgtcagtctcttccaatgatactcaggaatctggaaattcttcaggaccttcacctggtgctaagttttcccacattttacaaaaggatgcctttctagtattcaggtcattgtgtaaactgtcaatgaaaccactgtcagatggaccaccagatccaaagtctcatgaactacgatccaagattctttcattgcagttacttctatccattctgcagaatgcaggacctattttcaggacaaatgagatgtttattaatgctattaagcagtatctttgtgttgcactctcaaaaaatggagtctcatctgttccagaggtttttgagctttctctttctatatttcttactttgttgtcaaatttcaagacacatctgaagatgcaaattgaggtgttctttaaagaaattttcttatacattttggaaacttctaccagctcatttgatcacaaatggatggttattcagacactgacgaggatttgtgcagatgctcagagtgtagtggatatttatgtaaactatgactgtgacttaaatgcagccaatatatttgaaagactagtaaatgatctatcaaaaattgctcaaggaaggggcagtcaagaacttggtatgagtaatgttcaggaattgagcctgaggaaaaaaggtttagaatgcttagtgtcgatttcgaagtgtatggttgaatggagtaaggatcagtatgtgaatcccaactcccagacaactcttggtcaggaaaaaccctcagagcaagagatgagtgaaatcaaacaccctgagacaataaacagatacggaagtttaaattccctggagtcaacatcatcatcaggaataggcagctacagtacacagatgtctggcactgataatccagaacaatttgaggtcctaaagcaacaaaaagaaataatagaacaagggatagatttatttaataagaaaccaaagagaggaatacagtacctccaagaacaagggatgcttggcaccacacctgaagatattgcccaattcttacatcaagaggaaagattagactctactcaagtgggtgagttcctgggagataatgataaatttaacaaagaagtcatgtatgcatatgtggaccaacatgacttttcaggaaaagacttcgtttcagcccttcgtatgtttctagaaggatttcgtcttccaggggaagctcagaaaatcgatcgattaatggaaaaatttgctgcaagatacctagaatgcaaccaaggacaaactctctttgctagtgcggatacagcttatgttttggcttattcaattatcatgttgaccacagaccttcacagtccacaggtgaaaaataaaatgacaaaggaacaatacattaagatgaatagaggtatcaatgacagtaaagaccttcctgaagagtatctatcagccatctataatgaaatagctgggaaaaagatatcaatgaaagaaacaaaagaactaacaatccctacaaaatcaagtaaacagaatgtagccagtgaaaaacaaagaagacttctgtataacttagaaatggagcagatggccaagacagctaaagcactcatggaggccgtgagccatgttcaggcaccctttacaagtgcaacacatttggagcatgtgaggcccatgtttaagttggcttggacgccttttctggctgcattcagtgtgggtctacaagattgtgatgatactgaagtagcctctctttgcctggaaggtataagatgtgcaatcagaattgcatgcattttcagcattcagctggagagagatgcatatgtccaggcactagcaagatttaccttactcacagtgagttccggtattactgaaatgaaacagaagaacattgacacaataaaaacacttatcacagtggctcatacagatggaaattatttaggaaattcatggcatgagattctgaagtgcatcagtcagttgaagctggcacagcttataggaactggagtgaaacctcgatacatttctggaacagtgcgaggcagagaaggatctcttactggaacaaaagatcaggctcctgatgaatttgtgggtttagggctagttggaggaaatgtggactggaaacagatagcaagtattcaggaatccattggagaaaccagttctcagagtgttgttgttgctgtagatagaatattcacaggatctacaaggctagatggaaatgccattgtggattttgtccgttggctctgtgctgtgtctatggatgaattactttccacgacacacccaagaatgtttagtctacaaaaaatagtagaaatatcatattacaacatgggaagaataagattacagtggtctcgaatttgggaagttattggagatcattttaataaggttgggtgtaatcctaatgaagatgtagctatttttgcagtagactccttgaggcagttgtcaatgaagttcttagagaaaggggagcttgctaacttcagattccagaaggatttcttaagaccttttgaacatataatgaaacggaacaggtctccaacaattcgagatatggttgtacggtgtatagcacagatggttaattctcaagctgctaacattcgatctggatggaagaacattttctctgtatttcatctagctgcatctgatcaagatgaaagcatagtggaacttgcattccaaacaaccgggcacattgtcacccttgtatttgaaaaacactttccagcgaccattgattctttccaggatgcagtgaagtgtttgtctgaatttgcgtgcaatgcagctttcccagacacaagtatggaagcaattcgacttattcgccattgtgcaaaatatgtgtctgatagacctcaggctttcaaggaatacacaagcgatgatatgaacgtagcacctgaagacagggtgtgggtgagaggatggttcccaattctctttgagttatcctgtatcatcaatagatgcaaattagatgtaagaaccaggggtttaacagtaatgtttgaaataatgaaaacatatggccacacttatgagaaacactggtggcaggatttatttagaattgttttcagaatctttgacaatatgaaattgccagaacaacagacagagaaagctgaatggatgacaacaacttgcaatcatgcactttatgcaatctgtgatgtattcactcagtatttagaagtactcagtgatgtacttttggatgacatttttgctcagctctactggtgtgtgcagcaagacaatgagcagttagcgcgatctggtacaaactgtttagagaatgttgttattctgaatggtgaaaaatttaccctagaaatctgggataaaacttgcaactgcacactggatatcttcaaaaccacaatcccacatgcgctgttgacctggcgacccaattctggagaaactgcccccccacctccatctcctgtaagtgaaaagccattggatacaatatcacagaagtctgtagatattcatgattctattcaaccaaggtctgtggataacagaccacaagcaccactggtttctgcgtctgctgttaatgaagaagtcagcaaaattaaatctacagcaaaatttccagaacaaaaattgtttgctgccctgttgattaaatgtgttgtgcagctggaactcatccagactatcgacaacattgtcttcttcccagccacaagtaagaaagaagatgcagaaaacttagctgcagcacagagagatgcggtggactttgatgttcgcgttgatactcaagaccaaggaatgtaccgctttttaacatcacaacaactttttaagctactggactgcttattagagtcacatagatttgcaaaagcgtttaattccaacaacgaacagaggactgccctgtggaaagcaggattcaaaggcaaatccaagcccaaccttctgaagcaggagaccagcagcctggcctgtgggctgcgcattctcttccggatgtacatggatgagagccgcgttagtgcctgggaggaggtccagcagaggcttttgaatgtctgcagtgaagcactaagttacttcctcactctaacatcagaaagtcatcgagaagcctggactaacttactgcttttgtttctaactaaagttctaaagataagtgataataggtttaaagctcatgcatcattctactaccctctcttatgtgaaattatgcaatttgacttgattcctgaacttcgtgctgttcttagaagattttttctgcgaatcggagtagtttttcagatatcacaaccacctgaacaggaacttggtattaacaaacagtgatgggaacttaatatttttgttggcatttacatccctctgctctttaaaaggacgctggagctgaggtttcctacctgaaaaatgatttctctggattgcagtgtctgagttactggtaaagatgcttagaagtcttactcaaacttgcaacactccagtcccttttagtgctggtggattttgtgtgttatattggcctcatgttgagcagaaagcctgtttaaacagtgtcagctcatgctcacgggtccttccctgtcttccacggcaggaaaagccccacgtttttggcaggtgtggaagtgaaacttacccaaagaactatagatgtaaagattgaacttctacaagaagtacaactcagggagagctgtattttgaaggataaaatgtttataattggggagtggggagagaagaagaaattattgttcatggtaaaagatatttagcaactatggtattcttattctgaagatttttgcacactcaggctatctgagatactggtaatcatcctgtgaaaaatgtacagagatgcaggtctgtaatataaaaatcttaaaacattatatagttcttcctgcactgttttctttattttcttattcatttgctaaatacccataatattttgtcaaatgcactaaacatttgggtggaactttcttttttattttatagggatttttagttttgccctttttggtaggtggtgattttgaggctgtaacatgcccagaagctgttgtggccgacacttcaacaatagggaaaaaaaggtagaaaatatccctactgacagtaactacctgtcacatatttctcttaggacttttaaagatgagccattaaaatagaatgatcctttatggaccaaaacttgaatcactgcaaaatgaatccagattgctgtcattttcttttcttttgggtggtggggcttgatgtagattttactctatgtacagaatttaacgttgaatatattaaaataacaaatctggcatggtttgcggaggttagatttactggaaatgtattcatactgtgaattgtgctctgatggttaaaagacaagattgtcaagcattccgtattaacagtggatgtagaaaattttttcagatggacaaaatgtatatggtacagatgtaaagttttctatgtaaaaaattctgtacaactttctgtacaatattgattcccatctggcatattctaatcaggttataggtcaataaagtttttgaattataaaaaaaaaaaaaaaaaaaa

SEQ ID NO: 741 - DNA, 770 bp, human
cggagcagctctacccctcacgacgcagacatggcagcgcagaaggaccagcagaaagatgccgaggcggaagggctgagcggcacgaccctgctgccgaagctgattccctccggtgcaggccgggagtggctggagcggcgccgcgcgaccatccggccctggagcaccttcgtggaccagcagcgcttctcacggccccgcaacctgggagagctgtgccagcgcctcgtacgcaacgtggagtactaccagagcaactatgtgttcgtgttcctgggcctcatcctgtactgtgtggtgacgtcccctatgttgctggtggctctggctgtctttttcggcgcctgttacattctctatctgcgcaccttggagtccaagcttgtgctctttggccgagaggtgagcccagagcatcagtatgctctggctggaggcatctccttccccttcttctggctggctggtgcgggctcggccgtcttctgggtgctgggagccaccctggtggtcatcggctcccacgctgccttccaccagattgaggctgtggacggggaggagctgcagatggaacccgtgtgaggtgtcttctgggacctgccggcctcccgggccagctgccccacccctgcccatgcctgtcctgcacggctctgctgctcgggcccacagcgccgtcccatcacaagcccggggagggatcccgcctttgaaaataaagctgttatgggtgtcattcaggaaaaaaaaaaaaaaaaaaaaaa

SEQ ID NO: 742 - DNA, 1935 bp, human
ctggtcccgagcacgagctgtgaggggattcacttgtgtgcggaactcctcggaaccatggcgtccctttcccttgcacctgttaacatctttaaggcaggagctgatgaagagagagcagagacagctcgtctgacttcttttattggtgccatcgccattggagacttggtaaagagcaccttgggacccaaaggcatggacaaaattcttctaagcagtggacgagatgcctctcttatggtaaccaatgatggtgccactattctaaaaaacattggtgttgacaatccagcagctaaagttttagttgatatgtcaagggttcaagatgatgaagttggtgatggcactacctctgttaccgttttagcagcagaattattaagggaagcagaatctttaattgcaaaaaagattcatccacagaccatcatagcgggttggagagaagccacgaaggctgcaagagaggcgctgttgagttctgcagttgatcatggttccgatgaagttaaattccgtcaagatttaatgaatattgcgggcacaacattatcctcaaaacttcttactcatcacaaagaccactttacaaagttagctgtagaagcagttctcagactgaaaggctctggcaacctggaggcaattcatattatcaagaagctaggaggaagtttggcagattcctatttagatgaaggcttcctgttggataaaaaaattggagtaaatcaaccaaaacgaattgaaaatgctaaaattcttattgcaaatactggtatggatacagacaaaataaagatatttggttcccgggtaagagttgactctacagcaaaggttgcagaaatagaacatgcggaaaaggaaaaaatgaaggagaaagttgaacgtattcttaagcatggaataaattgctttattaacaggcaattaatttataattatcctgaacagctctttggtgctgctggtgtcatggctattgagcatgcagattttgcaggtgtggaacgcctagctcttgtcacaggtggtgaaattgcctctacctttgatcacccagaactggtgaagcttggaagttgcaaacttatcgaggaagtcatgattggagaagacaaactcattcacttttctggggttgcccttggtgaggcttgtaccattgttttgcgtggtgccactcaacaaattttagatgaagcagaaagatcattgcatgatgctctttgtgttcttgcgcaaactgtaaaggactctagaacagtttatggaggaggctgttctgagatgttgatggctcatgctgtgacacagcttgccaatagaacaccaggcaaagaagctgttgcaatggagtcttatgctaaagcactgagaatgttgccaaccatcatagctgacaatgcaggctatgacagtgcagacctggtggcacagctcagggctgctcacagtgaaggcaataccactgctggattggatatgagggaaggcaccattggagatatggctatcctgggtataacagaaagttttcaagtgaagcgacaggttcttctgagtgcagctgaagcagcagaggtgattctgcgtgtggacaacatcatcaaagcggcacccaggaaacgtgtccctgatcaccacccctgttaagcattcccacgtgctgtcgatctttggaccagtttctagcaaagttgtgtttgaaagatactctattaaagaagactgtggaatctgtttatcggtgcccattatatccttaagtttggatatttagctgaccttcgctttaacataggtctaatttatttgccgtgtcattttccatacaaatcagttgatttaaaggagttcatttcgcatactgggcattaaaataaaaatttgaacaatgaaaggaaaaaaaggagaaaaaaaaaa

SEQ ID NO: 743 - DNA, 921 bp, human
gacaggtcgcctgactgggctcctccccgggcccgccccgacaggtttgtcttgtgaccgcgggcggccgctgcttctttcccgagcttggaacttcgttatccgcgatgcgtttcctggcagctacattcctgctcctggcgctcagcaccgctgcccaggccgaaccggtgcagttcaaggactgcggttctgtggatggagttataaaggaagtgaatgtgagcccatgccccacccaaccctgccagctgagcaaaggacagtcttacagcgtcaatgtcaccttcaccagcaatattcagtctaaaagcagcaaggccgtggtgcatggcatcctgatgggcgtcccagttccctttcccattcctgagcctgatggttgtaagagtggaattaactgccctatccaaaaagacaagacctatagctacctgaataaactaccagtgaaaagcgaatatccctctataaaactggtggtggagtggcaacttcaggatgacaaaaaccaaagtctcttctgctgggaaatcccagtacagatcgtttctcatctctaagtgcctcattgagttcggtgcatctggccaatgagtctgctgagactcttgacagcacctccagctctgctgcttcaacaacagtgacttgctctccaatggtatccagtgattcgttgaagaggaggtgctctgtagcagaaactgagctccgggtggctggttctcagtggttgtctcatgtctctttttctgtcttaggtggtttcattaaatgcagcacttggttagcagatgtttaattttttttttaacaacattaacttgtggcctctttctacacctggaaatttactcttgaataaataaaaactcgtttgtcttgtcttctgcaaaaaaaaaaaaaaaaaaaaaaaaa

SEQ ID NO: 744 - DNA, 857 bp, human
gcgtgggcgtgagatggcggcggcagcggtgagcagcgccaagcggagcctgcggggagagctgaagcagcgtctgcgggcgatgagtgccgaggagcggctacgccagtcccgcgtactgagccagaaggtgattgcccacagtgagtatcaaaagtccaaaagaatttccatctttctgagcatgcaagatgaaattgagacagaagagatcatcaaggacattttccaacgaggcaaaatctgcttcatccctcggtaccggttccagagcaatcacatggatatggtgagaatagaatcaccagaggaaatttctttacttcccaaaacatcctggaatatccctcagcctggtgagggtgatgttcgggaggaggccttgtccacagggggacttgatctcatcttcatgccaggccttgggtttgacaaacatggcaaccgactggggaggggcaagggctactatgatgcctatctgaagcgctgtttgcagcatcaggaagtgaagccctacaccctggcgttggctttcaaagaacagatttgcctccaggtcccagtgaatgaaaacgacatgaaggtagatgaagtcctttacgaagactcgtcaacagcttaaatctggattactacagccaaataatcagtgttttatatgagagtaaagcaaagtatgtgtatttttcccttgtcaaaaattagttgaaattgttcattaatgtgaatacagactgcattttaaaattgtaattatgaaataccttatataaaaccatctttaaaaaccaatagaagtgtgaatagtagaatattaattaaaatggaggctatcagcctgtgattttcagctt

SEQ ID NO: 745 - DNA, 1375 bp, human
aaaagcaagccaggaggtgcttgcggccgcttctagtagtttccaggcgctgccgggcggctggcactaagcggtcctgaggctgtggctacggctgctccggagctggtggcgccgcgataggagagccgatggccaagtggggtgagggagacccacgctggatcgtggaggagcgggcggacgccaccaacgtcaacaactggcactggacggagagagatgcttcaaattggtccacggataagctgaaaacactgttcttggcagtgcaggttcaaaatgaagaaggcaagtgtgaggtgacggaagtgagtaagcttgatggagaggcatccattaacaatcgcaaagggaaacttatcttcttttatgaatggagcgtcaaactaaactggacaggtacttctaagtcaggagtacagtacaaaggacatgtggagatccccaatttgtctgatgaaaacagcgtggatgaagtggagattagtgtgagccttgccaaagatgagcctgacacaaatctcgtggccttaatgaaggaagaaggggtgaaacttctaagagaagcaatgggaatttacatcagcaccctcaaaacagagttcacccagggcatgatcttacctacaatgaatggagagtcagtagacccagtggggcagccagcactgaaaactgaggagcgcaaggctaagcctgctccttcaaaaacccaggccagacctgttggagtcaaaatccccacttgtaagatcactcttaaggaaaccttcctgacgtcaccagaggagctctatagagtgtttaccacccaagagctggtgcaggcctttacccatgctcctgcaacattagaagcagacagaggtggaaagttccacatggtagatggcaacgtctctggggaatttactgatctggtccctgagaaacatattgtgatgaagtggaggtttaaatcttggccagagggacactttgccaccatcaccttgaccttcatcgacaagaacggagagactgagctgtgcatggaaggtcgaggcatccctgctcctgaggaagagcggacacgacagggctggcagcggtactactttgagggcattaaacagacctttggctatggcgcacgcttattttagggccagcggcaggggactccagcctgctggacacttcagtccagctctctcctgactggggcttgcgactcacaggattgcatcgtcccagctgctaacttggggccggggcccctcccttccacatataccttgggtttgtgcatgttttctgctgggtgggttcagagggcaatttctcttttatgtgtacatatgctaaataaacataatttaaaaaacaaaaa

SEQ ID NO: 746 - DNA, 3322 bp, human
gaaagctgtatttgctgcacgtggaaatctccgttattttccagcacccaacagtagcgtaatgggagtaacggacttaacctcatttctctttcagagcatttagccttcatatgcccttccctgcatgcttcccccaggccgtcaagacttgagttctgcctcgcttcccggcgcggtcgcagccctcagcccacttaggataatggcgacagctgaggtactgaacattggtaaaaaattatatgagggtaaaacaaaagaagtctacgaattgttagacagtccaggaaaagtcctcctgcagtccaaggaccagattacagcaggaaatgcagctagaaaaaaccacctggaaggaaaagctgcaatctcaaataaaatcaccagttgtatttttcagttattacaggaagcaggtattaaaactgccttcaccagaaaatgtggggagacagctttcattgcaccgcagtgtgaaatgattccaattgaatgggtttgcagaagaatagcaactggttcttttctcaaaagaaatcctggtgtcaaggaaggatataagttttacccacctaaagtggagttgtttttcaaggatgatgccaataatgacccacagtggtctgaggaacagctgattgctgcaaaattttgctttgctggacttcttataggccagactgaagtggatatcatgagtcatgctacacaggctatatttgaaatactggagaaatcctggttgccccagaattgtacactggttgatatgaagattgaatttggtgttgatgtaaccaccaaagaaattgttcttgctgatgttattgacaatgattcctggagactctggccatcaggagatcgaagccaacagaaagacaaacagtcttatcgggacctcaaagaagtaactcctgaagggctccaaatggtaaagaaaaactttgagtgggttgcagagagagtagagttgcttttgaaatcagaaagtcagtgcagggttgtagtgttgatgggctctacttctgatcttggtcactgtgaaaaaatcaagaaggcctgtggaaattttggcattccatgtgaacttcgagtaacatctgcgcataaaggaccagatgaaactctgaggattaaagctgagtatgaaggggatggcattcctactgtatttgtggcagtggcaggcagaagtaatggtttgggaccagtgatgtctgggaacactgcatatccagttatcagctgtcctcccctcacaccagactggggagttcaggatgtgtggtcttctcttcgactacccagtggtcttggctgttcaaccgtactttctccagaaggatcagctcaatttgctgctcagatatttgggttaagcaaccatttggtatggagcaaactgcgagcaagcattttgaacacatggatttccttgaagcaggctgacaagaaaatcagagaatgtaatttataagaaagaatgccattgaattttttaggggaaaaactacaaatttctaatttagctgaaggaaaatcaagcaagatgaaaaggtaattttaaattagagaacacaaataaaatgtattagtgaataaatgcttctctagatccatattaataaacatgagcatctaacccctcctttcttaggctagacaccaagatatttcagccagcctttatcattcctcttactttatcctttttccttaagtattggtggtcactactattgagtttcttccttaacactgattaaatgatcttaactccctcagctaaaactggcattactgactcccagctatatttctccagacttgcatttttttttttttttttgagacagggtctcactgtcgcccaggctggagtgcagtggcgtgatctcagttcactgctgctttccctcctgggctcaagcagttctcccacctcagcctctcgactaacagggactataatcttgcagcaccatgccgagctaattttattttttgtagagatgagctctcactatgtcacccaggttcgtctcaaactcctgaaccctagtaattctcctatctcagcctcccaaagtgctagggttacagacatgagccactgtgcctgtctagacttgtactttcaactgtccatttctccctgtctgtcccatgggcactcatgaaaaaacagaatgctcccaactttattcatcttccaagcctgtagctcttggtatactcactgttgcaagtcagaagcttgatttcatcattgatgtttttctcacgtttcacatctcactcatcaccaagtcatgttggtgttaatttctgattaacccttgaatttaccgtcttctcatcctctgtacaaaagcctcaagtgagggtcaaattcaacattatcctgatctagacagcccccattctcaatccacccttttccaagttgattgcccaaggacttctaacaataaactctcttttgcaccacagacttctttgaaaatatacatgctgttgaccctctctgtagaaaaccgcacacataaaacttaccaacagatttcattggttcttgggttctcccgaagcctatccatggtttatagattaagaattgatgaggtagctgggcacagtggctcacacctacgatcacagcacttcgggaggctgaagcaagcagatcacttgaggtcaggagtttgagaccagcctggccaacatggtgaaaccctgtctctactaaaaatacaaaaagtagccagccgtgatgacaggcacctgtaatcccagctactcgggaggctgaggcatgagaattgcttgaacccgggaggcggaggttgcagtgagcctggatcatgccactgcactccaacctgggcagcagagcaagactctgtctcaaaaggggaaaaaaaaaattgctgatgtgacccatgaagggaactcattttcctcgtaattttggactgccacacattggtacctttagttctctgaaggcccacgtttttatcattaagacctatttgttagctagtagagctttatgttcgctgtccatgaaaccttctgtaaccacagtgactacaagtagttctttctctattgaattattaggtccagaatagaagatgtcattgtacactttatttccctcacactgtgttatgctctgatgtgctatgcttagctatctgtcagagattagtaaattataaaactcatgtgtactacttaagtttatatcttatgctagtttataagaacaattaaaaggacttagaagattaaaaaaaaaaaaaaaaaa

SEQ ID NO: 747 - DNA, 2381 bp, human
agaaacgtgacacaccagccctctcggaggggtttcggaccgaagggaagaagctgcgccgtgtcgtccgtctccctgcgcgccgcgggcacttctcctgggctctccccgaactctcccgcgacctctgcgcgccctcaggccgccttccccgccctgggctcgggacaacttctggggtggggtgcaaagaaagtttgcggctcctgccgccggcctctccgcctcttggcctaggaggctcgccgcccgcgcccgctcgttcggccttgcccgggaccgcgtcctgccccgagaccgccaccatgaacaagctttacatcggcaacctcaacgagagcgtgacccccgcggacttggagaaagtgtttgcggagcacaagatctcctacagcggccagttcttggtcaaatccggctacgccttcgtggactgcccggacgagcactgggcgatgaaggccatcgaaactttctccgggaaagtagaattacaaggaaaacgcttagagattgaacattcggtgcccaaaaaacaaaggagccggaaaattcaaatccgaaatattccaccccagctccgatgggaagtactggacagcctgctggctcagtatggtacagtagagaactgtgagcaagtgaacaccgagagtgagacggcagtggtgaatgtcacctattccaaccgggagcagaccaggcaagccatcatgaagctgaatggccaccagttggagaaccatgccctgaaggtctcctacatccccgatgagcagatagcacagggacctgagaatgggcgccgagggggctttggctctcggggtcagccccgccagggctcacctgtggcagcgggggccccagccaagcagcagcaagtggacatcccccttcggctcctggtgcccacccagtatgtgggtgccattattggcaaggagggggccaccatccgcaacatcacaaaacagacccagtccaagatagacgtgcataggaaggagaacgcaggtgcagctgaaaaagccatcagtgtgcactccacccctgagggctgctcctccgcttgtaagatgatcttggagattatgcataaagaggctaaggacaccaaaacggctgacgaggttcccctgaagaccctggcccataataactttgtagggcgtctcattggcaaggaaggacggaacctgaagaaggtagagcaagataccgagacaaaaatcaccatctcctcgttgcaagaccttaccctttacaaccctgagaggaccatcactgtgaagggggccatcgagaattgttgcagggccgagcaggaaataatgaagaaagttcgggaggcctatgagaatgatgtggctgccatgagcctgcagtctcacctgacccctggcctgaacctggctgctgtaggtcttttcccagcttcatccagcgcagtcccgccgcctcccagcagcgttactggggctgctccctatagctcctttatgcaggctcccgagcaggagatggtgcaggtgtttatccccgcccaggcagtgggcgccatcatcggcaagaaggggcagcacatcaaacagctctcccggtttgccagcgcctccatcaagattgcaccacccgaaacacctgactccaaagttcgtatggttatcatcactggaccgccagaggcccaattcaaggctcagggaagaatctatggcaaactcaaggaggagaacttctttggtcccaaggaggaagtgaagctggagacccacatacgtgtgccagcatcagcagctggccgggtcattggcaaaggtggaaaaacggtgaacgagttgcagaatttgacggcagctgaggtggtagtaccaagagaccagacccctgatgagaacgaccaggtcatcgtgaaaatcatcggacatttctatgccagtcagatggctcaacggaagatccgagacatcctggcccaggttaagcagcagcatcagaagggacagagtaaccaggcccaggcacgaaggaagtgaccagcccctccctgtcccttcgagtccaggacaacaacgggcagaaatcgagagtgtgctctccccggcaggcctgagaatgagtgggaatccgggacacctgggccgggctgtagatcaggtttgcccacttgattgagaaagatgttccagtgaggaaccctgatctctcagcccccaaacacctacccaattggcccaacactgtctgcccctcggggtgtcagaaattctagcgcaaggcacttttaaacgtggattgtttaaagaagctctccaggccccaccaagagggtggatcacacctcagtgggaagaaaaataaaatttccttcaggtttt

SEQ ID NO: 748 - DNA, 1270 bp, human
ggcacgaggctgcgccggaagtccctagccaggcctggcggtaaccttgggggcctcactgcagccgccgctgctgttggagtgggctttgcgagtctgaacgttggcggggctaggctcgttaactgccgagagcctccgggtttgcggtggaggacgctgaggcccgtggggggcaggcacccgggcgccgggcctcccagccgacatgtctctagtggcggaagccttcgtctcccagattgcagctgcagaaccttggcctgaaaatgctacattatatcagcaattgaaaggggagcaaattttactttctgacaatgcagcttctcttgcagtgcaggcctttttgcaaatgtgtaacttgcctatcaaagtagtttgtagggcaaatgcagaatatatgtctccatctggtaaagtaccttttattcatgtgggaaatcaagtagtatcagaacttggtccaatagtccaatttgttaaagccaagggccattctcttagtgatgggctggaggaagtccaaaaagcagaaatgaaagcttacatggaattagtcaacaatatgctgttgactgcagagctgtatcttcagtggtgtgatgaagctacagtaggggagatcactcatgctaggtatggatctccttacccttggcctctgaatcatattttggcctatcaaaaacagtgggaagtcaaacgtaagatgaaagctattggatggggaaagaagactctggaccaggtcttagaggatgtagaccagtgctgtcaagctctctctcaaagactgggaacacaaccgtatttcttcaataagcagcctactgaacttgacgcactggtatttggccatctatacaccattcttaccacacaattgacaaatgatgaactttctgagaaggtgaaaaactatagcaacctccttgctttctgtaggagaattgaacagcactattttgaagatcgtggtaaaggcaggctgtcatagagttatgtgttagtctcaggagtcttaacttttgaaatatgttttacttgaatgttacattagatattggtgtcagaattttaaaaccaaattactgctttttgaaacctcaaattatataatgtatcttatgtatgtgctttatattgttatttgtgtatacattaaaataattctgaattatttaatctgatatgttgtattctgtatcttgaaatttttgtttccttgaaacatgcatgcatttaaaaataaagcttaaacaactgt

SEQ ID NO: 749 - DNA, 2783 bp, human
gattgcgagccaggaggaggaagccggcggtggccccgtcagcagccggctgctgagaggccggtaggcggcggcggtcccgaggggcggcggccgcgctgctccctgagaacgggtcccgcagctgggcaggcgggcggcctgagggcgcggagccatgaagctgtacagcctcagcgtcctctacaaaggcgaggccaaggtggtgctgctcaaagccgcatacgatgtgtcttccttcagctttttccagagatccagcgttcaggaattcatgaccttcacgagtcaactgattgtggagcgctcatcgaaaggcactagagcttctgtcaaagaacaagactatctgtgccacgtctacgtccggaatgatagtcttgcaggtgtggtcattgctgacaatgaatacccatcccgggtggcctttaccttgctggagaaggtactagatgaattctccaagcaagtcgacaggatagactggccagtaggatcccctgctacaatccattacccagccctggatggtcacctcagtagataccagaacccacgagaagctgatcccatgactaaagtgcaggccgaactagatgagaccaaaatcattctgcacaacaccatggagtctctgttagagcgaggtgagaagctagatgacttggtgtccaaatccgaggtgctgggaacacagtctaaagccttctataaaactgcccggaaacaaaactcatgctgtgccatcatgtgatgcagcctgccagaggcccaatgctggaatggcaccatcattcacatcagaactgcagcccctggaaaagaagagacagccatagacgaggagccagagtgggggcagactggccatttttattttgaagttcctgcgagaaatggatggtggaagggtggcgaatgttcaaattcatatgtgtggtagtgattcttggaaagaatttgaggtccccaaaggtgtatttttgggcaaatgaaaccataaactccgactggcttctgtagatgccaaagggctctttttcagctaaccctgggaaggctctgtgggagggaggtcggagccagctgtttctcgatctttggtatatctttggatcttatttgtacattaatgatattaacactccagtggggggtggggagtccctgatgctagggctggggtgggtggagtttgaagactcttgggaaagcctctcctggggccactgttgggggtgggagtgagcccaccacagaggccacaggcaggcccccacttcaggcccaaggcctggggcggggggaacagtcactgggtctcagattctgagactgttgtttagcttacctttctgctaggattggcttcccgcagagggcagggcccatcctaagcagcttccaagtcccacaaaggtggcttgtgggaggatttggaaggagctgcattgtgggcggggagtgtgtgggttgggttcgtaccagcaagtagactaggaactgagcccaggaaagggggatgttttcctggtgtttggatggtcagctgggagtgtccatcatcaggggaagatcaaacacaggtgcactcagctgcccagggcctctgggacacttgccttgacttgcaacttgccttgaacatcacgatcaaagcagcaggtgctgtggtctctcaaaattgatttttatttgactctgtggctctaagactgccttgaaccgcctgaggcctatgcatctgaacaagtgggtctctcccttgagcaccaggagtgggtgccagccggccccgaggattcccagcaccccacctatggtcttgccagcataggcttgctagttccttcttggtcagaggtagctgcagaggggggaggccaagggtttggtctaagctgtgccctgccacctggcaggaggcccactcactgcccaagtcatggcaacaggctggagcagcccaggagatgggcctaaaatgttctggatcccttgggtcctagtgttatgttccagtctgcccacctgtgctcaggatgcagccctgggatccagcacccatggaagcttctgctgggatggtgtcacctatgggttttgaaccagtgtggtatggtccttgggagctctgctctgagcttgccacactgctgagagcacccactgtcctgaccagagtctcagtggtcctgacccccaatgtgggcaggggctgggcaggagggtggggtctgctgtgggttcagaggactccacctcctggctggtttacctgctgctgcccattttctctgggtactgctggccagaggactttagcctacccctgaagagcctgtccatgtcattttcctactgccatagataccctaagcccagggccccttgaggcccagactcagcctgcccactggtgccggagacggagtggagtgggcctggatccgagggatgctacctctccctttcccacttgaggaccctggggagagatgggggcggggaaaatggaggtatgaatttggggtaagaggaagtgagatctccgcttgcaggtcagcccctgccttgcagggcgggctggcttgactcaggccctgtgagatagagggcccagcccagccccacccacagatcccctgctcctgttgtgttctgttgtaaatcatttggcgagactgtattttagtaactgctgcctaacttccctgtgttctatttgagaggcgcctgtctggataaagttgtcttgaaatttcaaaaaaaaaaaaaaaaaa

SEQ ID NO: 750 - DNA, 3331 bp, human
cagagggcaccgcccaggcctcggaaggtgtcagggagaactttccgtggtttcagcgtcgtcgcctggagcggcggtttagagagccgagcctgatgggcgccaaggccggctggctgcttggagcgctgcctcgaagggactgcgtaaggaagctaatccggagaacccaggccagagcctgaaatatggcgacctgcatcggggagaagatcgaggattttaaagttggaaatctgcttggtaaaggatcatttgctggtgtctacagagctgagtccattcacagtggtttggaagttgcaatcaaaatgatagataagaaagccatgtacaaagcaggaatggtacagagagtccaaaatgaggtgaaaatacattgccaattgaaacatccttctatcttggagctttataactattttgaagatagcaattatgtgtatctggtattagaaatgtgccataatggagaaatgaacaggtatctaaagaatagagtgaaacccttctcagaaaatgaagctcgacacttcatgcaccagatcatcacagggatgttgtatcttcattctcatggtatactacaccgggacctcacactttctaacctcctactgactcgtaatatgaacatcaagattgctgattttgggctggcaactcaactgaaaatgccacatgaaaagcactatacattatgtggaactcctaactacatttcaccagaaattgccactcgaagtgcacatggccttgaatctgatgtttggtccctgggctgtatgttttatacattacttatcgggagaccacccttcgacactgacacagtcaagaacacattaaataaagtagtattggcagattatgaaatgccaacttttttgtcaatagaggccaaggaccttattcaccagttacttcgtagaaatccagcagatcgtttaagtctgtcttcagtattggaccatccttttatgtcccgaaattcttcaacaaaaagtaaagatttaggaactgtggaagactcaattgatagtgggcatgccacaatttctactgcaattacagcttcttccagtaccagtataagtggtagtttatttgacaaaagaagacttttgattggtcagccactcccaaataaaatgactgtatttccaaagaataaaagttcaactgatttttcttcttcaggagatggaaacagtttttatactcagtggggaaatcaagaaaccagtaatagtggaaggggaagagtaattcaagatgcagaagaaaggccacattctcgataccttcgtagagcttattcctctgatagatctggcacttctaatagacagtctcaagcaaaaacatatacaatggaacgatgtcactcagcagaaatgctttcagtgtccaaaagatcaggaggaggtgaaaatgaagagaggtactcacccacagacaacaatgccaacatttttaacttctttaaagaaaagacatccagtagttctggatcttttgaaagacctgataacaatcaagcactctccaatcatctttgtccaggaaaaactccttttccatttgcagacccgacacctcagactgaaaccgtacaacagtggtttgggaatctgcaaataaatgctcatttaagaaaaactactgaatatgacagcatcagcccaaaccgggacttccagggccatccagatttgcagaaggacacatcaaaaaatgcctggactgatacaaaagtcaaaaagaactctgatgcttctgataatgcacattctgtaaaacagcaaaataccatgaaatatatgactgcacttcacagtaaacctgagataatccaacaagaatgtgtttttggctcagatcctctttctgaacagagcaagactaggggtatggagccaccatggggttatcagaatcgtacattaagaagcattacatctccgttggttgctcacaggttaaaaccaatcagacagaaaaccaaaaaggctgtggtgagcatacttgattcagaggaggtgtgtgtggagcttgtaaaggagtatgcatctcaagaatatgtgaaagaagttcttcagatatctagtgatggaaatacgatcactatttattatccaaatggtggtagaggttttcctcttgctgatagaccaccctcacctactgacaacatcagtaggtacagctttgacaatttaccagaaaaatactggcgaaaatatcaatatgcttccaggtttgtacagcttctaagatctaaatctcccaaaatcacttattttacaagatatgctaaatgcattttgatggagaattctcctggtgctgattttgaggtttggttttatgatggggtaaaaatacacaaaacagaagatttcattcaggtgattgaaaagacagggaagtcttacactttaaaaagtgaaagtgaagttaatagcttgaaagaggagataaaaatgtatatggaccatgctaatgagggtcatcgtatttgtttagcactggaatccataatttcagaagaggaaaggaaaactaggagtgctccctttttcccaataatcataggaagaaaacctggtagtactagttcacctaaggccttatcacctcctccttctgtggattcaaattacccaacgagagatagagcatctttcaacagaatggtcatgcatagtgatgcttctccaacacaggcaccaatccttaatccctctatggttacaaatgaaggacttggtcttacaactacagcttctggaacagacatctcttctaatagtctaaaagattgtcttcctaaatcagcacaacttttgaaatctgtttttgtgaaaaatgttggttgggctacacagttaactagtggagctgtgtgggttcagtttaatgatgggtcccagttggttgtgcaggcaggagtgtcttctatcagttatacctcaccaaatggtcaaacaactaggtatggagaaaatgaaaaattaccagactacatcaaacagaaattacagtgtctgtcttccatccttttgatgttttctaatccgactcctaattttcattgattaaaactcctttcagacatataagtttaataaataacttttttgttgactttcaagtaaagtgattttttttaatttaacataaagtcttcagaaagcctttctatgaaagaattttaacctataatgtaaaccatgtatctgagataacaaagcagaatgaaacttgagtcacttactaaatatagtggatataaaatagaacacctgactttgctcttagaccataa

SEQ ID NO: 751 - DNA, 2806 bp, human
gtgaaatcccattctctggctggagacacagatggcctcaaatgagagagatgctatatcgtggtaccaaaagaagattggagcctacgatcagcagatatgggaaaagtcaatcgaacagactcagattaagggtttgaaaaacaaaccgaaaaagatgggccacataaagccagacttgattgacgttgacttaatcagagggtcaacatttgccaaagcaaaacctgaaattccatggacatctctgactcggaaggggcttgttcgagttgtattttttccattgttcagcaattggtggattcaggttacctctttaagaatctttgtttggctgttactactttatttcatgcaagttatagcaattgtcttatatttgatgatgcctattgtgaacataagtgaagtacttggacccttgtgccttatgctactcatgggaactgtccactgtcaaattgtgtctactcagataacaagaccatcaggaaacaatggaaatcgaagaagaagaaaattacgaaaaactgtaaatggtgatgggagccgagaaaatggaaataactcctctgataaagtcagaggaatagaaactttggaatctgtacccattattggtggtttttgggagactatctttggcaacaggattaaaagagtaaaattaatatctaacaaagggactgaaactgacaatgacccaagttgtgtccatcctatcattaagaggagacaatgtcgaccagagattagaatgtgccaaacaagagagaaaccaaaattttcagatggagaaaagtgccgtagggaggcttttaggcgtttgggtaatggggtgtctgatgacctgtcaagtgaagaagatggtgaagcacggacacagatgatattattgcgtaggagtgtggaaggggcctcaagtgacaatggttgtgaagttaagaatagaaaatcaatactttcaaggcacctaaactctcaggtaaagaaaaccactacaaggtggtgtcatattgtgcgggattcagatagtctggctgaatcagaatttgaatcagcagccttcagccagggctctagatcgggtgtgagtggtggctctcgaagcctcaacatgtcaagaagagactcagaaagcacccgccatgactcggagactgaggacatgttatgggacgacctgctacatggcccagagtgccggtcatctgtcaccagtgacagtgagggggcccatgtgaatacccttcactcagggaccaaacgtgaccccaaagaggatgtttttcagcagaatcatttattctggcttcagaattcaagtccttcctctgatcgagttagtgcaataatctgggaggggaatgagtgcaaaaagatggatatgtctgtgttggaaataagtggcatcatcatgagcagggtcaatgcctatcagcaaggagtaggttatcagatgctgggaaatgttgtcactattggattagcattttttccattcttacatcgacttttccgtgagaagagccttgaccaactaaagtccatttcagctgaggagatcttgactctctttggtggggcaccacctgttacacctattattgtttggtcgataattaatttttttgaaagattgtgtcttacttggatgttttttttcatgatgtgtgtggcagagagaacatataaacagagatttttatttgcaaaactcttcagccatattacttctgccaggaaagctaggaaatatgaaatacctcatttcagacttaagaaggtggagaatattaaaatatggttatcactgcgttcctatctaaagagacgggggccacagcgttcagttgatgtggttgtatcctcggttttcctactgacactttcgattgctttcatttgttgtgctcaggttctccaaggacataaaacttccctgaatgatgcttataactgggagtttttgatctgggaaacagctttactactttttttattgcgtctggcctcactggggtctgaaaccaataagaaatacagcaatgtttcaatattacttacagaacagattaatttatatcttaagatggaaaaaaagccaaataagaaagaacagcttactctagtaaacaatgtattaaagctgtccaccaagttgttgaaagagctggacacaccatttagactctatggactgacaatgaatcccttaatctacaatatcacaagagtagttatcctttctgctgtctcaggtgttataagtgatcttctaggatttaatataagactgtggaaaattaaatcataagctgagttaaatgcctggactctcccctggctggtatcaaaacttacctatcaaggaaagtgatgactgcagaaaccagtgagatacccacctgcttgttcacatgcacaggtgctctcagctctgcaaagcgaatgaatggtgtttccggaggagcaagtccttttccaactgggtgtgcatgctaaaaacctgtattttcatgcttttcaaacaacatgaatagtcagctgactaaagactgtgtgtgttgtggtaacaccaaagacaattttgatagtttagcttcagtactgtgacagttatgtttactggacatagtctttttggcaactatgatagatgcccaaagcatgaagcaaagctattttatggaaatatgcaaattcaatacttttcattatagtctatagaactggagatttcatttctctatcaaagagagatcaagcgaactatttaggtaaatccgaataaaagactttt

SEQ ID NO: 752 - DNA, 2155 bp, human
gcgtcaccgaccggtgcggacaggaagaggctctgggctggcacatgtgtatggcggtgaggcgggcgggtacatggcgggctctgtgggactggcgttgtgcgggcagacgttggtggtgcggggcggcagccgattcctggccacctccatagcaagcagtgatgatgacagcctcttcatctatgactgcagtgctgcagaaaagaagtcacaagaaaataaaggggaggacgcgcccttggaccaggggagcggtgcgattctggcgtccaccttctccaagtctggcagctattttgctttaaccgatgacagtaagcgtctgattcttttccgtacaaaaccatggcaatgtctgagtgtcaggaccgtggcaaggaggtgtacagccctgactttcatagcctcggaggagaaggtcttggtggccgacaagtctggagacgtctactccttttcggtgctggagccacacgggtgtggccgtctagagctggggcacctgtctatgctgttagatgtggctgtgagtcctgatgaccgcttcatcctcactgccgaccgggacgagaagatccgagtcagctgggccgcggcgccccatagcatcgagtccttctgcttggggcacacagagtttgtgagccgtatctccgtggtgccaactcagcccgggctgcttctgtcctcctctggggacggcaccctgaggctctgggagtacaggagcggccgccagctgcactgctgtcacctggccagtctgcaggagctggtggacccccaggccccccagaagtttgccgcgtccaggattgcattctggtgccaggagaactgcgtggcgctcctgtgcgacggcactcctgtggtctacatcttccagctggacgcccgcagacagcagttggtgtacaggcagcagctggcgttccagcaccaagtgtgggacgtggctttcgaggagacccaggggctgtgggtgctccaggactgccaggaagcccccctggtgctctacaggcctgtgggcgaccagtggcagtctgttcctgagagcaccgtgttaaagaaagtctctggtgttcttcgtgggaactgggccatgctggaaggctctgccggcgcagacgccagcttcagcagtctctacaaggccacgttcgacaacgtgacctcctacctgaagaagaaagaggagagactgcagcagcagctagagaagaagcagcggcgccggagtcccccgcctgggcccgacgggcatgccaagaagatgagaccgggggaggcgacgctaagttgctgatcgtggcggtcagtggtgtctctcacctcaaattaggaaaagctttttaacttgttcccctgcatcctggcatgtcccttcaagaaggaaaaggtgacatcagttgtgaccagctcagaggatggggctgtcccctgggctctagaaagaacattctgtgtcaccagcacaggctcttgctgggtgcctgtgccccctttctggttgaagggaagccagaccagtggagtggaagctcttgaagcactttcttttcatgtcggaggctgcgtgtgagccggtggtggcggcagctgtctgtgtttctcctgttctcataccgcccttcgtgtccgctgcatcttcctctaggagcatctgtgggctgacgtttctggcatggtggatgttttcatgttgttccgccgtctcagcatccaggtgacgtgctgtcccgcagtagctgctcgccacacaggctgttgaaactcagcacgaatgcttgagcctgccccagccccagccgtagcccttgtgctcaggagctgctcctggagagtggctcccttgtgggaagtgagaaacacgtttcggagtcgcagggagctctgtctggcatcggtggcacagatggtgaacttgtttcaggaagtgtgagcacgggcctggctggcacccggtttacagggaggtgattgaggacgtcgttatgatttgatttgaccttggcacacactgcagagccacagggatgttgctgaatttcaatcaccgatcagcaaggatgaaccttctcaacttcctaggaatgtttagcagcaacctaatataccaggcaaaactcaaaaaaaaaaaaaaaaaaaa

SEQ ID NO: 753 - DNA, 2154 bp, human
atataaccgcgtggcccgcgcgcgcgcttccctcccggcgcagtcaccggcgcggtctatggctgcgacttctctaatgtctgctttggctgcccggctgctgcagcccgcgcacagctgctcccttcgccttcgccctttccacctcgcggcagttcgaaatgaagctgttgtcatttctggaaggaaactggcccagcagatcaagcaggaagtgcggcaggaggtagaagagtgggtggcctcaggcaacaaacggccacacctgagtgtgatcctggttggcgagaatcctgcaagtcactcctatgtcctcaacaaaaccagggcagctgcagttgtgggaatcaacagtgagacaattatgaaaccagcttcaatttcagaggaagaattgttgaatttaatcaataaactgaataatgatgataatgtagatggcctccttgttcagttgcctcttccagagcatattgatgagagaaggatctgcaatgctgtttctccagacaaggatgttgatggctttcatgtaattaatgtaggacgaatgtgtttggatcagtattccatgttaccggctactccatggggtgtgtgggaaataatcaagcgaactggcattccaaccctagggaagaatgtggttgtggctggaaggtcaaaaaacgttggaatgcccattgcaatgttactgcacacagatggggcgcatgaacgtcccggaggtgatgccactgttacaatatctcatcgatatactcccaaagagcagttgaagaaacatacaattcttgcagatattgtaatatctgctgcaggtattccaaatctgatcacagcagatatgatcaaggaaggagcagcagtcattgatgtgggaataaatagagttcacgatcctgtaactgccaaacccaagttggttggagatgtggattttgaaggagtcagacaaaaagctgggtatatcactccagttcctggaggtgttggccccatgacagtggcaatgctaatgaagaataccattattgctgcaaaaaaggtgctgaggcttgaagagcgagaagtgctgaagtctaaagagcttggggtagccactaattaactactgtgtcttctgtgtcacaaacagcactccaggccagctcaagaagcaaagcaggccaatagaaatgcaatatttttaatttattctactgaaatggtttaaaatgatgccttgtatttattgaaagcttaaatgggtgggtgtttctgcacatacctctgcagtacctcaccagggagcattccagtatcatgcagggtcctgtgatctagccaggagcagccattaacctagtgattaatatgggagacattaccatatggaggatggatgcttcactttgtcaagcacctcagttacacattcgccttttctaggattgcatttcccaagtgctattgcaataacagttgatactcattttaggtaccagaccttttgagttcaactgatcaaaccaaaggaaaagtgttgctagagaaaattggggaaaaggtgaaaaagaaaaaatggtagtaattgagcagaaaaaaattaatttatatatgtattgattggcaaccagatttatctaagtagaactgaattggctaggaaaaaagaaaaactgcatgttaatcattttcctaagctgtccttttgaggcttagtcagtttattgggaaaatgtttaggattattccttgctattagtactcattttatgtatgttacccttcagtaagttctccccattttagttttctaggactgaaaggattcttttctacattatacatgtgtgttgtcatatttggcttttgctatatactttaacttcattgttaaatttttgtattgtatagtttctttggtgtatcttaaaacctatttttgaaaaacaaacttggcttgataatcatttgggcagcttgggtaagtacgcaacttacttttccaccaaagaactgtcagcagctgcctgcttttctgtgatgtatgtatcctgttgacttttccagaaattttttaagagtttgagttactattgaatttaatcagactttctgattaaagggttttctttcttttttaataaaacacatctgtctggtatggta

SEQ ID NO: 754 - DNA, 3680 bp, human
tgagtaaatgccgcagattctggaaagttctgatcagtgcgatacataaggctgaggaagtgggacctccccttttgggtcggtagttcagcgccggcgccggtgtgcgagccgcggcagagtgaggcaggcaacccgaggtgcggagcgacctgcggaggctgagccccgctttctcccagggtttcttatcagccagccgccgctgtccccgggggagtaggaggctcctgacaggccgcggctgtctgtgtgtccttctgagtgtcagaggaacggccagaccccgcgggccggagcagaacgcggccagggcagaaagcggcggcaggagaagcaggcagggggccggaggacgcagaccgagacccgaggcggaggcggaccgcgagccggccatgtcggtggtggggttggacgtgggctcgcagagctgctacatcgcggtagcccgggccgggggcatcgagaccatcgccaatgagttcagcgaccggtgcaccccgtcagtcatatcatttggatcaaaaaatagaacaatcggagttgcagccaaaaatcagcaaatcactcatgcaaacaatacggtgtctaacttcaaaagatttcatggccgagcattcaatgaccccttcattcaaaaggagaaggaaaacttgagttacgatttggttccattgaaaaatggtggagttggaataaaggtaatgtacatgggtgaagaacatctatttagtgtggagcagataacagccatgttgttgactaagctgaaggaaactgctgaaaacagcctcaagaaaccagtaacagattgtgttatttcagtcccctccttctttacagatgctgagaggcgatctgtgttagatgctgcacagattgttggcctaaactgtttaagacttatgaatgacatgacagctgttgctttgaattacggaatttataagcaggatctcccaagcctggatgagaaacctcggatagtggtttttgttgatatgggacattcagcttttcaagtgtctgcttgtgcttttaacaagggaaaattgaaggtactgggaacagcttttgatcctttcttaggaggaaaaaacttcgatgaaaagttagtggaacatttttgtgcagaatttaaaactaagtacaagttggatgcaaaatccaaaatacgagcactcctacgtctgtatcaggaatgtgaaaaactgaaaaagctaatgagctctaacagcacagaccttccactgaatatcgaatgctttatgaatgataaagatgtttccggaaagatgaacaggtcacaatttgaagaactctgtgctgaacttctgcaaaagatagaagtacccctttattcactgttggaacaaactcatctcaaagtagaagatgtgagtgcagttgagattgttggaggcgctacacgaattccagctgtgaaggaaagaattgccaaattctttggaaaagatattagcacaacactcaatgcagatgaagcagtagccagaggatgtgcattacagtgtgcaatactttccccggcatttaaagttagagaattttccgtcacagatgcagttccttttccaatatctctgatctggaaccatgattcagaagatactgaaggtgttcatgaagtctttagtcgaaaccatgctgctcctttctccaaagttctcacctttctgagaagggggccttttgagctagaagctttctattctgatccccaaggagttccatatccagaagcaaaaataggccgctttgtagttcagaatgtttctgcacagaaagatggagaaaaatctagagtaaaagtcaaagtgcgagtcaacacccatggcattttcaccatctctacggcatctatggtggagaaagtcccaactgaggagaatgaaatgtcttctgaagctgacatggagtgtctgaatcagagaccaccagaaaacccagacactgataaaaatgtccagcaagacaacagtgaagctggaacacagccccaggtacaaactgatgctcaacaaacctcacagtctcccccttcacctgaacttacctcagaagaaaacaaaatcccagatgctgacaaagcaaatgaaaaaaaagttgaccagcctccagaagctaaaaagcccaaaataaaggtggtgaatgttgagctgcctattgaagccaacttggtctggcagttagggaaagaccttcttaacatgtatattgagacagagggtaagatgataatgcaagataaattggaaaaagaaaggaatgatgctaaaaatgcagttgaggaatatgtgtatgagttcagagacaagctgtgtggaccatatgaaaaatttatatgtgagcaggatcatcaaaattttttgagactcctcacagaaactgaagactggctgtatgaagaaggagaggaccaagctaaacaagcatatgttgacaagttggaagaattaatgaaaattggcactccagttaaagttcggtttcaggaagctgaagaacggccaaaaatgtttgaagaactaggacagaggctgcagcattatgccaagatagcagctgacttcagaaataaggatgagaaatacaaccatattgatgagtctgaaatgaaaaaagtggagaagtctgttaatgaagtgatggaatggatgaataatgtcatgaatgctcaggctaaaaagagtcttgatcaggatccagttgtacgtgctcaggaaattaaaacaaaaatcaaggaattgaacaacacatgtgaacccgttgtaacacaaccgaaaccaaaaattgaatcacccaaactggaaagaactccaaatggcccaaatattgataaaaaggaagaagatttagaagacaaaaacaattttggtgctgaacctccacatcagaatggtgaatgttaccctaatgagaaaaattctgttaatatggacttggactagataaccttaaattggcctattccttcaattaataaaatatttttgccatagtatgtgactctacataacatactgaaactatttatattttcttttttaaggatatttagaaattttgtgtattatatggaaaaagaaaaaaagcttaagtctgtagtctttatgatcctaaaagggaaaattgccttggtaactttcagattcctgtggaattgtgaattcatactaagctttctgtgcagtctcaccatttgcatcactgaggatgaaactgacttttgtcttttggagaaaaaaaactgtactgcttgttcaagagggctgtgattaaaatctttaagcatttgttcctgccaaggtagttttcttgcattttgctctccattcagcatgtgtgtgggtgtggatgtttataaacaagactaagtctgacttcataagggctttctaaaaccatttctgtccaagagaaaatgactttttgctttgatattaaaaattcaatgagtaaaacaaaagctagtcaaatgtgttagcagcatgcagaacaaaaactttaaactttctctctcactatacagtatattgtcatgtgaaagtgtggaatggaagaaatgtcgatcctgttgtaactgattgtgaacacttttatgagctttaaaataaagttcatcttatggtgtcatttctaaaaaaaaaaaaaaa

SEQ ID NO: 755 - DNA, 2351 bp, human
tgcgggcaggattcacgccgctgtgacccggaggtcctcagggggcgaagccccggcctaggcctcgcggagatgcccagctgcggtgcttgtacttgcggcgcggcggccgtccggctcatcacctcctcactcgcctccgcgcagagaggtatttctggtggtcgcattcatatgtcagttttaggaaggcttgggacatttgaaactcagattctgcaaagagctcctcttagatcctttacagaaacaccagcatactttgcctcaaaagatgggataagtaaagatggttctggagatggaaataagaaatcagcaagtgagggaagtagtaagaaatcaggctctgggaattctgggaaaggtggaaaccagctgcgctgtcctaaatgtggcgacttgtgcacacatgtagagacctttgtatcatccacccgttttgtcaagtgtgaaaagtgtcatcatttttttgttgtgctatctgaagcagactcaaagaaaagcataattaaagaacctgaatcagcagcagaagctgtaaaattggcattccaacagaaaccaccacctccccctaagaagatttataactacctcgacaagtatgttgttggccagtcatttgctaagaaggtgctttcagttgctgtgtacaatcattataagagaatatataataatatcccagctaatctgagacagcaagcagaggttgagaagcagacatcattaacaccaagagagttagaaataagaagacgggaggatgagtacagatttacaaaattgcttcagattgctggaattagcccacatggtaatgctttaggagcatcaatgcagcaacaggtaaatcaacaaatacctcaggaaaaacgaggaggtgaagtattggattcttctcatgatgacataaaacttgaaaaaagtaatattttgctgcttggaccaactgggtcaggtaaaactctgctggcacaaaccctagctaaatgccttgatgtcccttttgctatctgtgactgtacaactttgactcaggctggatatgtaggcgaagatattgaatctgtgattgcaaaactactccaagatgccaattataatgtggaaaaagcacaacaaggaattgtctttctggatgaagtagataagattggcagtgtgccaggcattcatcaattacgggatgtaggtggagaaggcgttcagcaaggcttattaaaactactagaaggcacaatagtcaatgttccagaaaagaattcccgaaagctccgtggagaaacagttcaagttgatacaacaaacatcctgtttgtggcatctggtgctttcaatggtttagacagaatcatcagcaggaggaaaaatgaaaagtatcttggatttggaacaccatctaatctgggaaaaggcagaagggctgcagctgctgcagaccttgctaatcgaagtggggaatcgaatactcaccaagacattgaagaaaaagatcggttattgcgtcatgtggaagccagagatctgattgagtttggcatgattcctgagtttgtgggacggttgcctgtggtggttccattgcatagcctagatgagaaaacacttgtacaaatattaactgagccacgaaatgctgttattcctcagtaccaggccttattcagcatggataagtgtgaactgaatgttactgaggatgctttgaaagctatagccagattggcactagaacgaaaaacaggtgcacgaggccttcggtccataatggaaaagctgttactagaaccaatgtttgaagtccctaattctgatatcgtatgtgtggaggttgacaaagaagtagtagaaggaaaaaaggaaccaggatacatccgggctccaacaaaagaatcctctgaagaggagtatgactctggagttgaagaagaaggatggccccgccaagcagatgctgcaaacagctaaactgtcatattgctgtcttgtatatacagcttttccttcttttgtttaggatcataattgtctctacagtctgatattaaaggcattggatctatcttggatatcatacatggtcagagaagcctttaggagaagaatcagatcatgtatataattgtaacatcacattgattttacggaagatgttatatggactttaatgacacaatgtttagagataaaatgtacattattttggttcagttttttaaaaaaaatatgctttaacaaaattcttaggaattcttttaagcaatgcaggtattgcgataactgtagattttacaataatgttactctacaaatgggaaaataaattctttaaaattgaatattga

SEQ ID NO: 756 - DNA, 1488 bp, human
gttggtgagcatcatggcaaccgttacagccacaaccaaagtcccggagatccgtgatgtaacaaggattgagcgaatcggtgcccactcccacatccggggactggggctggacgatgccttggagcctcggcaggcttcgcaaggcatggtgggtcagctggcggcacggcgggcggctggcgtggtgctggagatgatccgggaagggaagattgccggtcgggcagtccttattgctggccagccgggcacggggaagacggccatcgccatgggcatggcgcaggccctgggccctgacacgccattcacagccatcgccggcagtgaaatcttctccctggagatgagcaagaccgaggcgctgacgcaggccttccggcggtccatcggcgttcgcatcaaggaggagacggagatcatcgaaggggaggtggtggagatccagattgatcgaccagcaacagggacgggctccaaggtgggcaaactgaccctcaagaccacagagatggagaccatctacgacctgggcaccaagatgattgagtccctgaccaaggacaaggtccaggccggggacgtgatcaccatcgacaaggcgacgggcaagatctccaagctgggccgctccttcacacgcgcccgcgactacgacgctatgggctcccagaccaagttcgtgcagtgcccagatggggagctccagaaacgcaaggaggtggtgcacaccgtgtccctgcacgagatcgacgtcatcaactctcgcacccagggcttcctggcgctcttctcaggtgacacaggggagatcaagtcagaagtccgtgagcagatcaatgccaaggtggctgagtggcgcgaggagggcaaggcggagatcatccctggagtgctgttcatcgacgaggtccacatgctggacatcgagagcttctccttcctcaaccgggccctggagagtgacatggcgcctgtcctgatcatggccaccaaccgtggcatcacgcgaatccggggcaccagctaccagagccctcacggcatccccatagacctgctggaccggctgcttatcgtctccaccaccccctacagcgagaaagacacgaagcagatcctccgcatccggtgcgaggaagaagatgtggagatgagtgaggacgcctacacggtgctgacccgcatcgggctggagacgtcactgcgctacgccatccagctcatcacagctgccagcttggtgtgccggaaacgcaagggtacagaagtgcaggtggatgacatcaagcgggtctactcactcttcctggacgagtcccgctccacgcagtacatgaaggagtaccaggacgccttcctcttcaacgaactcaaaggcgagaccatggacacctcctgagttggatgtcatcccccgaccccaccctgttttccaccagagttctgacactgtgactctgtataaaatggttgggaagctgc

SEQ ID NO: 757 - DNA, 1717 bp, human
tcgctcgctcctccttcgcttcgcctcgccgccgccatgcaggaaatcatcgccagcgtggaccacatcaagtttgacttggagatcgcggtggagcagcagctgggggcgcagccgctgcccttccccggcatggacaagtcgggcgctgctgtctgtgaattctttttgaaagctgcctgcggcaaagggggcatgtgtccgtttcgccacatcagtggtgagaagacagttgtgtgcaaacactggctgcgtggcctatgcaagaaaggggaccagtgtgagttcctgcatgagtatgacatgaccaagatgcccgagtgctacttctactccaagttcggggagtgcagcaacaaggaatgtcccttcctgcacatcgaccccgagtccaagatcaaggactgtccttggtatgaccgcggcttctgcaagcacggtcccctctgcaggcaccggcacacacggagagtcatctgtgtgaattacctcgtgggattctgcccggaggggccctcgtgtaaattcatgcaccctcgatttgaactgcccatgggaaccaccgagcagcccccactgccacagcagacacagcctccagcaaagcaaagtaacaatccgccattacaaaggtcgtcctccttgatccagttaacgagtcagaactcttctcccaatcagcagagaaccccgcaggtcatcggggtcatgcagagtcaaaacagcagcgcgggcaaccggggaccccggccactggagcaggtcacctgttacaagtgtggcgagaaaggacactacgccaacagatgcaccaaagggcacttggcctttctcagtggacagtgacagcagctggagccagctccgagcagcccgggggccccgctgttgggagtgtgcatttaactgtttcatgcgcttgttggcgcgactgtggctcgagctggcccgcagacacgtgggtttcatcactctgaggggccacgtctgttagtttcctatcattttgccgtagtattttttgaaaaagggacatgtgtcctgtgggtccctgcagtcgacatcatgtttggctgggcatcgatgcctcctttctgggactcccggcacaactcccctcatccagggagggaggcagctgctggggaggggcttggctaggtagttctgtgtggcggtggtcattcccctcattaaacaccagttcttggtgacgccaggggctggtaggtcattcaaagctgtggccagctcacgcctgcttcctccctccctgccctgctgaatcctaaagctgtgcctatatctgtgatttgaatgagggagccctttggggcaaattcaggtgcccccattgcctcaggctggccctggtcccaggtggcagcggttgaggaggggtacagggctctcaagcctgaggttttcttctctgggcttaattttctcttggggtacgtgcctgacagtgtttaaggtgtccgttgaactggagttgcagacttttaaatagatgaccccttcagatcatctgtgcctacctcctgcccatcaggcgtctacactgtcactcagacacctgtggcatgtggaggagactgccctgtcctgagcctggaaaatgtgaaactgtctcctgcaacctgctgggcatgtgggcctggctgtgttcaattgcaagaacaatttttatgaaatggattaaagcttgtttttt

SEQ ID NO: 758 - DNA, 2031 bp, human
ggcacgagggcgagctgaggtggaggcaggctgcggcagacggcgacagtggcggcggcgccatggcagggcttgcaggatccctgctgccttggtgatcccgggctgacagccagagagcacagcggctcagctcctggagagtgagggttgaagaaagcggagggcagccgcctgcgcccgctggctcccattaggtcggttcctgcagcggtgcccggcagccttggtgaaggccctgcccggcagagatcatgtattgcctccagtggctgctgcccgtcctcctcatccccaagcccctcaaccccgccctgtggttcagccactccatgttcatgggcttctacctgctcagcttcctcctggaacggaagccttgcacaatttgtgccttggttttcctggcagccctgttccttatctgctatagctgctggggaaactgtttcctgtaccactgctccgattccccgcttccagaatcggcgcatgatcccggcgttgtgggcacctaacggcctgccctgttagctttccaaggaagcagaagacgggaggggaggcattgacataggtcataaagcattggagtttcaaatcccgcagcctcgcgggtgtcacattcctgacggcgcctttttggcctgtgatgttttatccttacaatgtgaataatggcactgaccggtgcttttattgtaaagtcctatagtcgtgggtggtcttgtggttgtgtgtgttctgtccccatctaggtcctggctggccgcatgaccacccctctcgcctcattactgtgaggagtctgggtccatcctggtcagctgccccaatgtgacctggggcagataaaatgccagtctcattgtcacctctgtgacccctccttgtcagggtctccttccttcccagaatgttactgactcctcagtccctcttctggtttccctttatttctcttctacccttttccttttttggggagtacctgtccaagacagggctcatttttgcacttatctcgaatttgaagagattgctgacgcccgagagcctcgctttttcatccttctttccttgttcagcaggctagacagaaacatgtcttgactgttagttgtccacaaatcttcagtattttctccacttcatttttaagaaaggaagcaacagatagatgttgctctttcacctgggtgtctgggctcaagctttcccgcccagcctcacttcctttgcccttcctcctgcctttctcaactgtcccaaggagggggcctcattgtgtctcccgtgcatgctctgcagcattgaagtatggtgtgttcacgtagttctagcagtccccagctgagtgagtgggagagtacctgtgtgtttcgtaacggccttgatccccttgatagatgtttggatattttttggtgtgccctgtgtgtgtgtgtgtgtacaaatacatgtgtatattccttttaaagaagctttatcgaacgtggtctgattttgaggtttagcaatagctagctatatatggtaggtgccgctacagtttttatttagcatggggattgcagagtgaccagcacactggactccgaggtggttcagacaagacagaggggagcagtggccatcatcctcccgccaggagcttcttcgttcctgcgcatatagactgtacgttatgaagaatacccaggaagactttgtgactgtcacttgctgctttttctgcgcttcagtaacaagtgttggcaaacgagactttctcctggcccctgcctgctggagatcagcatgcctgtcctttcagtctgatccatccatctctctcttgcctgaggggaaagagagatgggccaggcagagaacagaactggaggcagtccatctagggaatgggactgtgaggccatacttgtgaaacgtctggactgctattctagagcttttatttggtgtgttcgttgcacagctgtttgaaatgtttaataaagctttataaactttaaaaaaaaaaaaaaaaaa

SEQ ID NO: 759 - DNA, 4525 bp, human
tggaacgttgctgtggtagcgctcgggcgccatgttaggacgaaggggaaggaggagaagcgcttaaagcggcgggagcggtgcgggagaggggttggacccagggctgaggcaggcccccccctccctcccgcctcagtggatcatgcccagggcggcagcggcggcggttgcgggggggaagtgactgggcggtgccggcgccggagacgatgccgtttccagttacaacacagggatcacaacaaacacaaccgccacagaagcactatggcattacttctcctatcagcttagcagcccccaaggagactgactgcgtacttacacagaaactaattgagacattgaaaccctttggggtttttgaagaggaagaggaactgcagcgcaggattttaattttgggaaaactaaataacctggtaaaagagtggatacgagaaatcagtgaaagcaagaatcttccacaatctgtaattgaaaatgttggaggaaaaatttttacatttggatcttacagattaggagtgcatacaaaaggtgctgatattgatgcgttgtgtgttgcaccaagacatgttgatcgaagtgactttttcacctcattctatgataagttgaaattacaggaagaagtaaaagatttaagagctgttgaagaggcattcgtaccagttattaaactctgttttgatgggatagagattgatattttgtttgcaagattagcactgcagacaattcctgaagatttggatctacgagatgacagtctgctaaaaaatttagatataagatgtataagaagtcttaacggttgcagggtaaccgatgaaattttacatctagtaccaaacattgacaacttcaggttaactctgagagctatcaaactatgggccaaacgccacaacatctattccaatatattaggtttcctcggtggtgtttcctgggctatgctagtagcaagaacttgccagctttatccaaatgcaatagcatcaactcttgtacataaatttttcttggtattttctaaatgggaatggccaaatccagtgctattgaaacagcctgaagaatgcaatcttaatttgcctgtatgggacccaagggtaaaccccagtgataggtaccatcttatgcctataattacaccagcatacccacaacagaactccacgtacaatgtgtccgtttcaacacggatggtcatggttgaggagtttaaacaaggtcttgctatcacagatgaaattttgctgagtaaggcagagtggtccaaactttttgaagctccaaacttctttcaaaagtacaagcattatattgtacttctagcaagtgcaccaacagaaaaacaacgcctggaatgggtgggcttggtggaatcaaaaatccgaatcctggttggaagcttggagaagaatgaatttattacactggctcatgtgaatccccagtcatttccagcacccaaagaaaatcccgacaaggaagaatttcgcacgatgtgggtgattgggttagtgtttaaaaaaacagaaaactctgaaaacctcagtgttgatctcacctatgatattcagtctttcacagatacagtttataggcaagcaataaacagcaagatgtttgaggtggatatgaaaattgctgcaatgcatgtaaaaagaaagcaactccatcaactactacctaatcatgtgcttcagaaaaagaaaaagcattcaacagaaggtgtcaaattgacagctctcaatgacagcagcctcgacttgtctatggacagtgataacagcatgtctgtgccttcacctactagtgctacgaagaccagtccattgaacagttctggcagctctcagggcagaaacagtcctgctccagctgtaacagcagcatctgtgaccaacatacaggctactgaagtttctgtgccacaagtaaattccagtgaaagctcagggggtacatcgagtgaaagcattcctcaaactgccacacaaccagccatttctccaccaccaaagcctacggtctccagagttgtttcttcaacacgtctggtaaacccaccacctagatcttcaggaaatgcagcaacttcaggaaatgcagcaacaaaaatacctactcctatagtaggagtcaagaggacatcctcacctcataaagaagagagtcccaagaaaaccaaaacagaagaggatgaaacaagtgaagatgctaactgtcttgctttgagtggacatgataaaacagaagcaaaggaacaacttgatacagagacaagtacaactcaatcagaaactattcagacagcggcttctctgttggcctctcagaaaacatccagtacagacctttctgatatccctgctctccctgcaaatcctattcctgttatcaagaattcaataaaactgagattgaatcggtaaaaacaacctcaggggtccataaacaatatctgccaactcaacctgttgtcttcaaatgctaaaaaaggagaatggagggtacaagactagacatgactgaaatggatttgggttttttggtgacctcccttactgggctaatcagcacttgatcggaagtccaggttagtatgtgaagccaggagtactattattattgtgttagcaacagttgcattaactatttcaaaaattactgcctttaaaaaaaacaacctcaagctatatttgtattcataattgacatctggattgggtttatgtttgatgcattgtttggaaaatttgcaatacaaactggcataagaattacttattctgatgatgcacttttatgtatttttcattagaaagtagaactaattttagattttcagcttgatggattttcagtttttcctgaagaattttctttaccattagtcttcaaattggatactgttgtgcagtggtgtactgttatacttcagagaaagggtaagagtacatctagttcagttcctatgaggtagctgtaacccttaaaaatgaaacgtcaactctagggtacatttgacattgaaagaatagttaggaaataacttggttttgatagggtcatgattaagaaatgatatattggttttatttatggaattgttttatagtgcatacaaatcagcgatcagccagcaaatatttttctttgagcttgtgaaagctctgtgttcttttgccttcaatctgttgtcttcaaaacaaacaaacaaaaaaagcttcttgcgcctttccctcccctgttttcttcctttttctttttgcttgtatgcacaaggtaggacttacttcgtaagaaacaaaatgccagtattttcttaagccatgatgtgaaaccaatgaccctgtgaccacatggcacagaacactaaattttggtcccatggctgaaacttgagggtgactaaaagtaatgcctgtgaaacatgatatctatctgggatggccatttgatctctaaaaggaattttgtacactccacagaactcctatctatagtaaaattgattttcagttttaaatgtgggcaaaaaggcattttctccaagattttaaaactaattcttatttttaaatggtttaccaaaatttgtcagtacattttacgtgtagaagcattttaaaaatcatttctagcaagcacttgacatctagtcagctctctactcctttattttgttttatcaaaagattaagagctcctttctttgaataaaataatttctcataattaagcagtagaagatctatcttcacaaagtatgagggatgccagatgttgataaacttactctttctgaatctggacaaagtcgacttaacagatttttctgatgagcatgttttatgaatcctccattgtgctccattctatcacatgtgcatttttcatgttaaactgcaattacttaatctcttcccctatccttctaaattaattttctgaagttggagtgtagtcttttcccccttaggctatgcattaatcgaagctttcttttcaccatgactttataatgtctagtaaacaatatttctacttcccacatctttgctttacacagtcaccttgcccttccttccaccaccgaagaaaaaagatggtcatactaacaggtgaaatgtacaaggtgtctgtgtgttttgtgtagcttcagagttagattgaaattaccaggcacagatttagtcttgtcattttgtttacacattggggaaaacaattcagtttattaaacgtttcatgtaactgcacccaagttttgccaagctggaaacttggaccttttctgtgtagtgactttttaattatagttttcataacctggagatcagactgttgctttcgcatgatgtatgtagtgtctcatgactggagtttgctttgttttatagtatctgtactccttgtatttttcaagagctattttgtaaacagatgatgtatttctccattgaaaacacaataaaaaaaaaacagcacaaaaaaaaaaaaaaaa

SEQ ID NO: 760 - DNA, 1963 bp, human
gagcggcgccggcctcggcggctgaggaaagcaggaggaggtggcggcggcgggaagatgctgctctttggcgtaaattgcaatcgattagggatcgtttctcagaatcaagttagaagtgagagttcagataagtgaggccgccattgctgctttgaacacctcagaaggggagaatggatttatcaggagtgaaaaagaagagcttgctaggagtcaaagaaaataataaaaagtccagcactagggctccttcacctaccaaacgcaaagaccgctcagatgagaagtccaaggatcgctcaaaagataaaggggccaccaaggagtcgagtgagaaggatcgcggccgggacaaaacccgaaagaggcgcagcgcttccagtggtagcagcagtaccaggtctcggtccagctcgacttccagctcaggctccagcaccagcactggctcaagcagtggctccagctcttcctcagcatccagccgctcaggaagctccagcacctcccgcagctccagctctagcagctcttctggctctccaagtccttctcggcgcagacacgacaacaggaggcgctcccgctccaaatccaaaccacctaaaagagatgaaaaggagaggaaaaggcggagcccatctcctaagcccaccaaagtgcacattgggagactcacccggaatgtgacaaaggatcacatcatggagatattttccacctatgggaaaattaaaatgattgacatgcccgtggaaaggatgcatccccatctgtccaaaggctatgcgtacgtagagtttgagaatccagatgaagccgagaaggcgctgaagcacatggatggaggacaaattgatggccaggagatcactgccaccgccgtgctggccccctggcctaggccaccccccaggagattcagccctcccaggagaatgttgccaccaccgcctatgtggcgcaggtctcccccacggatgaggagaaggtcccgctccccgaggcgcaggtcccccgtgcgccggagatcacggtccccgggccgccgccgccacaggagccgctccagctccaactcctcccgataaacaggccactgaagctctcgcccctgtaacttataccccacccagctcagttttgtcacttttctagccaaaggaagaccagtaggaaagcaaacccttgactctggcaggatttgcaggcagcaggcagcacccctctgccagccgggccccggctgcagaagtgctgttggtttggatgctgtgtgcctgtcaagattccctccggttttctggctagaaagctcatccgtttccggtttctaagagtcagttcagtggcagagccaccagggaaaagtgaggctcttgggggtggtttgaccctgcttacctgggagcacacttttcccttccccgatgacctgggatggtggccaggccgtgcccttgctgttgctgggcagtgtccttttggaaagggagctgccccaggctttagtgcagctgccaaccctgttaggcctggcctctcgaggcctcttctgacctcaagggtcacaccccctcaaagatcctctcacccatggtagttgctgctcgtggttctgtctgtccgtgcaccgatgcacacaccgcaccccaccactgtactctgaaattggcgagtgagtggagagccagctctgcggagtcatcacgcagccatggttgtgcctgccgttcatggtggtctttcaggttatcttggcaacatgtacattgcttttattttttttcttttttgctttcattgtacagtcagtactataaaatttctcttttgagttttatacctttgtagcattttagatgacattgtgtttgtactttgttgtgtagagtggaagaattgtgttgaataaacccaagatcggaatgcaaaaaaaaaaaaaaaaaaaaaaaaaaaa

SEQ ID NO: 761 - DNA, 1969 bp, human
gtcgttggctggagcagcggctgcgcgggtcgcggtgctgtgaggtctgcgggcgctggcaaatccggcccaggatgtagagctggcagtgcctgacggcgcgtctgacgcggagttgggtggggtagagagtagggggcggtagtcgggggtggtgggagaaggaggaggcggcgaatcacttataaatggcgccgaagcaggacccgaagcctaaattccaggagggtgagcgagtgctgtgctttcatgggcctcttctttatgaagcaaagtgtgtaaaggttgccataaaggacaaacaagtgaaatacttcatacattacagtggttggaataaaaaaagtgctgtgaggcccaggcgctctgaaaaatctttgaagacacatgaggatattgtagccctttttcctgttcctgaaggagctccctcagtacaccaccccctcctgacctctagttgggatgaatgggttccggagagcagagtactcaaatacgtggacaccaatttgcagaaacagcgagaacttcaaaaagccaatcaggagcagtatgcagaggggaagatgagaggggctgccccaggaaagaagacatctggtctgcaacagaaaaatgttgaagtgaaaacgaaaaagaacaaacagaaaacacctggaaatggagatggtggcagtaccagtgagacccctcagcctcctcggaagaaaagggcccgggtagatcctactgttgaaaatgaggaaacattcatgaacagagttgaagttaaagtaaagattcctgaagagctaaaaccgtggcttgttgatgactgggacttaattaccaggcaaaaacagctcttttatcttcctgccaagaagaatgtggattccattcttgaggattatgcaaattacaagaaatctcgtggaaacacagataataaggagtatgcggttaatgaagttgtggcagggataaaagaatacttcaacgtaatgttgggtacccagctactctataaatttgagagaccacagtatgctgaaattcttgcagatcatcccgatgcacccatgtcccaggtgtatggagcgccacatctcctgagattatttgtacgaattggagcaatgttggcttatacacctctggatgagaagagccttgctttattactcaattatcttcacgatttcctaaagtacctggcaaagaattctgcaactttgttcagtgccagcgattatgaagtggctcctcctgagtaccatcggaaagctgtgtgagaggcactctcactcacttatgtttggatctccgtaaacacatttttgttcttagtctatctcttgtacaaacgatgtgctttgaagatgttagtgtataacaattgatgtttgttttctgtttgattttaaacagagaaaaaataaaagggggtaatagctccttttttcttctttctttttttttttcatttcaaaattgctgccagtgttttcaatgatggacaacagagggatatgctgtagagtgttttattgcctagttgacaaagctgcttttgaatgctggtggttctattcctttgacactacgcacttttataatacatgttaatgctatatgacaaaatgctctgattcctagtgccaaaggttcaattcagtgtatataactgaacacactcatccatttgtgcttttgtttttttttatggtgcttaaagtaaagagcccatcctttgcaagtcatccatgttgttacttaggcattttatcttggctcaaattgttgaagaatggtggcttgtttcatggtttttgtatttgtgtctaatgcacgttttaacatgatagacgcaatgcattgtgtagctagttttctggaaaagtcaatcttttaggaattgtttttcagatcttcaataaattttttctttaaatttcaaaaaaaaaaaaaaaaaaaaaaaaaaaaa

SEQ ID NO: 762 - DNA, 2733 bp, human
aagggaagatggagacaatactggagcagcagcggcgctatcatgaggagaaggaacggctcatggacgtcatggctaaagagatgctcaccaagaagtccacgctccgggaccagatcaattctgatcaccgcactcgggccatgcaagataggtatatggaggtcagtgggaacctgagggatttgtatgatgataaggatggattacgaaaggaggagctcaatgccatttcaggacccaatgagtttgctgaattctataatagactcaagcaaataaaggaattccaccggaagcacccaaatgagatctgtgtgccaatgtcagtggaatttgaggaactcctgaaggctcgagagaatccaagtgaagaggcacaaaacttggtggagttcacagatgaggagggatatggtcgttatctcgatctccatgactgttacctcaagtacattaacctgaaggcatctgagaagctggattatatcacatacctgtccatctttgaccaattatttgacattcctaaagaaaggaagaatgcagagtataagagatacctagagatgctgcttgagtaccttcaggattacacagatagagtgaagcctctccaagatcagaatgaactttttgggaagattcaggctgagtttgagaagaaatgggagaatgggacctttcctggatggccgaaagagacaagcagtgccctgacccatgctggagcccatcttgacctctctgcattctcctcctgggaggagttggcttctctgggtttggacagattgaaatctgctctcttagctttaggcttgaaatgtggcgggaccctagaagagcgagcccagagactattcagtaccaaaggaaagtccctggagtcacttgatacctctttgtttgccaaaaatcccaagtcaaagggcaccaagcgagacactgaaaggaacaaagacattgcttttctagaagcccagatctatgaatatgtagagattctcggggaacagcgacatctcactcatgaaaatgtacagcgcaagcaagccaggacaggagaagagcgagaagaagaggaagaagagcagatcagtgagagtgagagtgaagatgaagagaacgagatcatttacaaccccaaaaacctgccacttggctgggatggcaaacctattccctactggctgtataagcttcatggcctaaatatcaactacaactgtgagatttgtggaaactacacctaccgagggcccaaagccttccagcgacactttgctgaatggcgtcatgctcatggcatgaggtgtttgggcatcccaaatactgctcactttgctaatgtgacacagattgaagatgctgtctccttgtgggccaaactgaaattgcagaaggcttcagaacgatggcagcctgacactgaggaagaatatgaagactcaagtgggaatgttgtgaataagaagacatacgaggatctgaaaagacaaggactgctctagtgttgagggatgtagctcagcttttgggctagcccaggcttccctaagatctgctttttctatttctcccaaccaaatcctcttaaagaccctttgctatgtagtctcatggtctagcatgcatcttgtagaaacaaggcatgctggcagattgcagggttgagatgtgttttatctgttttatattttaaaagattctgccagaaaataaaaccagaccttgttctaaagcccagggttatggaccaactcagtgcttcaggtcttaatgcctccatacctcttcctcaccaactttactagtagctgagatttaatgggcacctattatgctacatatcatgttaggtaaatctgacctgacctctttccccaccctcctttgttgctgcttccctgaatgagtattaccccaggatgaggtctgccatcagcttagttagccattgatgcaaatactagggaaagactaggaggatgagccagggttgctactaaggactaagtgtcgcaccaaggtttgccttttgtatttgcataaagaaaggagttggagctgggtgcagtggcttgtgcctgtagtcccagctacttgggaggctgaggcaggagggttgcttgagactagcctaggtaacatagtgagaccctgtctcattaaaaaaaaaaaaaaaaggcatggtggcacgcactgtagtcccagctactcaggagactgaggctagaagatcctttgaacctaggagtttgagaccagcctgggcgatatagtgaggccccatctcaaaaaaaaaaaaaagcggggggggggagttgggctgtgttggaatgggcctgcagcccaacaaacaagggaactaggaccgacagtgacttcaccagcttgctaggtcagaatgagagactggtgggtctgtctacctgtttcttctacaagatccctatttgactgtaaaagtagctaatactcacatgttctccaatcccaggtagccatggtagagttgggtagagttgagcagccgccccaggatccaaatgtggtgtctgaaatggaaagaactaaggcaaccaggaaggcactgatctgccttataagcacagtcatctgaaagtcaggcctgctgcaggacaggatcccccagagaccccatttgcctctcaacactcagaccttcaactgttttttaataaatctactttttaaaaaaaaaaaata

SEQ ID NO: 763 - DNA, 583 bp, human
gccagctgccggtctttcgggggctccgtaactttctatccgtccgcgtcagcgccttgccaccctcatctccaatatgcctggtccgacccccagtggcactaacgtgggatcctcagggcgctctcccagcaaagcagtggccgcccgggcggcgggatccactgtccggcagaggaaaaatgccagctgtgggacaaggagtgcaggccgcacaacctcggcaggcaccggggggatgtggcgattctacacagaagattcacctgggctcaaagttggccctgttccagtattggttatgagtcttctgttcatcgcttctgtatttatgttgcacatttggggcaagtacactcgttcgtagattcagttacatccatctgtcatctgaagaaggaggaaaaaacccaacatttcttggaccaaaagtatagtgactatctgttcatgagagaaattttctgtaagcttgctgttttacaggggatttatcaataattgattttgaggaatcagtttttttctatggctaataaactttttaattcacttatactgaaaaaaaaaaaaaaaaaaaaaa

SEQ ID NO: 764 - DNA, 7315 bp, human
caggtttcttgctgtatggatcactgattgaataatagatggctttacctcgtctcacaggagccttgcgttccttttcaaatgtcaccaagcaagataattataatgaagaagtggctgacttaaagataaagcgatctaaacttcatgaacaagttttagatttgggcctgacatggaagaagataataaaatttttgaatgaaaaactggagaagagtaaaatgcaaagtataaatgaagacttaaaagatatattacatgctgcaaagcagatagttggaactgataatgggagagaagcaattgaaagtggggctgcatttctcttcatgacatttcacttgaaggactctgttggtcacaaggaaacaaaggctatcaaacagatgtttggcccctttccttcatcatctgccactgcagcttgtaatgctactaatcgaattatttctcattttagtcaagatgattttactgctcttgtgcagatgacagaaaaagaacatggcgatagggttttttttggtaaaaatttagcattttcatttgacatgcatgatttggaccactttgacgaactgccaataaatggtgaaactcagaaaactataagcctagattataagaagtttctgaatgaacatctccaggaggcttgcaccccagaactcaagcctgtggaaaaaacaaatggctcctttttgtggtgtgaagttgaaaagtacctaaattcaactttgaaggaaatgactgaagtgccaagagtagaagatctttgctgtactttatatgatatgcttgcttctattaaaagtggtgatgaacttcaggatgagctatttgaactgctgggacctgaaggacttgaacttattgagaaactcctccagaacagaattacaattgtggatagatttcttaattcttcaaatgatcataggtttcaggctcttcaagacaattgtaaaaaaattttaggagaaaatgctaaacccaattatggttgtcaagtcactattcagtctgaacaagaaaagcagttaatgaaacaatatcgacgtgaagaaaaaagaattgccagacgagaaaaaaaggctggagaagatttagaagtttcagaaggacttatgtgctttgatcctaaggaattgcggatacaaagagaacaggcacttctgaatgctagaagtgttccaattctgagcaggcagagagatgcagacgttgaaaaaatacattatccccatgtgtatgattcccaggctgaagccatgaaaacatcagcatttattgctggtgcaaagatgattttgccagaaggaatccaaagagagaataacaagctttatgaagaagtaaggatttcctacagcgaaccaatgccactcagctttgaggaaaagccagtttatatccaagacttagatgagatcggacagctggcttttaaaggaatgaagagactcaatagaatccagtcaatagtgtttgagactgcctacaacaccaatgagaacatgctgatttgtgcccctacaggagctggaaaaaccaacattgcaatgctgacagtcttgcatgaaattcgccaacattttcaacaaggtgttatcaaaaagaatgaatttaagattgtatatgttgctccaatgaaagccttggcagctgaaatgacagattacttcagcagacgtctagagccactaggcatcattgtgaaagaattgactggtgacatgcagttgtccaaaagtgaaattttacgaactcagatgcttgtgaccacaccagaaaaatgggatgtagtgacaagaaagagtgttggggatgtagctctttcccagattgtaaggctccttattcttgatgaagttcatttgctgcatgaagatagaggaccagtattagaaagcatagttgcccgtactttacggcaggtggaatccacacagagtatgataaggattctcggactgtctgcaactttacctaactacctcgatgttgccacatttttacatgttaatccatacattggacttttcttctttgatggccgttttcgaccagtacctcttggacagacatttttggggattaaatgtgcaaataagatgcagcagttgaataacatggatgaagtatgttatgaaaatgttttgaagcaagtaaaggctggacaccaggtgatggtgtttgtacatgctcgaaatgccactgtaagaacagctatgtctctaatagaaagagcaaaaaattgtggccatattcccttctttttttctacccaaggacatgactatgtacttgcagaaaaacaggtacaaaggtcgagaaataagcaagtacgagaattattcccagatggttttagtattcatcatgcaggaatgcttcggcaggacagaaatttagttgaaaacttgttttctaatgggcatatcaaagtcctagtgtgtacagctacgttagcctggggtgtcaatcttcccgcccatgctgttattattaagggaacacaaatatatgctgcaaaaagaggctcctttgttgaccttggaattttagatgtcatgcagatatttggtcgagctggacgaccacaatttgacaaatttggggaaggaataattataacaacgcatgataaactcagccattacctcactttgctcactcaacgaaacccaattgagagtcagtttctggaaagccttgcagataacctaaatgcagagattgctctgggaacagttactaatgtggaagaagcagtgaagtggataagttacacttatctttatgtacggatgagagcaaatccattagcatatggcatcagtcacaaggcttatcagattgacccaacattaagaaagcatcgagaacagttggtcattgaagttggacgaaaactagacaaagctcagatgattcgttttgaggagcgaactggatatttttcctcaactgatttgggtagaactgccagccattactatattaaatacaacaccattgagacctttaatgaactctttgatgctcacaaaacagaaggtgatatctttgccatagtctccaaagctgaagaatttgatcaaattaaggtcagagaagaggaaatagaggagttagataccttattaagcaatttttgtgaactctccactcctggaggtgtagagaatagttatgggaaaataaacatcttacttcaaacttatatcagccgaggagaaatggacagtttctcccttatatcagattctgcatatgttgcacagaatgcagctagaattgtccgtgctctttttgaaattgctctgaggaaacgttggcctaccatgacctacaggctcctgaatcttagtaaagtcattgacaagaggctttggggttgggctagccctttgagacaattttcaatcctaccaccacacatcctaacaagattagaagaaaaaaagcttactgtggataagctgaaagacatgaggaaagatgaaataggtcacattttacatcatgtgaatattggactgaaggtcaaacaatgtgttcatcagattccttctgttatgatggaagcatccattcagcccatcacaaggactgtcctccgagtgacactcagcatctatgctgatttcacttggaatgatcaggtacatgggacagtaggagaaccttggtggatttgggtagaagatcctacaaatgatcatatttatcattcagagtattttctagctctaaaaaaacaagtcattagtaaagaagcccaactactggtatttacaatccctatttttgagcctttgccttcccaatactacatccgagcagtgtctgatagatggttgggtgctgaggcagtatgtattatcaactttcaacatctaattctaccagagagacatcctcctcatacagaattactggatcttcagcctttaccaatcacagctttgggatgtaaagcatatgaagccctgtacaacttcagccactttaaccctgtacagacacaaatatttcatacattgtatcacacggattgtaatgtcctacttggagcacctactggatcgggaaagactgttgcagctgaattagccattttcagagtcttcaacaaataccctacttcaaaggcggtatatattgcacccctaaaagccctagtacgtgaaagaatggatgattggaaagttagaatagaagaaaaacttggtaaaaaagttattgaactaacaggggatgtgactcctgatatgaaatccattgccaaggctgaccttatcgtcactacgccagagaagtgggatggagtcagcagaagctggcaaaataggaactatgttcagcaagtcactattctcatcatagatgagatccatctgcttggggaggaaagaggccctgttctagaggtcattgtatctcgaacaaattttatctcatcacacacagaaaagcctgttagaatagttggactatctactgcattagctaatgccagagaccttgctgattggctcaatattaagcagatgggcttgtttaacttccgaccatcagtacgcccagttccactggaagttcacattcaaggctttccaggtcaacattactgtcctcgtatggctagtatgaacaagcctgcatttcaggcaattagaagccattctccagccaaacctgttttgatatttgtctcatcaagacgtcaaactcgtcttactgctttggaattgatcgccttcctggctactgaagaagatccaaagcagtggttaaacatggatgaaagagagatggagaacatcattgcaacagtaagagattccaacctcaagctgacccttgctttcgggataggaatgcatcatgctggactacatgagagggaccgaaaaacagtagaggaactatttgtaaactgtaaagttcaggttcttattgctacaagcacattagcctggggtgtaaactttccagctcatttagtaattattaagggaacagaatactatgatggaaaaacaagacgttatgtggattttcccattacagatgtcctccagatgatggggcgtgctgggaggccgcagttcgatgaccaaggcaaagctgtaattctagttcatgacataaagaaagacttttataaaaaatttctttatgaacctttcccagtagaatcaagtttattaggagtgctctctgaccacttaaatgcagagattgctggtggtacaattacatctaagcaagatgcattggattatatcacctggacttactttttccgacgtcttatcatgaatcccagctattacaatttgggtgatgtgagccatgattctgtgaacaagtttctgtcccatctgattgagaagtccctgattgaattggaactttcctactgtattgaaattggagaggataatcgcagcattgaacctctaacttatggccgaattgcctcctattactatttgaagcatcaaacagttaaaatgttcaaggaccgcttgaagcctgaatgcagtactgaagaactgctttcaattctaagtgatgcagaagaatatacagatttgccagtgagacacaatgaagatcatatgaatagtgaactggcaaaatgtcttcccattgaatcaaatcctcattcatttgacagccctcacaccaaagcacatctcctgctacaggcacatctcagccgagccatgctaccctgcccagattatgacactgataccaaaacagtcttggaccaagctctcagagtatgtcaggcaatgctggacgtggctgcaaatcagggctggctggtgactgtcctgaatatcaccaacctgattcagatggtgatccagggtcggtggttaaaggactcttctcttcttacactaccaaacatagaaaaccatcatcttcaccttttcaagaaatggaagccgattatgaagggcccacatgctaggggtcggacctccatcgagtcccttcctgaactgatccatgcctgtggagggaaagaccatgtatttagctccatggtagaaagtgagctacatgctgcaaaaacgaaacaggcatggaatttcttatctcacttgccagtgataaatgttggcataagtgttaaaggctcgtgggatgacttagttgaaggacataatgaactctctgtctcaactctgactgcagacaaacgagatgacaacaaatggatcaaattgcatgctgaccaagagtatgtgcttcaagtgagcttgcagagagtccactttgggttccacaagggaaagccagagagctgtgcagttactcctcgatttcccaaatcaaaagacgaaggatggtttttgatattaggagaagtggataagagagaacttattgctttgaaaagagtaggatatattcgaaatcatcatgttgcttccctttctttttatacccctgaaatacctggaaggtatatctacacattatatttcatgagtgactgctaccttggcctggaccagcagtatgacatctatctcaacgttacacaagcgagtctttctgcacaggtcaacaccaaggtctctgattccctgactgacctggcattaaagtaacttgacctgaacaatccatttgaaaggagtggctaagaattctctctgttcagtcatctagacaaatcgaattacttgatgtttgccttgaaagaatcaacttctaacctcaaccatccaggaaattgacagtggctgcagtattgactccagtgacataaagttaaccacagtggccttttaacaaatgttgccttttataatgttatctttatgagtttcttgatatgtaagatgaaaaagcatttagaataatcttttaatttgtgtatatttgggatgatatttaggagctatcaatcaaattttacatctcacaatgtactgtttacatggatattggctgctttttttaaggaaaaccacattgagatgtgacaagtgttaggacttgtcacagatttctaactctgccgcataaactataaatctgtaaggtggtacacagcgtgtcttgttagcaaaatttatactttgatatgatcacatgtagaagtagcttcaagaatttcttgtagtcataaatgtttaataatatatgatgtaaaattatattatggagcctaatgatgataacaaagaaaacaatatactgatcttagaaaatgtagacatggttaactgggaaataaaatatagagtggcacttcaaaaaaaaaaaaaaaaag

SEQ ID NO: 765 - DNA, 1236 bp, human
gggggccgcgagcactggcgggttctgggtcctgtgaccggtcaggcggcgtcagcgggcgcggcggagggctggccggcctcgggggagtttccgcggccgccgggggcgcggcggcagagcgcgaggccgggcagggggccagactcggagtcgaggcgcgcccgacagccgcagcgctcatggcgggcggaggagccggggaccccggcctgggggcggccgccgccccagcgcccgagacccgcgagcacctcttcaaggtgctggtgatcggcgagcttggcgtgggcaagaccagcatcatcaagcgctacgtccaccagctcttctcccagcactaccgggccaccatcggggtggacttcgccctcaaggtcctcaactgggacagcaggactctggtgcgcctgcagctgtgggacatcgcggggcaggagcgatttggcaacatgacccgagtatactacaaggaagctgttggtgcttttgtagtctttgatatatcaagaagttccacatttgaggcagtcttaaaatggaaaagtgatctggatagtaaagttcatcttccaaatggcagccctatccctgctgtcctcttggctaacaaatgtgaccagaacaaggacagtagccagagtccttcccaggtggaccaattctgcaaagaacatggctttgccggatggtttgaaacctctgcaaaggataacataaacatagaggaagctgcccggttcctagtggagaagattcttgtaaaccaccaaagctttcctaatgaagaaaacgatgtggacaaaattaagctagatcaagagaccttgagagcagagaacaaatcccagtgttgctgatatatggcttctgcttctcttgtgtgtgcctcagctctgaagaagttcctgagaatgggttacagatgtcatgttagctgggagtcttcccacatgtggcacttcaaaaggcagcaccactgggcgcctgcacttatttgaaaatggaactttgggagaagtatccctgctagtggctctgtaacttaacagatgacaattaggcttttgtcattgttgccatcatatggaagataatgtttacatccttttaaacatttttatatgacaattcctcaggatttggtaaggcttccaagttgtagcttttagtgtaagtgctggggtggtaataaaatgttacctgcaaaaaaaaaaaaaaaaaaaaaaaaaaaaa

SEQ ID NO: 766 - DNA, 2697 bp, human
acgcgggcacgcacacacggaagcacgcctccacttaactcgcgccgccgcggcagctcgagtccaccagcagcgccgtccgcttgaccgagatgctgcgggcctgtcagttatcgggtgtgaccgccgccgcccagagttgtctctgtgggaagtttgtcctccgtccattgcgaccatgccgcagatactctacttcaggcagctctgggttgactactggcaaaattgctggagctggccttttgtttgttggtggaggtattggtggcactatcctatatgccaaatgggattcccatttccgggaaagtgtagagaaaaccataccttactcagacaaactcttcgagatggttcttggtcctgcagcttataatgttccattgccaaagaaatcgattcagtcgggtccactaaaaatctctagtgtatcagaagtaatgaaagaatctaaacagtctgcctcacaactccaaaaacaaaagggagatactccagcttcagcaacagcacctacagaagcggctcaaattatttctgcagcaggtgataccctgtcggtcccagcccctgcagttcagcctgaggaatctttaaaaactgatcaccctgaaattggtgaaggaaaacccacacctgcactttcagaagaagcatcctcatcttctataagggagcgaccacctgaagaagttgcagctcgccttgcacaacaggaaaaacaagaacaagttaaaattgagtctctagccaagagcttagaagatgctctgaggcaaactgcaagtgtcactctgcaggctattgcagctcagaatgctgcggtccaggctgtcaatgcacactccaacatattgaaagccgccatggacaattctgagattgcaggcgagaagaaatctgctcagtggcgcacagtggagggtgcattgaaggaacgcagaaaggcagtagatgaagctgccgatgcccttctcaaagccaaagaagagttagagaagatgaaaagtgtgattgaaaatgcaaagaaaaaagaggttgctggggccaagcctcatataactgctgcagagggtaaacttcacaacatgatagttgatctggataatgtggtcaaaaaggtccaagcagctcagtctgaggctaaggttgtatctcagtatcatgagctggtggtccaagctcgggatgactttaaacgagagctggacagtattactccagaagtccttcctggatggaaaggaatgagtgtttcagacttagctgacaagctctctactgatgatctgaactccctcattgctcatgcacatcgtcgtattgatcagctgaacagagagctggcagaacagaaggccaccgaaaagcagcacatcacgttagccttggagaaacaaaagctggaagaaaagcgggcatttgactctgcagtagcaaaagcattagaacatcacagaagtgaaatacaggctgaacaggacagaaagatagaagaagtcagagatgccatggaaaatgaaatgagaacccagcttcgccgacaggcagctgcccacactgatcacttgcgagatgtccttagggtacaagaacaggaattgaagtctgaatttgagcagaacctgtctgagaaactctctgaacaagaattacaatttcgtcgtctcagtcaagagcaagttgacaactttactctggatataaatactgcctatgccagactcagaggaatcgaacaggctgttcagagccatgcagttgctgaagaggaagccagaaaagcccaccaactctggctttcagtggaggcattaaagtacagcatgaagacctcatctgcagaaacacctactatcccgctgggtagtgcagttgaggccatcaaagccaactgttctgataatgaattcacccaagctttaaccgcagctatccctccagagtccctgacccgtggggtgtacagtgaagagacccttagagcccgtttctatgctgttcaaaaactggcccgaagggtagcaatgattgatgaaaccagaaatagcttgtaccagtacttcctctcctacctacagtccctgctcctattcccacctcagcaactgaagccgcccccagagctctgccctgaggatataaacacatttaaattactgtcatatgcttcctattgcattgagcatggtgatctggagctagcagcaaagtttgtcaatcagctgaagggggaatccagacgagtggcacaggactggctgaaggaagcccgaatgaccctagaaacgaaacagatagtggaaatcctgacagcatatgccagcgccgtaggaataggaaccactcaggtgcagccagagtgaggtttaggaagattttcataaagtcatatttcatgtcaaaggaaatcagcagtgatagatgaagggttcgcagcgagagtcccggacttgtctagaaatgagcaggtttacaagtactgttctaaatgttaacacctgttgcatttatattctttccatttgctatcatgtcagtgaacgccaggagtgctttctttgcaacttgtgtaacattttctgttttttcaggttttactgatgaggcttgtgaggccaatcaaaataatgtttgtgatctctactactgttgattttgccctcggagcaaactgaataaagcaacaagatg

SEQ ID NO: 767 - DNA, 2991 bp, human
gtggcttgccggcttcggggaaggtgcggcaggcggtgctgcggcctggcacagcaggtttggggtgcgggaggcgggcggggtaggagcgcggcgggcggggccgggcggcgggcggggctggcggggcggccgggccatgcagggcgcagagccggctaaaccctgctgagacccggctccgtgcgtccaggggcggctaatgcccctcacgctgtctacgctgctgcaaccgggccgcatctggacggggcgccgcgcggcggagccgacgccgggccacaatgctgcttggagcctctctggtgggggtgctgctgttctccaagctggtgctgaaactgccctggacccaggtgggattctccctgttgttcctctacttgggatctggcggctggcgcttcatccgggtcttcatcaagaccatcaggcgcgatatctttggcggcctggtcctcctgaaggtgaaggcaaaggtgcgacagtgcctgcaggagcggcggacagtgcccattttgtttgcctctaccgttcggcgccaccccgacaagacggccctgatcttcgagggcacagatacccactggaccttccgccagctggatgagtactcaagcagtgtagccaacttcctgcaggcccggggcctggcctcgggcgatgtggctgccatcttcatggagaaccgcaatgagttcgtgggcctatggctgggcatggccaagctcggtgtggaggcagccctcatcaacaccaacctgcggcgggatgctctgctccactgcctcaccacctcgcgcgcacgggcccttgtctttggcagcgaaatggcctcagccatctgtgaggtccatgccagcctggacccctcgctcagcctcttctgctctggctcctgggagcccggtgcggtgcctccaagcacagaacacctggaccctctgctgaaagatgctcccaagcaccttcccagttgccctgacaagggcttcacagataaactgttctacatctacacatccggcaccacagggctgcccaaggccgccatcgtggtgcacagcaggtattaccgcatggctgccctggtgtactatggattccgcatgcggcccaacgacatcgtctatgactgcctccccctctaccactcagcaggaaacatcgtgggaatcggccagtgcctgctgcatggcatgacggtggtgattcggaagaagttctcagcctcccggttctgggacgattgtatcaagtacaactgcacgattgtgcagtacattggtgaactgtgccgctacctcctgaaccagccaccgcgggaggcagaaaaccagcaccaggttcgcatggcactaggcaatggcctccggcagtccatctggaccaacttttccagccgcttccacataccccaggtggctgagttctacggggccacagagtgcaactgtagcctgggcaacttcgacagccaggtgggggcctgtggtttcaatagccgcatcctgtccttcgtgtaccccatccggttggtacgtgtcaacgaggacaccatggagctgatccgggggcccgacggcgtctgcattccctgccagccaggtgagccgggccagctggtgggccgcatcatccagaaagaccccctgcgccgcttcgatggctacctcaaccagggcgccaacaacaagaagattgccaaggatgtcttcaagaagggggaccaggcctaccttactggtgatgtgctggtgatggacgagctgggctacctgtacttccgagaccgcactggggacacgttccgctggaaaggtgagaacgtgtccaccaccgaggtggaaggcacactcagccgcctgctggacatggctgacgtggccgtgtatggtgtcgaggtgccaggaaccgagggccgggccggaatggctgctgtggccagccccactggcaactgtgacctggagcgctttgctcaggtcttggagaaggaactgcccctgtatgcgcgccccatcttcctgcgcctcctgcctgagctgcacaaaacaggaacctacaagttccagaagacagagctacggaaggagggctttgacccggctattgtgaaagacccgctgttctatctagatgcccagaagggccgctacgtcccgctggaccaagaggcctacagccgcatccaggcaggcgaggagaagctgtgattccccccatccctctgagggccggcggatgctggatccggagccccaggttccgccccagagcggtcctggacaaggccagaccaaagcaagcagggcctggcacctccatcctgaggtgctgcccctccatccaaaactgccaagtgactcattgccttcccaacccttccagaggctttctgtgaaagtctcatgtccaagttccgtcttctgggctgggcaggccctctggttcccaggctgagactgacgggttttctcaggatgatgtcttgggtgagggtagggagaggacaaggggtcaccgagcccttcccagagagcagggagcttataaatggaaccagagcagaagtccccagactcaggaagtcaacagagtgggcagggacagtggtagcatccatctggtggccaaagagaatcgtagccccagagctgcccaagttcactgggctccacccccacctccaggaggggaggagaggacctgacatctgtaggtggcccctgatgccccatctacagcaggaggtcaggaccacgcccctggcctctccccactcccccatcctcctccctgggtggctgcctgattatccctcaggcagggcctctcagtccttgtgggtctgtgtcacctccatctcagtcttggcctggctatgaggggaggaggaatgggagagggggctcaggggccaataaactctgccttgagtcctcctaaaaaaaaaaaaaaaaaaaaaaaaaaaaaaaaaaaaaaaaaaaa

SEQ ID NO: 768 - DNA, 3426 bp, human
aattccgggcggcggcggccgaggctgaaggaagatggcggacggcgtggaccacataaacatttacgcggatgtcggcgaagagttcaaccaggaagctgaatatggtgggcatgatcagatagatttgtatgacgatgtcatatctccatctgcaaataatggagatgccccagaagaccgagattacatggatactctcccaccaactgttggtgatgatgtgggtaaaggagcagcaccaaatgttgtctatacatatactggaaagagaattgcattatatattggaaatctaacatggtggacaacagatgaagacttaactgaagcagttcattctttgggagtaaatgatattttggagataaaattttttgaaaatcgagcaaatggccagtcaaaggggtttgcccttgttggtgttggatctgaagcatcttcaaaaaagttaatggatctgttacctaaaagagaacttcatggtcagaatcctgttgtaactccatgcaataaacagttcctgagtcaatttgaaatgcagtccaggaaaactacacaatcaggacaaatgtctggggaaggtaaagctggtcctccaggaggcagttcccgtgcagcatttccacaaggtggtagaggacggggccgttttccaggggctgttcctggtggggacagatttcctgggccagcaggaccaggagggccacccccaccttttccagctggacagactccaccacgtccacccttaggtcctccaggcccacctggtccaccaggtcctccacctcctggtcaggttctgcctcctcctctagctgggcctcctaatcgaggagatcgccctccaccaccagttctttttcctggacaaccttttgggcagcctccattgggtccacttcctcctggccctccacctccagttccaggctacggcccccctcctggcccaccacctccacaacagggaccacctccacctccaggcccctttccacctcgtccacccggtccacttgggccaccccttacactagctcctcctccgcatcttcctggaccacctccaggtgccccaccgccagctccgcatgtgaacccagctttctttcctccaccaactaacagtggcatgcctacatcagatagccgaggtccaccaccaacagatccatatgggcgacctccaccatatgataggggtgactatggcccccctggaagggaaatggatactgcaagaacgccattgagtgaagctgaatttgaagaaatcatgaatagaaatagggcaatctcaagcagtgctatttcgagagctgtgtctgatgccagtgctggtgattatgggagtgctattgagacactggtaactgcaatttctttaattaaacaatccaaagtatctgctgatgatcgttgcaaagttcttattagttctttgcaagattgccttcatggaattgagtccaagtcttatggttctggatcaagacgtgaacgatcaagagagagggaccatagtagatcacgagaaaagagtcgacgtcataaatcccgtagtagagaccgtcatgacgattattacagagagagaagcagagaacgagagaggcaccgggatcgtgaccgagaccgtgaccgagagcgtgaccgagagcgcgaatatcgtcatcgttagaagctgaaggaagaggatcaccttccaagacaaaacagtcttcatgggccaaaaatgacgcttgtccagcagtttgcttcttgtgattgaactgaacctgtaaggattcatggataaaatgaacaggaatagatctgaataaagcaaatctgcataaatggtaaccagtagctctacttttattttttatgttgcttaactgttttatttgaaggaaacctgtgtgatttaaaaagttatagcttttgcaactttattactggttatatacatttggccattatgatgtgcaagcaattggaaaaaaagtcaagtaaatgcttgtttttgtagtagtttgttcttgttaaaaatgtttatatgataatgtctgtaaacagcatcactttgattacaatagatgtagtgttgtaataaactgtttaatggggctgatgtgtaaagctgttcaagttatttgatgtttacacctcagggaaagtcttgtgttcagcaatatctaaagataatgttactatgacaacatttttactgtcctttaaagcattgcaatagcgtttttggatatgcctcaatctaatcttgcgttcagtgaattaaacatagtaattaagtgtcttttgcccttgattttgatattagaataggtgattacatggatatttaatatttctatattctgcttttctagctgtttttacctagttagcttgtgactttgctgaatggtatgtaaacttgtaaaaatagagatttgacagacatagcaatctagtcaatgtgtaaggggtcaaaaaaaacagaggttttaacacataagtaaaaacccgtacatatttgatgtgtaatgcaggttaattacaacacagatgtaccgaaacacttaattgtgaaccgctaacattgaagaaattttgacaattccgatttgatgctgcaattacttgctgtttttattgatcttatggtttatttcttaagccatagtcagtgtaaatacagccctgcagcaggtaaatgtgagtaaagagagccttatattttccaattggtataaaatttttgaaggatgtgatgttcattaacattcggttgtattccccagtatttgtaatgggaaattacagataaaccgtgtctgcacagtttaaggaatactatgtatattcatgcaccgtattgattcatgctatagttacttaatcaaagatttttttcaaacctgccttacatataggcccactttaaaagcacctgactagcatgtgttcttgattgcaaaattggcagaggcagggtgtcaacttgattaggtgtttttatgggaatgtaatttgaaatcactacttcagaaatttgacttaaaattcttgagcacgttaatatgtttttaagatctgattatctttgagagatcttctgttaatacacattggttgttaaagagtacccaaattctaggacaatgcttaaagtgttaaaataccctagatactgtgttatgtgcaactgtagaaaccctccagaaatttccactgctgttcttcactttcatcttgtctgctatcaaaccacttctgacaaaattagctgttttgaattacccatatcactgccagttttattttaaaatattttgtgtttgaagtatctgtgcatgggatcgttgatgtttatcagaactgttcactttcagaaatgattttttaaagcattttgttgaaatgcggttgctt

SEQ ID NO: 769 - DNA, 766 bp, human
aaacgcgggcgggcgggcccgcagtcctgcagttgcagtcgtgttctccgagttcctgtctctctgccaacgccgcccggatggcttcccaaaaccgcgacccagccgccactagcgtcgccgccgcccgtaaaggagctgagccgagcgggggcgccgcccggggtccggtgggcaaaaggctacagcaggagctgatgaccctcatgatgtctggcgataaagggatttctgccttccctgaatcagacaaccttttcaaatgggtagggaccatccatggagcagctggaacagcagtggggagcatcagaaccagctcaacagtttgtctactgtccggtcccagagaaactcaagattctagcaagccccttgtgtggggcttgggttgggacatgaggctgctgctggagcttactctgcaactgtttctccaaatgccagaacccaacattgatagtcccttgaacacacatgctgccgagctctggaaaaaccccacagcttttaagaagtacctgcaagaaacctactcaaagcaggtcaccagccaggagccctgacccaggctgcccagcctgtccttgtgtcgtctttttaatttttccttagatggtctgtcctttttgtgatttctgtataggactctttatcttgagctgtggtatttttgttttgtttttgtcttttaaattaagcctcggttgagcccttgtatattaaataaatgcatttttgtccttttttagacaaaaaaaaaaaa

SEQ ID NO: 770 - DNA, 4278 bp, human
cgggaggagcggggtccgcgcggcggacgaggcgggggcaggaggcgcaggcagagcgagcgcgggaggtcgccgcagcacagaggacaccgcgcgccgccgctcaacatggtcgctgcgcacgctgcccattcttcctcctctgccgagtggatcgcctgcctggataaaagaccactggagcgatccagcgaagatgtggatataatcttcactcgactgaaagaagttaaagcttttgagaaatttcacccaaatctccttcatcagatttgcttatgtggttattatgagaatctggaaaagggaataacattatttcgccagggtgatattggaacaaactggtatgctgtcctggcagggtctttggatgttaaagtatctgagaccagcagtcaccaggatgctgtgaccatctgtaccctgggaattgggacggcctttggagagtccattctggacaacacaccccgccatgcaaccatcgttaccagggagagcagtgaactgctccgcatcgagcagaaggacttcaaggcactatgggagaaatatcgacagtatatggcaggacttctggctcctccttatggtgttatggaaacgggctctaacaatgacaggattcctgacaaggagaacacacctctcattgaacctcacgttcctcttcgtcctgctaacaccattaccaaggtcccttcagagaagatcctcagagctggaaaaattttacgaaatgccattctctctcgagcacctcacatgataagagatagaaaataccacctaaagacatacagacaatgctgtgtgggaactgaactggtggactggatgatgcagcagacaccatgtgttcactcccggactcaagctgttggcatgtggcaagtcctgttagaagatggtgttctcaaccacgtggaccaggagcaccatttccaagacaaatatttattctatcgatttctggatgatgagcacgaggatgcccctttgcctactgaggaggagaagaaggagtgtgatgaggagctccaggacaccatgctgctgctgtcacagatgggccccgacgcccacatgaggatgatccttcgcaaaccacctggccagaggactgtggatgacctagagattatctatgaggagcttcttcatattaaagccttatcccatctttctaccacagtgaaacgagagttagcaggtgttctcatttttgagtctcacgccaaaggagggactgtgttgtttaaccagggggaagaaggtacctcctggtacattattctaaaaggatcagtgaatgtagtcatttacggcaagggtgtggtctgcaccctgcatgaaggagatgacttcggcaagttagcactagtgaatgatgccccacgagctgcctctatcgtcttacgagaagataactgccatttcttaagagtagacaaggaggatttcaaccggatcctaagggacgtggaggcgaatacagtcagacttaaagaacatgaccaagatgtcttggtgctggagaaggtcccagcagggaacagagcttctaatcaaggaaactcacagcctcagcaaaagtatactgtgatgtcaggaacacctgaaaaaattttagagcattttctagaaacaatacgccttgaggcaactttaaatgaagcaacagattctgttttaaatgactttattatgatgcactgtgtttttatgccaaatacccagctttgcccggcactggtggcccactaccacgcacagccttcacaaggtacagaacaggagaaaatggattatgccctcaacaataagaggcgagtcatccgcctggttctacagtgggctgccatgtatggagacctcctgcaagaggatgacgtatctatggccttcctggaggagttttatgtatctgtatcagatgatgcccggatgattgctgccctcaaggagcaactgccagagttggagaagattgtcaagcaaatctcagaagatgcaaaggcaccacaaaagaagcacaaggttcttttgcaacagttcaatacgggcgatgagagagcccagaagcgccagcctatccgcggctctgatgaagttctgtttaaggtctattgcatggaccacacctacacaaccattcgggtgccagtggccacttcggtgaaggaagtcatcagtgcagttgccgacaagctgggctccggggagggcctgatcatagtcaagatgagttccggaggagaaaaggtggtgctcaaacctaatgatgtttcagtatttacgacgctcaccattaatggacgcctgtttgcttgcccgcgagagcaattcgattcactgactcccttaccagaacaggaaggcccaactgttggaacagtgggaacttttgaactgatgagctccaaagatttagcataccagatgacaatttatgattgggaactcttcaactgcgtgcatgagctggagctaatctatcacacatttggaaggcataattttaaaaagaccacagcaaacttggatttgttcctgaggagatttaatgaaattcagttttgggtcgtcactgagatctgcctttgttctcagctcagcaagcgtgttcagctattaaaaaaatttattaagatagcagcccactgtaaggagtataaaaatctgaattccttttttgccatcgtcatgggactaagtaacattgctgtgagccgcttggcactaacgtgggagaaactgccaagcaagttcaagaagttctatgcggagtttgaaagtttaatggacccttcaaggaaccacagggcctacaggctgacagtagctaagctggaacctcctctcatccccttcatgcctttgctcattaaagatatgacatttactcatgaggggaacaagacgttcattgacaatctagtaaactttgaaaaaatgcgcatgattgcaaatacggccagaacagtgagatactacaggagccaacccttcaatcctgatgcagctcaagctaataagaaccatcaggatgtccggagttatgtacggcaattaaatgtgattgacaaccagagaactttatcacagatgtcacacagattagagcctcgtcgaccatagacatttcaaatgcccaaagcaacagtttgtctccagtccacaatctttcaaaaatgccatttatgctactactgactgtattgccactagagaattctacaaaacaagcaaaaacacatcctgagacacctcagggctgcattcagcttaccagctacctagcaagagaaggaattatttgacatgcctaaagcttacacactctagcttaggaatccccagtttgtggctaccctgtttcatttccacttgtgccatcttctttgctgaagtgttgaataaggcccacgtgaagagtttggtagaaatagccttgtcaagagaactagcaagcccctgacatttttttctaagagtgtttatgggatgagatgtgctacaaatgggatagatttggataaaattttaactcaacatcttgatttggagcctggggtttcgggaaggtgttgaggaatctatagaagtccaaattataggttgtattcttccatcttcattgtcttacctctgaaggaatagaacctgaccacattattatgaaacattatggctgtttatgtaatttagggaggactggtctgtaatttctgaatgtatatagaataatatttatgtttacaatgtaacttttcaaaatttacaaatcaggattatatacataagaattccactaagaaatgccaagattcttaaatttgccagcgttaaagtagaaaataacatttcagaagagcacaatatgcataaaacatttttcaaaattgaaatattttcctgggcattaaaaacctttactattggctacaaatttattgtacctgatgaaaacatattttctggacttaaatgttattacaaatatcttaattttcagtaattgttttgcactttcaaagattgtaaatagttcattcaatcaatggtatagagttatttatttgctacataatagatactgtgccaaataattactttttatttattttatttagtacgtaattttgaagtacattttttcctgttttcacaattagactacatttaatgtgtaggaattgtatgtatgtatatcttctgtaaataacatctagtatcttcactaaatataattgtcgaccgggaaaaaaaaaa

SEQ ID NO: 771 - DNA, 5261 bp, human
ggcgcccgaccccagccaccgccctgcggccagcgcgtcccccgactcgccgcccggagaccccgaggctccaacgagttcagaaatgtccagaaatgacaaagaaccgttttttgtgaagtttttaaagtcttcagacaattccaaatgtttttttaaagctctcgagtccataaaagaattccaatcagaagaatatcttcagattattacagaagaagaggcattgaagataaaggagaatgatagatcactttatatctgtgacccttttagtggcgttgtctttgatcacctcaaaaagcttggctgcagaattgttggtcctcaagtagtcatattttgtatgcaccaccagcgatgtgtcccaagagccgaacatccagtttataatatggttatgtctgatgtaaccatatcttgtacaagtctggaaaaagaaaaaagggaagaagttcataaatatgtacaaatgatgggcggacgagtatacagagaccttaatgtatcagtaactcaccttattgcaggagaagttggtagcaaaaaatatttagttgctgcaaacctgaagaaacctattttgcttccctcttggataaaaacactttgggagaagtcacaagagaaaaaaataactagatatactgatataaacatggaagatttcaagtgtcctatttttcttggttgcataatctgtgtgactggcttatgtggcttagacaggaaagaagttcagcaactcacagttaagcatggaggtcaatacatgggacaattgaaaatgaatgaatgtacacacctcattgtgcaagaaccaaaaggtcagaagtatgagtgtgccaagagatggaatgtacactgtgtgaccacacagtggttttttgacagtattgagaaaggtttttgtcaggatgaatccatatacaagacagaacctagaccagaagcaaagactatgcccaattcttcaactcctaccagccagatcaacacaattgatagtcgtactctttcagatgtcagcaatatttccaacataaatgcaagttgcgtaagtgaatcaatatgtaattcacttaacagcaaactggagcctacacttgaaaatctagaaaatctggatgtcagtgcatttcaagcacctgaagatttattagatggttgtcggatatatctttgcggttttagtggcagaaagctagataaactgagaagacttattaacagtggaggtggagttcgttttaaccagctaaatgaagatgtaactcatgttattgtgggagattatgatgatgaattgaagcagttttggaataaatcagcccacaggcctcatgtagtgggagcaaagtggttgctagagtgtttcagtaaaggttatatgctttctgaagaaccatatatccatgctaattaccagccagtggaaattccagtttcacatcagcctgaaagtaaagcagctcttttaaaaaagaagaacagcagcttctctaagaaagactttgctcctagtgaaaagcatgagcaagctgatgaagatctgctctctcaatatgaaaatggtagctccacagtagttgaggctaagacgtctgaagccaggccctttaatgattctactcatgctgagcccttgaatgattctactcacatttctttgcaagaagaaaaccagtcttctgtcagtcattgtgtccctgatgtttctacaattactgaagaaggcttatttagccaaaagagtttccttgttttgggttttagtaatgaaaatgaatctaacatcgcaaacatcataaaagaaaatgctgggaaaatcatgtcccttctgagcagaactgttgcggattatgctgtggttcctctgctggggtgtgaagtggaagccactgtgggagaagttgttacaaatacatggctggttacttgcatagactatcagactttgtttgatccaaagtcgaatcctctcttcacaccagttccagtaatgacaggaatgactcctttagaggattgtgttatttcatttagccagtgtgctggagcagaaaaagagtctttaacattcctagcaaacctccttggagcaagtgttcaagaatactttgttcgcaaatccaatgcaaagaaaggcatgtttgccagtactcatcttatactgaaagaacgtggtggctctaaatatgaagctgcaaagaagtggaatttacctgccgttactatagcttggctgttggagactgctagaacgggaaagagagcagacgaaagccattttctgattgaaaattcaactaaagaagaacgaagtttggaaacagaaataacaaatggaatcaatctaaattcagatactgcagagcatcctggcacacgcctgcaaactcacagaaaaaccgtcgttacacctttagatatgaaccgctttcagagtaaagctttccgtgctgtggtctcacaacatgccagacaggtcgcagcctccccagcagtaggacaaccacttcagaaggagccctcgttacacctggatacaccatcaaaattcctgtccaaggacaaactcttcaagccttcctttgatgtgaaggatgcacttgcagccttggaaactccaggacgtcccagccaacagaaaaggaaaccgagtacgccactctcagaagttattgtcaaaaacttgcaacttgctttggcaaatagctctcgaaatgctgtcgctctttctgccagccctcaactgaaagaggcccagtcagagaaggaagaagccccaaagccacttcacaaagtagtggtatgtgttagtaaaaaactcagtaagaagcagagtgaactaaatgggatcgcagcctctctaggagcagattacaggtggagttttgatgaaacagtgactcatttcatctatcaagggcggccaaatgacactaatcgggagtataaatctgtaaaagaaagaggagtacacattgtttccgagcactggcttttagattgtgcccaagagtgtaaacatcttcctgaatctctttatccacatacttataatcccaaaatgagcttggatatcagcgcagtgcaagatggccggctctgtaatagtcgactactctcagctgtgtcttcaacaaaggatgatgagccagatcctttgattttagaagaaaatgatgtagacaatatggccaccaataataaagagtcagcaccatcaaatggaagtggaaagaatgactctaaaggagttctgacacagaccttagagatgagagagaactttcagaagcagttacaggagataatgtctgcaacatcaatagtgaaaccccaagggcagaggacttccctttcaagaagtggttgtaacagcgcatcttcaacccctgacagcactcgctctgctcgcagtggacgaagtagagtcctagaggcactgaggcagtctcgtcagacagtacctgatgtcaacacagagccttcccaaaatgaacagatcatttgggatgaccctacagcaagggaggagagagcaaggcttgccagcaatttgcagtggcctagttgtcccacacaatactctgagcttcaggttgacattcaaaacttggaggattctccttttcaaaagcctttacatgattcagaaattgctaaacaggctgtctgtgatcctggaaacatacgtgtgactgaagctcccaaacacccaatctctgaagaactggaaactcccataaaagacagccacctgatccctacgcctcaagcccccagtattgcctttccactcgccaacccccctgtggctccgcaccctagagaaaagattataacgatagaggagactcatgaagaattaaaaaaacagtacatatttcagttatcatctctgaatcctcaagaacgtattgactattgtcatctgattgagaaactaggtggattggtgatagaaaagcagtgctttgatcccacctgtacacacattgttgtgggacatccacttcgaaacgagaagtatttagcctcagtggcagctgggaagtgggtgcttcatcgctcctaccttgaagcctgcaggactgctggacacttcgtgcaggaagaagactatgaatggggaagtagttccatacttgatgttttgactggaatcaatgtacagcaacgaagactagcacttgcagcaatgagatggagaaaaaaaatccagcaaagacaagaatctggcattgttgagggagcatttagtgggtggaaggttattttacatgtggatcagtctcgagaagcaggcttcaaacgccttcttcagtcaggaggagcaaaggtgctacctggtcattctgtacctttatttaaagaggccacacatcttttttctgacttgaataaactgaaaccagatgactcaggagttaatatagcagaagctgctgcccagaacgtgtactgcttgagaacagaatacattgctgattatctcatgcaggaatcacctcctcatgtagaaaattactgtctaccagaagctatttcatttattcagaataataaggaacttgggactggattatcacaaaagaggaaagctcctacagaaaaaaataaaatcaaacgacctagagtacactaatcgcatctaccctttagttaccaaacattaaatgtttttaaaaattgaaagcctgaatgtgactgtgatagatttgggtagtaatttaaagatgagtacctgaagaattctgcttcagagtataatgatgacccttcttgagttttgaacacctgaaattgtaatcactgaaatattaactgtttcttaataaaaagttacctgaaataacaacaaaatacaactcctcagctagcttgctgttaaaccacattgaagtctgttaaaagatatttatttttcttgtaaatatctgaagctgtagcttagtggaaattttagcaaggtaatggattttgctttaaaatgtctgccttacaaattcataacaacaagatttgtcagtcagcatttattcatgttttccctgatttttatcttctcaccattttacctcttttaacaggagcctgagcacaaggtttaatgaggaagctggggctataaatatgtgtgtatatatgtatatgtatgtttgtacaaatctccatgatgtttgccaagtttgaatgcgcaaaacttggaaaatgtgacaataaagaataaaagtagtaactcaaattagtat

SEQ ID NO: 772 - DNA, 2250 bp, human
gagacgctgtctgcttgctgccttaagacagctagctgaattgctgattaacttttaaaatacccagcttggtttatttttcttagaatctgttgctaagactggggacgctgttttcttttacaaagggaaatctaagttaatttcaaggcattcgaaatggggaaagactattattgcattttgggaattgagaaaggagcttcagatgaagatattaaaaaggcttaccgaaaacaagccctcaaatttcatccggacaagaacaaatctcctcaggcagaggaaaaatttaaagaggtcgcagaagcttatgaagtattgagtgatcctaaaaagagagaaatatatgatcagtttggggaggaagggttgaaaggaggagcaggaggtactgatggacaaggaggtaccttccggtacacctttcatggcgatcctcatgctacatttgctgcatttttcggagggtccaacccctttgaaattttctttggaagacgaatgggtggtggtagagattctgaagaaatggaaatagatggtgatccttttagtgcctttggtttcagcatgaatggatatccaagagacaggaattctgtggggccatcccgcctcaaacaagatcctccagttattcatgaacttagagtatcacttgaagagatatatagtggttgtaccaaacggatgaagatttctcgaaaaaggctaaacgctgatggaaggagttacagatctgaggacaaaattcttaccattgagattaaaaaagggtggaaagaaggcaccaaaattacttttccaagagaaggagatgaaacaccaaatagtattccagcagacattgtttttatcattaaagacaaagatcatccaaaatttaaaagggatggatcaaatataatttatactgctaaaattagtttacgagaggcattgtgtggctgctcaattaatgtaccaacactggatggaagaaacatacctatgtcagtaaatgatattgtgaaacccggaatgaggagaagaattattggatatgggctgccatttccaaaaaatcctgaccaacgtggtgaccttctaatagaatttgaggtgtccttcccagatactatatcttcttcatccaaagaagtacttaggaaacatcttcctgcctcatagaatgaagaactttgttacacatattttgataaggcactgaaaatataaaaggactggtagtttactgatgtagatgtgaattctgtataaagatgtgtaaattcttttgagggttcattaaattgcatgaatagagacgggtcaaataaataggcaaaagggatttttacagttagagataaaagagaaaaccattcactgtattttatttcatttctcctgattcagatatttttagtaatttgcttatatgtaaaagttgtttttgtggagtcagtggatatatttctaatgaagtgctagactatccaattacttaatttcttatacctttagataatcagtatgaaaagttcccatttataatggaaatgaaaattcttaactaaactatacatgtaatatgtatttctagaagagaataaaaacccaagtcagttattagatttaaatcaccttctgaaatgctgctatagggctggtatctgtaaaagaatatcctgatgcatctgtttcaccattttgatttttaaagtatgctgtagcatttcttaataacatcgttgtgatgttcttaaggcagatctttcttcataaaaaggaaagtaatggcaatttctctcctgtggaaatcccaattgcttgaattactgatattttagaatagactttttaaaatgccatatgtaattttatgcaagttgactatatatcttgtacttaataaattataggctcattttgttctctgctagtttaaagtaattcgtttaataatagatgtgtttttagaggaaatgctgttacttggaattaattttccagttatacagtcttctataacttactaataatattctatatgtactttatgtaatttccctaaaaagaatgaactaccactacactatggtgttaaaccaaaatatagggaaaataaacactaactgctgcttatggataatgttgcaactacttgttatgcatataaatattttactttttcacatgtatagattgcatttcttaggtgttttaattttttaaatatatttatgttttaaaaaaaaaaaaaaa

SEQ ID NO: 773 - DNA, 2006 bp, human
cctgccgcgtcaggccgctcctctcggctccgcgctccttccctcgcgcgtgggcacccgcccccgagcggtgagagcgcgtgcgcgcgcgcccttctccgtgggcgagccagccagtcccgctgcacacgctcgcagtctgtgggccctccgggaggcggcggaggtcaccgcggggagaggggcgggcgcagcatggcagcctccttacggctcctcggagctgcctccggtctccggtactggagccggcggctgcggccggcagccggcagctttgcagcggtgtgttctaggtcagtggcttcaaagactccagttggattcattggactgggcaacatggggaatccaatggcaaaaaatctcatgaaacatggctatccacttattatttatgatgtgttccctgatgcctgcaaagagtttcaagatgcaggtgaacaggtagtatcttccccagcagatgttgctgaaaaagctgacagaattattacaatgctgcccaccagtatcaatgcaatagaagcttattccggagcaaatgggattctaaaaaaagtgaagaagggctcattattaatagattccagcactattgatcctgcagtttcaaaagaattggccaaagaagttgagaaaatgggagcagttttcatggatgcccctgtttctggtggtgtaggagctgcacgatctgggaacctcacgtttatggtgggaggagttgaagatgaatttgctgctgcccaagagttgctggggtgcatgggctccaacgtggtgtactgtggagctgttgggactgggcaggcggcaaagatctgcaacaacatgctgttagctattagtatgattggaactgctgaagctatgaatcttggaatcaggttagggcttgacccaaaactactggctaaaatcctaaatatgagctcaggacggtgttggtcaagtgacacttataatcctgtacctggagtgatggatggcgttccctcggctaataactatcagggtggatttggaacaacactcatggctaaggatctgggattggcacaagactctgctaccagcacaaagagcccaatccttcttggcagtctggcccatcagatctacaggatgatgtgtgcaaagggctactcaaagaaagacttctcatccgtgttccagttcctacgagaggaggagaccttctgagtgtgccctttggccacggacactgttgggaaccaaactctgtcttggagcctccttttagctcactccacaagtaaatggatttaatcaaaggtcacctatctgcttttgattgtctaggtcacagtaatccctaggatttttcaccgcttattctttttgtctttttaacaaacatattatccgaattttttttctgcaagccactgatagtctctgctaactagcttaattgacctttttacaaagtttgatccccaagcatcctcaactaaatcattgaatacttcaatcaggatattatctgctttactttacaaataaaaccaaatcttttgtcaacaggatgaaacccatcttaaaggaaagaaaaggaattggtgtgaagagagaagttagagaagggaaatgcagtgaattactatctgtgtccatcaggaagtttgtcctgttaaccaaatggttactgcactaccagggttactggtttattttccagggagctgataaagcaggagaactgttgctgcatgttttctatttggactccgtcacaatatggtaggatatccctcaccaactcccgacactcagcagacttgtttttatatttttttctttcttgttcattcttactacgtattttttgacttaagaatgacatctttagatgcatttcagagccaatgatgatatttgctttagataattattatattattataaatatagccatattattttgaattcaaataaatttctatactggtaaaaaaaaaaaaaaaaaaaaaaaaaaaaaa

SEQ ID NO: 774 - DNA, 2610 bp, human
caggggcggaggcggcggccagggaggaagcggaggaggcggaggcggccgcggcgttcgcccgcccgctcgctcgctcggtttccccgcccccgccgggcttaacgccgctgaaggtatccgggtgcgcgctgtcgcaacctgccctcatcctggcccgcgactgtaagaccggacccacatccagaccaatcttcctgtccgggctgctgcgacgcgggctccgcaggttgcaggcgggcggccggggcgcctgaaggttaccgagtgcatgagcgcctagcgcttcccgcgctgccccgcccgctggcccgccgacccgcccgccggctcgcccgccagcccctcggcgcccggcggcggcggcggcggtggcggcgacggtcgcaggaggtgccgtctgcctcccaggtgcgcgcttcgctcccggagccgcggaactcggcggccgccatggcgtccaacatggaccgggagatgatcctggcggattttcaggcatgtactggcattgaaaacattgacgaagctattacattgcttgaacaaaataattgggacttagtggcagctatcaatggtgtaataccacaggaaaatggcattctacaaagtgaatatggaggtgagaccataccaggacctgcatttaatccagcaagtcatccagcttcagctcctacttcctcttcttcttcagcgtttcgacctgtaatgccatccaggcagattgtagaaaggcaacctcggatgctggacttcagggttgaatacagagacagaaatgttgatgtggtacttgaagacacctgtactgttggagagattaaacagattctagaaaatgaacttcagatacctgtgtccaaaatgctgttaaaaggctggaagacgggagatgtggaagacagtacggtcctaaaatctctacacttgccaaaaaacaacagtctttatgtccttacaccagatttgccaccaccttcatcatctagtcatgctggtgccctgcaggagtcattaaatcaaaacttcatgctgatcatcacccaccgagaagtccagcgggagtacaacctgaacttctcaggaagcagtactattcaagaggtaaagagaaatgtgtatgaccttacaagtatccccgttcgccaccaattatgggagggctggccaacttctgctacagacgactcaatgtgtcttgctgaatcagggctctcttatccctgccatcgacttacagtgggaagaagatcttcacctgcacagacccgggaacagtcggaagaacaaatcaccgatgttcatatggttagtgatagcgatggagatgactttgaagatgctacagaatttggggtggatgatggagaagtatttggcatggcgtcatctgccttgagaaaatctccaatgatgccagaaaacgcagaaaatgaaggagatgccttattacaatttacagcagagttttcttcaagatatggtgattgccatcctgtattttttattggctcattagaagctgcttttcaagaggccttctatgtgaaagcccgagatagaaagcttcttgctatctacctccaccatgatgaaagtgtgttaaccaacgtgttctgctcacaaatgctttgtgctgaatccattgtttcttatctgagtcaaaattttataacctgggcttgggatctgacaaaggactccaacagagcaagatttctcactatgtgcaatagacactttggcagtgttgtggcacaaaccattcggactcaaaaaacggatcagtttccgcttttcctgattattatgggaaagcgatcatctaatgaagtgttgaatgtgatacaagggaacacaacagtagatgagttaatgatgagactcatggctgcaatggagatcttcacagcccaacaacaggaagatataaaggacgaggatgaacgtgaagccagagaaaatgtgaagagagagcaagatgaggcctatcgcctttcacttgaggctgacagagcaaagagggaagctcacgagagagagatggcagaacagtttcgtttggagcagattcgcaaagaacaagaagaggaacgtgaggccatccggctgtccttagagcaagccctgcctcctgagccaaaggaagaaaatgctgagcctgtgagcaaactgcggatccggacccccagtggcgagttcttggagcggcgtttcctggccagcaacaagctccagattgtctttgattttgtagcttccaaaggatttccatgggatgagtacaagttactgagcacctttcctaggagagacgtaactcaactggacccaaataaatcattattggaggtaaagttgttccctcaagaaacccttttccttgaagcaaaagagtaaacacggcccagcggtggaaccagccattccttgacaagccagcagcctgcgtcaggagaagggctcctcgccaacccacccacacgctcgtctcactcaattcaatgtcacacttctgcctcttgcaaaattgctggaaaaagtaataataaatatagctacttaagatttcccatcaaaaaaaaaaaaaaaaaaaaaaaaaaa

SEQ ID NO: 775 - DNA, 3282 bp, human
cggctgcgcactgggcgctctcgcccgagaagccgcagtctcgagagcgtcaacgaggtgtttcggtagtctctggccatcctttctgcgcacccggtgtcgctgggctgcaccccgggcggggacgtccgccgggcacgggagggggccaagatgccgatcaataaatcagagaagccagaaagctgcgataatgtgaaggttgttgttaggtgccggcccctcaatgagagagagaaatcaatgtgctacaaacaggctgtcagtgtggatgagatgaggggaactatcactgtacataagactgattcttccaatgaacctccaaagacatttacttttgatactgtttttggaccagagagtaaacaacttgatgtttataacttaactgcaagacctattattgattctgtacttgaaggctacaatgggactatttttgcatatggacaaaccggaacaggcaaaacttttaccatggaaggtgttcgagctattcctgaacttagaggaataattcccaattcatttgctcacatatttggtcatattgcaaaagcggagggtgatacaagatttttggttcgagtgtcttatttggaaatatataatgaagaagttcgtgaccttttgggcaaggatcagacacaaaggttagaggttaaagaaagacctgatgtgggagtttatatcaaagatttatcagcttatgtggtaaataatgctgatgatatggatagaattatgacgctaggccacaaaaatcgttctgttggtgcaactaatatgaacgaacatagttcccgttcccatgccatctttacaattactatagaatgcagtgaaaaaggcattgatggtaacatgcatgtcaggatggggaagctccatcttgtagatcttgctggttcagaaagacaggcaaaaactggagctactggacagcgcctaaaggaagctacaaaaatcaatctttcactttccacccttggtaatgtaatttctgccttggttgatggaaaaagcactcatgtgccttatcgtaactctaaactgactcgtcttcttcaggattccttaggaggaaattcaaaaaccatgatgtgtgcaaatattgggccagcagattacaattatgatgaaactatcagtacattacggtatgccaatcgtgctaagaatattaaaaataaagctagaattaatgaagatccaaaggatgctttgctgcgtcagttccagaaagaaatagaagaactgaaaaagaagcttgaagaaggagaagaaatatcaggctctgatatcagtgggtcagaggaagatgatgatgaagagggtgaggttggagaagatggagagaaaaggaaaaaaagaaggggaaaaaagaaagtctccccagacaagatgattgaaatgcaagcaaaaattgatgaggagagaaaagcacttgaaacaaagctcgacatggaagaagaagaaagaaacaaggctagagctgaattagagaaacgggaaaaagatcttcttaaagcccaacaagagcatcagtctttgctggaaaaattatctgccctggaaaagaaggtaattgttggtggggttgacttgttggccaaagctgaggaacaagagaaacttcttgaagaatctaacatggaactggaagaaaggaggaaaagagcagagcaacttcgcagagaacttgaggaaaaagagcaagaacgcttggatattgaagaaaaatataccagtttgcaagaggaagcacagggaaagaccaagaagttaaagaaagtttggactatgctgatggctgcaaagtcagagatggctgatctccaacaagaacatcagagggaaattgaaggcctactggagaacattcggcaacttagccgggagcttcgacttcagatgcttattattgataactttatacctcgggattatcaggaaatgattgaaaactatgtccattggaatgaagacataggagaatggcagctaaaatgtgttgcttatacaggaaataacatgaggaagcaaaccccagtacctgataaaaaggagaaagatccctttgaggtggacctttctcacgtgtatcttgcctatactgaggagagtctgcgtcagtctttgatgaaactagaaagaccacgaacttcaaaggggaaagcaaggccaaagacagggagaagaaagcgttctgcaaagcctgaaactgtaattgactctttactgcagtaaatgttacagacttaaagtcacaataaaaattagtgatattctcatgcctggacaaaatctttaattaaaacagtgaagacttctctataatttcaattaatggaagttgtagatcaatgaataagactggaaataataatttgcttaagaacttttagtctacatatattaatataacattaaaattgtacaactggtgattgttcaaattgttgtactactactcttcaattgtactgtgcagggaagttgggggaacagttcatactatagagagttacagtttagatgtatgtgtaaatcgattagctatttatccaactactgtatatttaggtaactagaatttcaaaatagaaaaaaaaaaactgtgtcctgttttgcacatagaaagaagcagatcagattgtcctatgttgcgctgttatatatgaatgtttggactgtacatctaaagaatgattccgtcctaacacccacccagcctgtttgaacacattctaattgtctaacatttgttgcattttaagtatgagatgactgatcttatgaatgttttgtagaaaatgttataatttaacagtctttgcgagtatacatgttttttaacaagttggaaatgtttcatctgaacctttcctaacttttttttgccagtttgagttcaaatcaaatacaccttaagttctggtttcatgttctcttgaaacattgaattgtacgtaaatataaaggatctactgttgcggaaaattaagaagctaaatactgctcagttatctttgcctgcgtgtatatttttaaaaattcactctgaagtgttatggatgcttttctttgagttctaaattttggtgggaattactttatgtctcccagttaagaagagtctccattttccagaaaatacagctaagcaagaaaaatatcttttaaatactttgcctttaaaacactttttattttgtttttctattttaaaaataaaatattattttctgaaaaaaaaaaagaaaaaaaaaaaaaaaa

SEQ ID NO: 776 - DNA, 1693 bp, human
ggcggggtttcccgcgctcggcggaagcggaaggggcggggctccgcgctcctagtctccactgctgccgccgtcgccgccacccgagccggagcgggctgggccgccaaggcaagatggtggactacagcgtgtgggaccacattgaggtgtctgatgatgaagacgagacgcaccccaacatcgacacggccagtctcttccgctggcggcatcaggcccgggtggaacgcatggagcagttccagaaggagaaggaggaactggacaggggctgccgcgagtgcaagcgcaaggtggccgagtgccagaggaaactgaaggagctggaggtggccgagggcggcaaggcagagctggagcgcctgcaggccgaggcacagcagctgcgcaaggaggagcggagctgggagcagaagctggaggagatgcgcaagaaggagaagagcatgccctggaacgtggacacgctcagcaaagacggcttcagcaagagcatggtaaataccaagcccgagaagacggaggaggactcagaggaggtgagggagcagaaacacaagaccttcgtggaaaaatacgagaaacagatcaagcactttggcatgcttcgccgctgggatgacagccaaaagtacctgtcagacaacgtccacctggtgtgcgaggagacagccaattacctggtcatttggtgcattgacctagaggtggaggagaaatgtgcactcatggagcaggtggcccaccagacaatcgtcatgcaatttatcctggagctggccaagagcctaaaggtggacccccgggcctgcttccggcagttcttcactaagattaagacagccgatcgccagtacatggagggcttcaacgacgagctggaagccttcaaggagcgtgtgcggggccgtgccaagctgcgcatcgagaaggccatgaaggagtacgaggaggaggagcgcaagaagcggctcggccccggcggcctggaccccgtcgaggtctacgagtccctccctgaggaactccagaagtgcttcgatgtgaaggacgtgcagatgctgcaggacgccatcagcaagatggaccccaccgacgcaaagtaccacatgcagcgctgcattgactctggcctctgggtccccaactctaaggccagcgaggccaaggagggagaggaggcaggtcctggggacccattactggaagctgttcccaagacgggcgatgagaaggatgtcagtgtgtgacctgccccagctaccaccgccacctgcttccaggcccctatgtgccccttttcagaaaacagatagatgccatctcgcccgctcctgacttcctctacttgcgctgctcggcccagcctggggggcccgcccagccctccctggcctctccactgtctccactctccagcgcccattcaagtctctgctttgagtcaaggggcttcactgcctgcagccccccatcagcattatgccaaaggcccgggggtccggggaagggcagaggtcaccaggctggtctaccaggtagttggggagggtccccagccaaggggccggctctcgtcactgggctctgttttcactgttcgtctgctgtctgtgtcttctatttggcaaacagcaatgatcttccaataaaagatttcagatgctcaaaaaaaaaaaaaaaaaaaaaa

SEQ ID NO: 777 - DNA, 3600 bp, human
gaggcactagggatcgtccgcaggattgggactgatacagaggccgccacggagcccgccggagccaccgttcctgctgctgccgccgctgcccgaatcggaaccgtcgggccgcagccgccggcaatgccgcgaaggaagaggaatgcaggcagtagttcagatggaaccgaagattccgatttttctacagatctcgagcacacagacagttcagaaagtgatggcacatcccgacgatctgctcgagtcacccgctcctcagccaggctaagccagagttctcaagattccagtcctgttcgaaatctgcagtcttttggcactgaggagcctgcttactctaccagaagagtgacccgtagtcagcagcagcctaccccagtgacaccgaaaaaataccctcttcggcagactcgttcatctggttcagaaactgagcaagtggttgatttttcagatagagaaactaaaaatacagctgatcatgatgagtcaccgcctcgaactccaactggaaatgcgccttcttctgagtctgacatagacatctccagccccaatgtatctcacgatgagagcattgccaaggacatgtccctgaaggactcaggcagtgatctctctcatcgccccaagcgccgtcgcttccatgaaagctacaacttcaatatgaagtgtcctacaccaggctgtaactctctaggacaccttacaggaaaacatgagagacatttctccatctcaggatgcccactgtatcataacctctcagctgacgaatgcaaggtgagagcacagagccgggataagcagatagaagaaaggatgctgtctcacaggcaagatgacaacaacaggcatgcaaccaggcaccaggcaccaacggagaggcagcttcgatataaggaaaaagtggctgaactcaggaagaaaagaaattctggactgagcaaagaacagaaagagaaatatatggaacacagacagacctatgggaacacacgggaacctcttttagaaaacctgacaagcgagtatgacttggatcttttccgaagagcacaagcccgggcttcagaggatttggagaagttaaggctgcaaggccaaatcacagagggaagcaacatgattaaaacaattgcttttggccgctatgagcttgatacctggtaccattctccatatcctgaagaatatgcacggctgggacgtctctatatgtgtgaattctgtttaaaatatatgaagagccaaacgatactccgccggcacatggccaaatgtgtgtggaaacacccacctggtgatgagatatatcgcaaaggttcaatctctgtgtttgaagtggatggcaagaaaaacaagatctactgccaaaacctgtgcctgttggccaaactttttctggaccacaagacattatattatgatgtggagcccttcctgttctatgttatgacagaggcggacaacactggctgtcacctgattggatatttttctaaggaaaagaattcattcctcaactacaacgtctcctgtatccttactatgcctcagtacatgagacagggctatggcaagatgcttattgatttcagttatttgctttccaaagtcgaagaaaaagttggctccccagaacgtccactctcagatctggggcttataagctatcgcagttactggaaagaagtacttctccgctacctgcataattttcaaggcaaagagatttctatcaaagaaatcagtcaggagacggctgtgaatcctgtggacattgtcagcactctgcaagcccttcagatgctcaaatactggaagggaaaacacctagttttaaagagacaggacctgattgatgagtggatagccaaagaggccaaaaggtccaactccaataaaaccatggatcccagctgcttaaaatggacccctcccaagggcacttaaagtgacctgtcattccgagccagcgaaccccagcagtaggaatccgtaccctagggatctgtctgtcatttctctgttgctcttgtgattggcaagtacagtatcctttgggaaggccatccccctcaggactgtcctggctccgacctttgtgtacactgcagacgctggttctgaggaactgttgtttcggcctcagtgaggttgcctggatgggatctgtattagacttgagtgcaggtctctcagcactgacccaaggagttctgttatggtactgtacctgtccagtcactggttctctcctcatgtcctctcgccccatgaggttgtgttgtgtcttctaagcgtggtactagtgcttgccacctggtcaccagacctccaaatatggctgccaccaccaggacctttccagttactccttatatgtgtgttctatggaggggcagggaaaaggtggcacttgtgagtgtgtgtggattggcagggggtccattcactttgggttccatcttgctttaaatttcttcattttgattaagagacctctttttgatctgtattgggctaaccagagccaaatacttttgaagagtttcccagggactagtcatggtaatagcatataattgatctgaatgagatggagagaagaatgaaggggtggtggttctgggtttgatttgagttcacctgtgggcagtgggcagtgggcagtgtcttggtgaaagggaacggatactactttttgcctcaccgtaaagtactcactagtaaatatttccttctctctttactcccactttttacgtttgcaggtgccaaagtaatgtccacttttccctttcatgctgcatattaactggttaattatactgcagaaaccttttcacctccactagtctgatacagtacatctgtacttccatataccttgcactgattttgtctgagtgccctgggagaagtagaaaatgattgaaagtgacttccgtatctcagcccatgactcagcaaggcagaatggccacccctgccaaagtttgcttctcttttcaacagtgcctcaccctccctctaggattaaagtgcttctgcccttccacgaactcctcctccatttcctttttgggatttgtcaccatccttctattctctggtcttctatttttggtgttgttcaagtgaaggaagagatgttccctctaatttctctctagcccattataacctgctatcttggggcaacttttgatgtatgacatgtcacccttcccaacttggtctcctccaacatgctgtcttcatgtggagccctcaccacaatccctgactccggtcatttgtgcccttctcttgtcatctctgtacactacttatattcactgtgggttgggggagctaattttaagcatgttcagtggcagctcccctccagtttcagtgtcactgttaaaatttatcaaaaagcaacttcactaggggttttcttaagggataaaggccttttacagaagctaaacccttccccacatgtggtagaatgtgctcttctatatctactcctcaataaagcatgttctctgctcaaaaaaaaaaaaaaaaaaaaaaaaaaaaaaaaaaaaaaaaaaaaaa

SEQ ID NO: 778 - DNA, 596 bp, human
tggctgggatcatccgcggcggccgggctcgtggggcgcctggagtgagggttctggttcccgccggcgaggattgttaaaatgagtcttcggaagcaaacccctagtgacttcttaaagcaaatcatcggacgaccagttgtggtaaaattaaattctggagtggattatcgaggggtcctggcttgcctggatggctacatgaatatagccctggagcagacagaagaatatgtaaatggacaactgaagaataagtatggggatgcatttatccgaggaaacaatgtgttgtacatcagtacacagaagagacggatgtgaagacaccaagagagcaacgcttttcatagttggatatatttttttatgaattttttctaatttttgcttcttttgtgatacaatttgtcctctttttataatagttggtgatttttcactgacatgtgagtaagataaatgtatacaattgtggatttaattgtgaaatgttctttcacttgtaagtttcagtcattttcttttacctcgttgtcagtgtacagaatgctaaaataattaaaaaaagacaaaataaaaaaaaaaaaaaaaaa

SEQ ID NO: 779 - DNA, 1077 bp, human
agcagtctttgaaacagctgtaacggcatctgtgaaagaagataggttccaggaacggaactgccacttagattgtaaattcctgaaaaacaggacgtttttgcatctcctcccggcttccccatccctaaaccaacgtctgttgaattaaactaccaaacaaaataactgcagtacagcaatggcgatcagaaggtagaacagctgtatggctgcacattcccatcctccaaagccgatttattgcccctgctgcttccctgggcttctgctttcaccacgcagaatcggattcatcaacgttgactctgtggctgagagaagggcccagcagattaccaggatatgcttcacatcaagtaggagttgcaggagctgtatttgatgaaagtactagaaaaatactggttgtacaagatcgaaataaattgaaaaatatgtggaagtttccaggaggcctgtcagagcctgaagaagatattggagacacagcggttcgagaagtttttgaagagactggtataaaatcagaattcaggtccgtcctgagtattcggcaacagcacacaaatcctggagcttttgggaagtcagatatgtatatcatctgccgcctaaagccatattcattcaccataaatttttgccaggaagaatgcttaagatgtgagtggatggatctcaatgacctggcgaagactgaaaatacaactcccatcaccagcagagttgctaggctgctgctgtatgggtacagagaagggtttgacaaaattgacctgactgtggaagaacttccagcagtttacacaggactgttttataaactctatcataaggaactgccagagaattataaaactatgaaaggaattgattaaattcacatttatatgtttagaaacatgtagactaacgaatgacataagaaatagtggacattttggattgattaaacatctgactgtgattttctaatgtatatgatttccatgaagaaattttgtttctaaacatgcacattttaaaagcctcttttcgaataaagcaaatgcgtgaaaaagaaaaaaaaaaaaa

SEQ ID NO: 780 - DNA, 1854 bp, human
gaattccgggccgaaggtgcctgggcttgctcattcagtcacagtcacagccaccatgccagggaggacctgggagctgtgcctgctactgctgctggggctgggactggggtcccaggaggccctacccccaccctgtgagagtgagatttactgccacggggagctcctaaaccaagttcaaatggccaagctctaccaggatgacaagcagtttgtggacatgccactgtctatagctccagaacaagtcctgcagaccttcactgagctgtccagggaccacaatcacagcatccccagggagcagctgcaggcgtttgtccacgaacacttccaggccaaggggcaggagctgcagccctggacccctgcagactggaaagacagcccccagttcctgcagaagatttcagatgccaaactgcgtgcctgggcagggcagctgcatcagctctggaagaagctggggaagaagatgaagccagaggttctcagccaccctgagcggttctctctcatatactcagaacatcctttcattgtgcctggcggtcgctttgttgagttctactactgggactcctactgggtcatggagggtctgctcctctcagagatggctgagacggtgaagggcatgctgcagaacttcttggacctggtgaaaacctatgggcatgtccccaatggtgggcgcgtgtactacttgcagcggagccagcccccactcttgaccctcatgatggattgctacttgactcacaccaatgacaccgcctttctacaggaaaacattgaaacactagccttggaattggacttttggaccaagaacaggactgtctctgtgagcttggagggaaagaactacctcctgaatcgctattatgtcccttatgggggacccaggcctgagtcctacagcaaagatgtggagttggctgacaccttgccagaaggagaccgggaggctctgtgggctgagctcaaggctggggctgagtctggctgggacttctcttcacgctggctcattggaggcccaaaccccaactcgcttagcggcatccgaacaagcaaactggtgcctgttgacctgaatgccttcctatgccaagcagaggagctgatgagcaacttctattccaggctggggaacgactcccaggccacgaagtacagaatcctgcggtcgcagcgcttggccgccctgaacacagtcctgtgggatgagcagaccggagcctggttcgattacgaccttgagaagaagaagaaaaaccgggagttttacccatccaacctcactccactctgggccgggtgtttctctgaccctggcgtggcggacaaggctctgaaatacctggaggacaaccggatcctgacttaccagtatgggatcccgacctctctccagaagacaggccagcagtgggatttccccaatgcctgggcccccctgcaggacttggtcatcagaggcctggccaaggcacctttacgtcgggcccaggaagtggctttccagctggctcagaattggatccgaaccaattttgatgtctactcgcagaagtcagccatgtatgagaagtatgacgtcagcaacggtggacagcccggtgggggaggagaatatgaagttcaggagggatttggctgggacgaaggtgtggtcctgatgctgctggaccgctatggtgaccggctgacctcaggggccaagctggctttcctggagccccactgcctggcggccacccttctgcccagcctcctgctcagcctcctgccatggtgacagccctcctctcctcacctggccccagctcctgccccccggaattc

SEQ ID NO: 781 - DNA, 2487 bp, human
ctgagcgccctccgctcgccccgagagagacccggccatgcaggagccgctgctgggagccgagggcccggactacgacaccttccccgagaagccgcccccgtcgccaggggacagggcgcgggtcgggaccctgcagaacaaaagggtgttcctggccaccttcgccgcagtgctcggcaatttcagctttgggtatgccctggtctacacatcccctgtcatcccagccctggagcgctccttggatcctgacctgcatctgaccaaatcccaggcatcctggtttgggtccgtgttcaccctgggagcagcggccggaggcctgagtgccatgatcctcaacgacctcctgggccggaagctgagcatcatgttctcagctgtgccgtcggcggccggctatgcgctcatggcgggtgcgcacggcctctggatgctgctgctcggaaggacgctgacgggcttcgccggggggctcacagctgcctgcatcccggtgtacgtgtctgagattgctcccccaggcgttcgtggggctctgggggccacaccccagctcatggcagtgttcggatccctgtccctctacgcccttggcctcctgctgccgtggcgctggctggctgtggccggggaggcgcctgtgctcatcatgatcctgctgctcagcttcatgcccaactcgccgcgcttcctgctctctcggggcagggacgaagaggccctgcgggcgctggcctggctgcgtgggacggacgtcgatgtccactgggagttcgagcagatccaggacaacgtccggagacagagcagccgagtatcgtgggctgaggcacgggccccacacgtgtgccggcccatcaccgtggccttgctgatgcgcctcctgcagcagctgacgggcatcacgcccatcctggtctacctgcagtccatcttcgacagcaccgctgtcctgctgccccccaaggacgacgcagccatcgttggggccgtgcggctcctgtccgtgctgatcgccgccctcaccatggacctcgcaggccgcaaggtgctgctcttcgtctcagcggccatcatgtttgctgccaacctgactctggggctgtacatccactttggccccaggcctctgagccccaacagcactgcgggcctggaaagcgagtcctggggggacttggcgcagcccctggcagcacccgctggctacctcaccctggtgcccctgctggccaccatgctcttcatcatgggctacgccgtgggctggggtcccatcacctggctgctcatgtctgaggtcctgcccctgcgtgcccgtggcgtggcctcagggctctgcgtgctggccagctggctcaccgccttcgtcctcaccaagtccttcctgccagtggtgagcaccttcggcctccaggtgcctttcttcttcttcgcggccatctgcttggtgagcctggtgttcacaggctgctgtgtgcccgagaccaagggacggtccctggagcagatcgagtccttcttccgcatggggagaaggtccttcttgcgctaggtcaaggtccccgcctggagggggccaaacccccagtggctgggcctctgtgttggctacaaacctgcaccctgggaccaagaggcagcagtcatccctgccaccagccagagcacaggaagagcagtgtgatggggcctcagcagcgggtgcccctggctcgggacaggtagcactgctgtccagccacagccccagcccaggcagcccacagtgctgcacgtagccatgggccgcaggagtgcatacaaccctgcatccagggacacggccctgctgggtgacctcaggcctagtccctttcccttgcgtgaaggacacgccccacagaaggctacggggaggactgagaggacagggctggaggcagccaagtaacgtagtcatatcatcgcgctctgatctggtggcatctggctgtgcaaggaagacccggctttgccctcacaagtcttatgggcaccacagggaacatcctggacttaaaaagccagggcaggccgggcacagtggctcacgcctgtaatcccagcactttgggaggccaaagcaggtggattacccaaggccaggagttcaagaccagcctggccaacatggtgaaaccccgtctctactaaaaaatacaaaaaagctgggtgtggtggcacacacccgtagttccagctacttgggaggctgaggcagcattgcttgaacccgggaggtggaggctgcaatgagctgagatcatgccattgcactccagcctgggcaacgagagtgaaactccgtccccaccccctgccaaaaaaaaaaaaaaaaaagccagggcaaaggacctggcgtggccacttcctcctgccccagcccaacctctgggaacaggcagctcctatctgcaaactgtgttcacccttttgtaaaaataaaggaactggacccgt

SEQ ID NO: 782 - DNA, 3237 bp, human
tggaggggggaggtttttgttgaggagagcgcggccggagagcagagctccgggacccaggtgaccgggaaagcaggcagccccagcggcgggagcagccggcagcagcccaggcccggggactggggtgggggtgggaggggggctgaggggaggacctgaaggggggcggcagggcaaaagggacccctggagccctgccgccatcagagatcaagcatctggcatcagggatcttcggacccagcagaaggatccgccacaggggaggtgtcctcccagggaagccaacgagagattcacctgccccacatcaggagtgggccccccttactgacgctgctggcaaccgtagcaggccccttaacccctcagtctcctccccatcaccctcctcaggccctttccccgcctccagctctcatctcaactcccagttcccagccctctaagccctagcacccccgggtaccacctaaccctccaggtgttggccatactcacccccatcctgggaatttgccagatctctgggagggagatcgtttgtttaggcgatgcccctggtggcatgacagcgtctgcctagacccctgcccctagcctcaactccctgggcctcctttgtgtgaagagccgcccctctgcttagcagcgtggttgggggccaaagggaaagccagccccagctgggcccccggggcccaccacttatctccttgctgggcagctccccttggcctttgggcctctccctgctcctctcggcccctcctcctgggccgcctcaatgaaggagccggatgccatcaagctgtttgtggggcagatcccgaggcatctggaggagaaggacctgaagcccatcttcgaacagtttggtcggatctttgagctgactgtcatcaaggacaagtacaccgggctgcacaagggatgtgccttcctgacatactgtgcccgggattcagccctgaaggcccagagcgccctgcacgaacagaagacgcttccagggatgaacaggccgatccaggtcaagccagccgacagcgagagccgaggagaagaccggaagctctttgtggggatgctagggaagcagcagacagatgaggacgtccggaagatgtttgagcccttcgggaccatcgacgagtgcactgtgctccgggggccagatggcaccagcaaaggctgcgccttcgtgaagttccagacccacgctgaggcccaggcggccatcaacacccttcacagcagccggaccctgccaggtgcctcgtccagcctggtggtgaagtttgctgacactgagaaggagcgaggtctccgccgcatgcagcaggtggccacccagttgggcatgttcagccccatcgccctccagtttggagcctacagcgcctacacccaggccctgatgcagcagcaggcggccctggtagcggctcacagtgcctacctcagccccatggccaccatggctgccgtgcagatgcagcacatggctgccatcaatgccaatggcctcatcgccacccccatcaccccatcctcaggaaccagcacccctcctgccatcgctgccacgcctgtctctgccattccggctgccctgggcgtcaacggctacagcccggtgcccacccagcccactgggcagcctgcccctgatgctctgtatcccaacggggttcacccctacccagcccagagccccgtggcccccgtggaccccctgcagcaggcctacgcggggatgcagcactacacagcagcctacccagcagcctacagcctggttgcacctgcgttcccgcagcctccagccctggtcgcccagcagcccccaccaccacctcaacagcagcagcagcagcagcagcagcaacagcagcagcagcaaagagaaggccctgatggctgcaacatcttcatctaccacctgccccaggagttcactgactcagagatcctccagatgtttgtcccctttggccacgtcatctcagccaaagtctttgttgaccgagccaccaatcaaagcaaatgttttggctttgtgagtttcgacaatccggccagtgcccaggctgccatccaggccatgaatggcttccagatcggcatgaagcgcctcaaagtccagctaaagcggcctaaggatgccaaccggccctactgagggcccccaggtctggagatcccagaggaaggggcgcctcacaccctcttcccacgactggccccggccctctccgcacacctgccctgggccttgactgggttctggggcaaacgctgcttcgtggcccccgggggcacaagacaccggcccctcccacccccctgcctctctgaagggccatggctatgcttccctggctccaagggcccatttcctcctagatgcccttttggcctttgtgagggagcgaggaacaggctcgaaggctccggggtatctgccttctgctgggctcctgtgacaggccttctgtgcccagcgtttgtacttgcctcccccaacagtgggcctgttctacccgtgcaggccccaggagagccgcaggggcctgccacacactcccagctcaccctcaccccagcctcttccccacattaggggtttcttggaagctggctctcactcccctccaccctcagctagaggtaggatatccctgattcctgggctcccagccctaaaactcactgcctcccccaagggccccctctaaggagggtgtgggggagccctgagggctgcctctctgccagtcagccacagagaccctcctcctttcacgaggaaaagaccttcccctgaacccctaaaaatgtttacagtctctgctggttccctctgtgtaaataccactaccacccgtgcgttatccagcccgcccggcctggcccggacgctgccatctctctttctgggagtttagacaatgttgcccttggatttttttctctctcttaatttctccctttgctttggggggtaattgggtattgggaggaggggtgtggggaggggtcaaggggtttattacctgatcattttctttaggaagaggttttagggaaaagaaaatggggtgggggtgggggtggtaaggggagaccggggagtcagtttcagacagttctctatgcttatttatttattgcattttacttttaaacagttggtcttttctgtctaaataaagaaaaaagtttaaaagc

SEQ ID NO: 783 - DNA, 1454 bp, human
ggtaaggtgtagctgttctgtcccagtccccgtagctctgcaccgagcagaagaggtctagggtcacgcaggggccatggctgaggcacttgggcttggttctggcaggcggagcggacggggctgagagcggggccctacgggcggaagaggagcactggaagaaggaagagacaaatgttggggtctacggattcagttccagtttaatgatgtggccctctaaggagataattttgccttaaacagaaagacttgaccctcttaggtgtcatacctaagatcagtgtgttttttgtgtccaattcttttatcaccaaaaaagagaagaaatattgcagtgaatgaagattcctctgcattttagcactgctttttcaactgtagttggcttttgaatgaggatgacaatggaagagatgaagaatgaagctgagaccacatccatggtttctatgcccctctatgcagtcatgtatcctgtgtttaatgagctagaacgagtaaatctgtctgcagcccagacactgagagccgctttcatcaaggctgaaaaagaaaatccaggtctcacacaagacatcattatgaaaattttagagaaaaaaagcgtggaagttaacttcacggagtcccttcttcgtatggcagctgatgatgtagaagagtatatgattgaacgaccagagccagaattccaagacctaaacgaaaaggcacgagcacttaaacaaattctcagtaagatcccagatgagatcaatgacagagtgaggtttctgcagacaatcaaggatatagctagtgcaataaaagaacttcttgatacagtgaataatgtcttcaagaaatatcaataccagaaccgcagggcacttgaacaccaaaagaaagaatttgtaaagtactccaaaagtttcagtgatactctgaaaacgtattttaaagatggcaaggcaataaatgtgttcgtaagtgccaaccgactaattcatcaaaccaacttaatacttcagaccttcaaaactgtggcctgaaagttgtatatgttaagagatgtacttctcagtggcagtattgaactgcctttatctgtaaattttaaagtttgactgtataaattatcagtccctcctgaagggatctaatccaggatgttgaatgggattattgccatcttacaccatatttttgtaaaatgtagcttaatcataatctcacactgaagattttgcatcacttttgctattatcattcttttaagaattataagccaaaagaatttacgccttaatgtgtcattatataacattccttaaaagaattgtaaatattggtgtttgtttctgacattttaacttgaaagcgatatgctgcaagataatgtatttaacaatatttggtggcaaatattcaataaatagtttacatctgttaaaaaaaaaaaaaaaaaa

SEQ ID NO: 784 - DNA, 1226 bp, human
ccgggacgtggagacccggggtcccggcagccgggcggcccgcgggcccagggtggggatgcaccgccgcggggtgggagctggcgccatcgccaagaagaaacttgcagaggccaagtataaggagcgagggacggtcttggctgaggaccagctagcccagatgtcaaagcagttggacatgttcaagaccaacctggaggaatttgccagcaaacacaagcaggagatccggaagaatcctgagttccgtgtgcagttccaggacatgtgtgcaaccattggcgtggatccgctggcctctggaaaaggattttggtctgagatgctgggcgtgggggacttctattacgaactaggtgtccaaattatcgaagtgtgcctggcgctgaagcatcggaatggaggtctgataactttggaggaactacatcaacaggtgttgaagggaaggggcaagttcgcccaggatgtcagtcaagatgacctgatcagagccatcaagaaactaaaggcacttggcactggcttcggcatcatccctgtgggcggcacttacctcattcagtctgttccagctgagctcaatatggatcacaccgtggtgctgcagctggcagagaagaatggctacgtgactgtcagtgagatcaaagccagtcttaaatgggagaccgagcgagcgcggcaagtgctggaacacctgctgaaggaagggttggcgtggctggacttacaggccccaggggaggcccactactggctgccagctctcttcactgacctctactcccaggagattacagctgaggaggccagagaagccctcccctgactgcatgtggaagggcacacagcagcaggcagggaggaggcggaggtggcaaataaacctgggcaattttgtttatacaaaaaatagaaaaaaagttccaagtttttctttcttccctcattcttttatttttgaaaagtgccttcacgttgcatttttattggaggaaaacctcgctcgttcagtaagcataatctgattaacacagagaacggcaagcacatataaaatgatttttgtaggtcatctgcaagttcatggaagagctgggcctagaatgtgggttgtttcctggcctgtctagtctttgtagctgtgagacatagattacagcctatgctaattcaaaccttttaaataaaatgttccttatctcaaaaaaaaaaaaaaa

SEQ ID NO: 785 - DNA, 1669 bp, human
ctgcgagcgcctgccccatgcgccgccgcctctccgcacgatgttcccctcgcggaggaaagcggcgcagctgccctgggaggacggcaggtccgggttgctctccggcggcctccctcggaagtgttccgtcttccacctgttcgtggcctgcctctcgctgggcttcttctccctactctggctgcagctcagctgctctggggacgtggcccgggcagtcaggggacaagggcaggagacctcgggccctccccgcgcctgccccccagagccgccccctgagcactgggaagaagacgcatcctggggcccccaccgcctggcagtgctggtgcccttccgcgaacgcttcgaggagctcctggtcttcgtgccccacatgcgccgcttcctgagcaggaagaagatccggcaccacatctacgtgctcaaccaggtggaccacttcaggttcaaccgggcagcgctcatcaacgtgggcttcctggagagcagcaacagcacggactacattgccatgcacgacgttgacctgctccctctcaacgaggagctggactatggctttcctgaggctgggcccttccacgtggcctccccggagctccaccctctctaccactacaagacctatgtcggcggcatcctgctgctctccaagcagcactaccggctgtgcaatgggatgtccaaccgcttctggggctggggccgcgaggacgacgagttctaccggcgcattaagggagctgggctccagcttttccgcccctcgggaatcacaactgggtacaagacatttcgccacctgcacgacccagcctggcggaagagggaccagaagcgcatcgcagctcaaaaacaggagcagttcaaggtggacagggagggaggcctgaacactgtgaagtaccatgtggcttcccgcactgccctgtctgtgggcggggccccctgcactgtcctcaacatcatgttggactgtgacaagaccgccacaccctggtgcacattcagctgagctggatggacagtgaggaagcctgtacctacaggccatattgctcaggctcaggacaaggcctcaggtcgtgggcccagctctgacaggatgtggagtggccaggaccaagacagcaagctacgcaattgcagccacccggccgccaaggcaggcttgggctgggccaggacacgtggggtgcctgggacgctgcttgccatgcacagtgatcagagagaggctggggtgtgtcctgtccgggaccccccctgccttcctgctcaccctactctgacctccttcacgtgcccaggcctgtgggtagtggggagggctgaacaggacaacctctcatcacccccacttttgttccttcctgctgggctgcctcgtgcagagacacagtgtaggggccatgcagctggcgtaggtggcagttgggcctggtgagggttaggacttcagaaaccagagcacaagccccacagagggggaacagccagcaccgctctagctggttgttgccatgccggaatgtgggcctagtgttgccagatcttctgatttttcgaaagaaactagaatgctggattcttaagtgatatcttctgattttttaaatgatagcacctaaatgaaactttcaaaaagtaaaaaaaaaaa

SEQ ID NO: 786 - DNA, 2200 bp, human
caaggtttcggggactgagtgggtttcagactttctctcaggatttccgctggcttcaggttccggtcaggcgtcgggacagagcctgatccaggcttcggcggccggtggcagctctcgatcagctctcgcagtcggagaggcggctaaggaaaggtgccacagcagagacgcgaaggagaggccctagaaccttttcaaagaagaatggaagaaaccatgaagcttgctacgatggaagacacagtggagtactgcctgttcctgataccagatgagtcaagggactcagataaacataaagagattcttcagaagtacattgagagaataatcactcggtttgcacctatgctggtcccctacatctggcagaatcagcctttcaatcttaaatataaacctgggaaaggaggtgttcctgctcatatgtttggcgtgacaaagtttggggataacattgaggatgaatggtttattgtttatgtaataaagcagatcacaaaggaatttccagagttagtagcaaggattgaagacaatgatggtgaattcttgttaatagaagctgctgactttctccctaaatggctggatcctgaaaatagcaccaatagggtatttttctgccatggggaattgtgtattatccctgcaccaagaaaatctggagcagaatcttggttacccaccacacccccaacaattccacaagcattgaatataatcacagcacattcagaaaaaatacttgcttcagaatctatacgagctgctgtgaataggcgcatcagagggtacccagaaaaaattcaggcctcacttcatcgagcacactgcttccttccagctggcattgtggcagtgctaaagcagcgccccagattggtggctgcagcagtccaggcattttacctacgagaccctattgacctgcgagcttgtcgtgttttcaagacattcttgcctgaaacacgaataatgacatcggtcacattcactaaatgtctatatgcacaattggtgcaacaaaggtttgtgccagaccggcggagtggatacaggctgcctcctccatctgatccccagtaccgagcccatgaattgggcatgaaattggctcatggatttgagatcttatgctccaaatgtagcccacatttttctgactgcaagaaatcccttgtgactgcctcaccactctgggccagtttccttgaaagtctgaaaaagaatgattactttaagggactgatagaaggttctgctcagtaccgggaaaggctagaaatggcagagaattacttccagctctcagtagactggccagaaagttctcttgctatgagccctggtgaagaaatcttaaccttattacagacaataccatttgatatagaagaccttaagaaagaagcagctaatcttcccccagaggatgatgaccagtggttagatctctcaccagatcagctggaccagctgctgcaggaagctgttggcaaaaaagaatccgagtctgtttccaaggaggagaaggagcagaactatgacttaactgaagtctcagagagcatgaaagctttcatatccaaagtctcaacccacaagggagcagagctgcctcgagaaccttctgaggctccaatcacttttgatgcagattcttttcttaattattttgataagattttagggccaaggcctaatgagtcagattctgatgatctggatgatgaagactttgaatgtttagatagtgatgatgacttggactttgaaacacacgaacctggcgaagaggcttccctgaaaggaacacttgataatctcaagtcatacatggcccagatggaccaggaactagcacacacctgcatcagcaaaagtttcaccactaggaaccaagtggaacctgtatcccagactaccgataacaattcagatgaggaagattctggtacgggagaatctgttatggcaccagtagatgtagacctgaacctggtttcaaatatattggaatcctatagctcccaagctggactggcaggacctgcttccaatcttttacaaagcatgggagtgcagctgcctgacaacaccgatcacagaccaacaagtaagccaacaaaaaattaaccagcacatttagcttctcttttttctttttaaataaatattgaatatgattctgttc

SEQ ID NO: 787 - DNA, 1829 bp, human
ggggtgggtggggccaggaggaagatggcggcgtccgcagctgccgctgagctccaggcttctgggggtccgcggcacccagtgtgtctgttggtgttgggaatggcgggatccgggaaaaccacttttgtacagaggctcacaggacacctgcatgcccaaggcactccaccgtatgtgatcaacctggatccagcagtacatgaagttccctttcctgccaatattgatattcgtgatactgtaaagtataaagaagtaatgaaacaatatggacttggacccaatggcggcatagtgacctcactcaatctctttgctaccagatttgatcaggtgatgaaatttattgagaaggcccagaacatgtccaaatatgtgttgattgacacacctggacagattgaggtattcacctggtcagcttctgggacaattatcactgaagcccttgcatcctcatttccaacagttgtcatctatgtaatggacacatcgagaagtaccaacccagtgaccttcatgtccaacatgctctatgcctgcagcatcttatacaaaaccaagctgcctttcattgtggtcatgaataaaactgacatcattgaccacagctttgcagtggaatggatgcaggattttgaggctttccaagatgccttgaatcaagagactacatacgtcagtaacctgactcgttcaatgagcctggtgttagatgagttttacagctcactcagggtggtgggtgtctctgctgttctgggtactggattagatgaactctttgtgcaagttaccagtgctgccgaagaatatgaaagggagtatcgtcctgaatatgaacgtctgaaaaaatcactggccaacgcagagagccaacagcagagagaacaactggaacgccttcgaaaagatatgggttctgtagccttggatgcagggactgccaaagacagcttatctcctgtgctgcacccttctgatttgatcctgactcgaggaaccttggatgaagaggatgaggaagcagacagcgatactgatgacattgaccacagagttacagaggaaagccatgaagagccagcattccagaattttatgcaagaatcgatggcacaatactggaagagaaacaataaataggagactttagcacacttcacttgtttctagaagtccagaattttggacctccatgtgaaagaactgttcttacctctgaactgggggctcccataagggataattttcctcagagtagcaaagtttctcttattagagaaatcttgtgactcagatgaagtcagggatagaagacccttggacctggcaggttaatgctgattattccttggcctttcccttgtatttatgcaaggaaggatatactgagctgatactcttccaagcctacaacttcaagttttatcatttgaactcaagtacttttgctgctgaggaatggaatcaaaagaacgtagtctcctggtaaccacctcagatctctattattaggctagatgtatagcctctactcccccagcttcttgctcttgaccctgcactgtaagttgcccttctattagcagccaaggaaaagggaaacatgagcttatccagaacggtggcagagtctccttggcaatcaaccaacgttgctatgaaatatgcctcacactgtatagctcattataggccgtcaggtttgttgaaaaaagtgggcaagacatgattaatgaatcagaatcctgtttcattggtgacttggataaagactttttaattttaaaaaaaacaaaaaaaaaaaaaaaaaaaaaaaaaaa

SEQ ID NO: 788 - DNA, 1380 bp, human
actgcggccactgaagcggcggcggcggctggcccaggaggaagaagtcgagcccaagctatttccggttccggtgtcagttcgaggcgccgccgccgccgccgcagccgccggagccgcaatgcctaaaggaggaagaaagggaggccacaaaggccgggcgaggcagtatacaagccctgaggagatcgacgcgcagctgcaggctgagaagcagaaggccagggaagaagaggagcaaaaagaaggtggagatggggctgcaggtgaccccaaaaaggagaagaaatctctagactcagatgagagtgaggatgaagaagatgactaccagcaaaagcgcaaaggcgttgaagggctcatcgacatcgagaaccccaaccgggtggcacagacaaccaaaaaggtcacacaactggatctggacgggccaaaggagctttcgaggagagaacgagaagagattgagaagcagaaggcaaaagagcgttacatgaaaatgcacttggccgggaagacagagcaagccaaggctgacctggcccggctggccatcatccggaaacagcgggaggaggctgcccggaagaaggaagaggaaaggaaagcaaaagacgatgccacattgtcaggaaaacgaatgcagtcactctccctgaataagtaactgcgacccgtgggaggagatgccggggacctgggccgcgctgccaggacctctgctgtgtctcgcccaccctgtgccctggcgccgctgcaacagcccctcatggccaggagccccccatggcctggggcctcctcttcatcttggcacagaaattgtttgggggatggggggggggactgggggaggggtagctgctatctttgagacagaaagatgcaggacagcatttcatatgtaaccatttgaatgtttttgctgtttttagaattcagagcccttgctggggggtgcctgggagatggggtaagaagagctttcatttgtctggtagatagatagcatgtaagggggtggttgtcccaggaggcagctgctgacaggtttgctacacacagccccggactgtgttgcctgggtgctcattcagagaggggctatcatctgggagcctgtgcccctgggtcctcgagggtcatggcttgtccctggtcagtcctgtctgactgacctcagggcctcacctctctgcccttccctgcccggttcctactcacctggctagggccagtgcccattttcagccctacccattgatcatttcaagaaacctctgtttactgtgtggcacccaggcaaaacatgctccacaaattcaacttgtatatttggcagattaaacttgacattatcgtaaaaaaaaaaaaaaaaaa

SEQ ID NO: 789 - DNA, 2267 bp, human
gcggccgccgccatcttcgcgcgcccgctcgccctaaccccgcccccagacgccatgcccacgtgaccgctcgcccccggacccggagcgtgggcggggatttcgtcacgtgacgttgccgcggggcggtgccaagatggcgaggcccaaagaggtgaggagccggcagcgggggcggctgtaactgtgaggaaggctgcagagtggcgacgtctacgccgtaggttggaggctgtggggggtggccgggcgccagctcccaggccgcagaagtgacctgcggtggagttccctcctcgctgctggagaacggagggagaaggttgctggccgggtgaaagtgcctccctctgcttgacggggctgaggggcccgaagtctagggcgtccgtagtcgccccggcctccgtgaagccccaggtctagagatatgacccgagagtgcccatctccggccccggggcctggggctccgctgagtggatcggtgctggcagaggcggcagtagtgtttgcagtggtgctgagcatccacgcaaccgtatgggaccgatactcgtggtgcgccgtggccctcgcagtgcaggccttctacgtccaatacaagtgggaccggctgctacagcagggaagcgccgtcttccagttccgaatgtccgcaaacagtggcctattgcccgcctccatggtcatgcctttgcttggactagtcatgaaggagcggtgccagactgctgggaacccgttctttgagcgttttggcattgtggtggcagccactggcatggcagtggccctcttctcatcagtgttggcgctcggcatcactcgcccagtgccaaccaacacttgtgtcatcttgggcttggctggaggtgttatcatttatatcatgaagcactcgttgagcgtgggggaggtgatcgaagtcctggaagtccttctgatcttcgtttatctcaacatgatcctgctgtacctgctgccccgctgcttcacccctggtgaggcactgctggtattgggtggcattagctttgtcctcaaccagctcatcaagcgctctctgacactggtggaaagtcagggggacccagtggacttcttcctgctggtggtggtagtagggatggtactcatgggcattttcttcagcactctgtttgtcttcatggactcaggcacctgggcctcctccatcttcttccacctcatgacctgtgtgctgagccttggtgtggtcctaccctggctgcaccggctcatccgcaggaatcccctgctctggcttcttcagtttctcttccagacagacacccgcatctacctcctagcctattggtctctgctggccaccttggcctgcctggtggtgctgtaccagaatgccaagcggtcatcttccgagtccaagaagcaccaggcccccaccatcgcccgaaagtatttccacctcattgtggtagccacctacatcccaggtatcatctttgaccggccactgctctatgtagccgccactgtatgcctggcggtcttcatcttcctggagtatgtgcgctacttccgcatcaagcctttgggtcacactctacggagcttcctgtccctttttctggatgaacgagacagtggaccactcattctgacacacatctacctgctcctgggcatgtctcttcccatctggctgatccccagaccctgcacacagaagggtagcctgggaggagccagggccctcgtcccctatgccggtgtcctggctgtgggtgtgggtgatactgtggcctccatcttcggtagcaccatgggggagatccgctggcctggaaccaaaaagacttttgaggggaccatgacatctatatttgcgcagatcatttctgtagctctgatcttaatctttgacagtggagtggacctaaactacagttatgcttggattttggggtccatcagcactgtgtccctcctggaagcatacactacacagatagacaatctccttctgcctctctacctcctgatattgctgatggcctagctgttacagtgcagcagcagtgacggaggaaacagacatggggagggtgaacagtccccacagcagacagctacttgggcatgaagagccaaggtgtgaaaagcagatttgatttttcagttgattcagatttaaaataaaaagcaaagctctcctaaaaaaaaaaaaaaaaaaaaaaaaaaaaaaaaaaaaaaaaaaaaaaaaaaaaaaaaaaaaaaaa

SEQ ID NO: 790 - DNA, 3229 bp, human
gatcagctggcgggcgggcgggagccgagcgcggccccggctctcgctgcagcgccgcctcttctctgcgtcgcaggccggcccggcggccgtgacaatgtcgcggggctggtagcagggcgccggccgccgagccgtctcaagtttaaacttacacgaatcgctttctggaggaggaggggacccgctgcgcgattgacacgcatattcctataggcatcctccctcagcccccacccccacggccggattcgggtggctcctctccgaggtgaaatctgagaagaaatccttggatctcttttcttaaaaaaaaaaaaaaaaaaaaaaaatctagaaaccatcggtattttgctttgctgctccctattcgcaagatgaagaagtttttcgactcccggcgagagcagggcggctctggcctgggctccggctccagcggaggagggggcagcacctcgggcctgggcagtggctacatcggaagagtcttcggcatcgggcgacagcaggtcacagtggacgaggtgttggcggaaggtggatttgctattgtatttctggtgaggacaagcaatgggatgaaatgtgccttgaaacgcatgtttgtcaacaatgagcatgatctccaggtgtgcaagagagaaatccagataatgagggatctttcagggcacaagaatattgtgggttacattgattctagtatcaacaacgtgagtagcggtgatgtatgggaagtgctcattctgatggacttttgtagaggtggccaggtggtaaacctgatgaaccagcgcctgcaaacaggctttacagagaatgaagtgctccagatattttgtgatacctgtgaagctgttgcccgcctgcatcagtgcaaaactcctattatccaccgggacctgaaggttgaaaacatcctcttgcatgaccgaggccactatgtcctgtgtgactttggaagcgccaccaacaaattccagaatccacaaactgagggagtcaatgcagtagaagatgagattaagaaatacacaacgctgtcctatcgagcaccagaaatggtcaacctgtacagtggcaaaatcatcactacgaaggcagacatttgggctcttggatgtttgttgtataaattatgctacttcactttgccatttggggaaagtcaggtggcaatttgtgatggaaacttcacaattcctgataattctcgatattctcaagacatgcactgcctaattaggtatatgttggaaccagaccctgacaaaaggccggatatttaccaggtgtcctacttctcatttaagctactcaagaaagagtgcccaattccaaatgtacagaactctcccattcctgcaaagcttcctgaaccagtgaaagccagtgaggcagctgcaaaaaagacccagccaaaggccagactgacagatcccattcccaccacagagacttcaattgcaccccgccagaggcctaaagctgggcagactcagccgaacccaggaatccttcccatccagccagcgctgacaccccggaagagggccactgttcagcccccacctcaggctgcaggatccagcaatcagcctggccttttagccagtgttccccaaccaaaaccccaagccccacccagccagcctctgccgcaaactcaggccaagcagccacaggctcctcccactccacagcagacgccttctactcaggcccagggtctgcccgctcaggcccaggccacaccccagcaccagcagcaactcttcctcaagcagcaacagcagcagcaacagccaccgccagcacagcagcagccggcaggcacgttttaccagcagcagcaggcccagactcagcagtttcaggcagtacatccagcaacccagaaaccagcaattgctcagttccctgtggtgtcccaaggaggctctcaacagcagctaatgcagaatttctaccagcagcagcagcagcagcaacaacaacagcaacagcaacagctggccacagccctgcatcaacaacagctgatgactcagcaggctgccttgcagcaaaagcccactatggcagcaggacagcagccccagccacagccagctgcagccccacagccagcccctgcccaggagccagcgattcaagccccagtaagacaacagccaaaggttcagacaaccccacctcctgccgtccaggggcagaaagttggatctctcactccaccctcatcccccaaaacccaacgtgctgggcacaggcgtattctcagtgacgtaacccacagtgcagtctttggggtccctgccagcaaatcaacccagctgctccaggcagctgcagctgaggccagtctcaataagtccaagtctgcaaccaccactccatcaggctctcctcggacctctcaacaaaacgtttataatccttcagaagggtctacgtggaatccctttgatgacgataatttctccaaactcacagctgaagaactgctaaacaaggactttgccaagcttggggaaggcaaacatcccgagaagcttggaggctcagctgagagtttgatcccaggctttcaatcaacccaaggtgatgcttttgctacgacctcattttctgctggaactgctgaaaaaaggaagggtgggcagactgtggactctggcctcccgcttctaagcgtgtctgatcctttcattcctcttcaagtacctgatgcaccagaaaaactaattgagggactcaaatctcctgacacttctcttctgctccctgacctcttgcctatgacagatccttttggtagcacttctgatgctgtaattggtaaagtcatcatctctgtttcttcagtcatgcatgatatgtgtgcctgtttcaagaatgacaagtacctagttaaccaatccctggggaatagccctgccaccccagaagccaaggctatttaatctcacttgtatcactccaaatgaagtgttttccttgcttttcgggggtacaacgtctattttttgcctttcttgatatctggagatttctagagtggatctcttatgaatgaggaggaatgtggaaagtttcacatttagttagaagaactttaaaaaattggtttctaactagactacctttactgaacttaatgaaatttagcagattcttcttttttttttttttgtttgagacagagtttcactcttgttgcctg

SEQ ID NO: 791 - DNA, 6095 bp, human
gcgccgtgcggcccgtgcgactcgccggacctcgcgggcgtccctgtacggagccctcggccggtcctagcagggattgtccccatttccagctccggagcgggcggctgcgccccgctcgtcgaggagctgcgctcacctcaggggcgggcccccgcctgcgttcgcggcgccagcagaagactgatttttggaaatatgtatttgggagacagtcacgtcctattgaataccttgtgctggtgctgccatcgaaaaatctggttacactctggggaggactgctaccactgcagaactgaaccacttcggccgtgagatgagtgtccggcctgagcaggcacaccatgaatagatacacaacaatcaggcagctcggggatggaacctacggttccgtcctgctgggaagaagcattgagtctggggagctgatcgctattaaaaaaatgaaaagaaaattttattcctgggaggaatgcatgaaccttcgggaggttaagtctttaaagaagctcaaccatgccaatgtagtcaaattaaaagaagttatcagggaaaatgatcatctttattttatcttcgagtacatgaaggaaaatctttaccagctcattaaagagagaaataagttgtttcctgagtctgctataaggaatatcatgtatcagatattacaaggactcgcatttattcacaaacacggcttctttcatcgagacttaaagcctgagaacctcctctgcatgggaccagaacttgtgaaaattgcagactttggtttggcccgagaaatacgatcaaaacctccatatacagattatgtatctaccagatggtacagggctccagaagtactcctgaggtctaccaactacagctcccccattgacgtctgggcggtgggctgcatcatggcagaagtttacaccctcaggccactcttccctggagccagtgaaattgacacaatattcaaaatttgccaagtgctggggacaccaaaaaagactgactggcctgaaggctatcaactttcaagtgcaatgaacttccgttggccacagtgtgtacccaataacttaaagaccttgattcccaatgctagcagtgaagcagtccagctcctgagagacatgcttcagtgggatcccaagaaacgaccaacagctagtcaggcacttcgatatccttacttccaagttggacacccactaggcagcaccacacaaaaccttcaggattcagaaaaaccacagaaaggcatcctggaaaaggcaggcccacctccttatattaagccagtcccacctgcccagccaccagccaagccacacacacgaatttcttcacgacagcatcaagccagccagccccctctgcatctcacgtacccctacaaagcagaggtctccaggacagatcacccaagccatctccaggaggacaagccaagcccgttgcttttcccatccctccacaacaagcatccacagtcgaaaatcacagctggcctggagcacaaaaatggtgagataaagccaaagagtaggagaaggtggggtcttatttccaggtcaacaaaggattcagatgattgggctgacttggatgacttggatttcagtccatccctcagcaggattgacctgaaaaacaagaaaagacagagtgatgacactctctgcaggtttgagagtgttttggacctgaagccctctgagcctgtgggcacaggaaacagtgcccccacccagacgtcatatcagcggcgagacacgcccaccctgagatctgcagccaagcagcactatttgaagcactctcgatacttgcctgggatcagtataagaaatggcatactctcgaatccaggcaaggaatttattccacctaatccatggtctagttctggcttgtctggaaaatcttcagggacaatgtcagtaatcagcaaagtaaattcagttggttccagctctacaagttctagtggactgactggaaactatgtcccttcctttctgaaaaaagaaatcggttctgctatgcagagggtacacctagcacctattccagacccttcccctggttattcctccctgaaggccatgagacctcatcctgggcgaccattcttccacacccagcctagaagcactcctgggttgataccacggcctccagccgcccagccagtgcatggccggacagactgggcttccaagtacgcatctcggcgatgactgtctgccttggtgatgaatctcttcctagggagaagcaggatactttccctcagctgactggtgttctacctgcaagatgtgcagagggcataaaagcaaatcaacactttatagttattcttctgaactaagacatgtcaatattcttttttaaagtttttttttaaaatattgatttgaatgcagtaggcttttttgtataaaattattttattctaaaactgggtcccattattttcttaaacaacagcattttgtatatatggattatgttttagcattttatacagtcaactttgtaatgaactttttaaaaattaattgattttcctttggggttccagataatattttctacagattttgaaaaatgtaataatattaatgcagtattgcaacaggggtgcaatttaaggctatgtgatagagggttatttactcagtgtgtgcagatatttatgaagtggtgaaatttcaagtgtggctcactaggtacttcaggccttcttggactgttgttagaaaagtgatcctctgcttttcttagtaggtcattggtttgatttttggataccactctgctgttctaaaaggactattatattatataattcactttgttttacttttgttccccagatgaaagaactctaagtaaatacattttaaaaaatttttctgacaccctttaatgtggttgcagatctcagatgaaaccaagcttaattatactatgccattatattctaatttattccatttttgaaatcaagttgtatgtgtaccaataaaagagatttctgcttcaaaaggctctcaacatgaaggttaacacagtcaatcaaacttacattcctgccaagatgcatggccaaaaaactaagtatcaaagcagcagaaggtttttgattatagtaactgagatggaattttgtgcctagctcagttctccagatctggctaggagcagtcaatgactaatgttctgtcctagccaaattctcaggacaatttggggagcagaaagagttatggcagaggttccactcatctacaaagtcacagtcacatgccacatttgatctcctaaccctggtgtagtttctttcaagagtgagaactttatttgttgggcagaggctgttccattgagaggaatgtttacagcagtttcaaaaatgacaaagtcagtttggagacagaaaaagacaaaaggtccagtctcatccatctctatatggtacatttgcctcacttatggttgccttaaaggcaagagggaaggtcaccatcagtgaacgcaatgcaatctcaacagtgtattgattcatattctcctagggctcaaactactctctattggttccaggataatgacaaattgaaccatatgtaagtaatcttttattttttattttttttttgagacagagtctcactctgtcacccaggctggagtgcagtggcgcgatcttagctctctgcaacctctgcctcccaggttcaagcctcctgagtaactgggactacaggcgcccgccaccacgcccagctaattttttgtatttttagtagagacggggtttcactgtgttagccaggacggcctcgatctcctgacctcgtgatccaccctcctccacctcccaaagtactgggattacaggcatgagccactgcacccagccaagtgatcatttttataggttaaaatgataggtgaaatgaatatagacactttcatatggttcaacctaatgacttggtaaattattgccttggtgtattaataatatgttgcattctgaacaaataaccatggcttccaaagggccctaacctaaaatcggagagtaatttatgctttggagaatttgactcaaatatatacttgaccaagcaccatgatccctaggggcatgagaaaagcacataatggatgtggatgtgataggtggtcttttcctgttaacaagctggcagcaaagcttcagaaaatatatatgcaagcacaacttgaagctgaattcatttctgtattatattctcaactcgttatctaaagcatcagaacatgtgttttcagagatgagtcctttactataaggttaatatttattttcattttctgtattatatatgaaaagtaaattaatgtgaaacctggcccagcttgctggaaagcaggttttaaattgtaaatattccttagaggagcaaatggattgtttaataccatagtctcagtaatctagcttatataaggtcattacattttttaactgaaaaacctagttacctgattattgcacattataaaattgtttttctaatactttatagggcccaacttcagaaaatacttcgcttttttctttttatgctttcgtttgtttaccagcaagcaacttccctggggaagccaaacacatattcataaaaaaaatcaagtagctgatgtgcagttgagaaaactagaggactgaaaaaacaaattttaactagcaaatgctgtgaattactcttcctccccttctctgaaatgggtaaaggacaaattgtgtaaaaaaacctatgcactatagaagggaatagtaaccatttcttttgtctctctgtttctgttctgactgagaacctgcagccatttcttgttacatgaaaacaaaatgctacttgttacctctattttttgttactatacaattatgaaatgtaatgtaagacaccaacagaaatgatatacctgtaactgtacctatcaggactatacctcatttacagtcagaaagcttactgggatgtcaggaaatgatacagggttggttctcatttcgtgccgaaatgagacagaaattcagtgacgaaggtgcgttgtaggggtattgatgtgccccaggtagtgccagcagagtagggaaaactgcatttgcataaaaactactcttgacatgattgttcattttacaaaaaaattccattaattaccaagccctcacccagcccatgtgtgataggatttatgtaggaagaaacttgattttcaaataattttttaaatgtatctcttgcctaaaggactatatacatctaataaagtaacactgtgtcatcttctggagttatcaaaaattgtatacaatcaagacaacacaagaattattttatttttgagtgcaaatacaggtactgttggagttgatgggcaccatgctttctcatgaagtagcatttccctaccatcaagccattgttttgtgccattcaggagaggaaaaaaaggaatttatgctgtacatttcagttcagtgtatgaccaaaagcaatatgtttataagaagatgtttgacatactaattattttatatcatttaaaccatactgtagcaacataatatatggagctaatttgtagaattatttttacgatttccaaacaaatgtactgtactgttatataatttattgtgaggaccttctcatggaagccattaggaaaacaaactagaggtaaatatcacattaatctgtattatcaatttctcatagacactgtgctaatgtgaattttaaatgacctgcatcaagtcttctgatctcagataactcagtacagatagcaattagtcagctgatttgattacaatggagtaaccgacaatatatttatttataaagcacatattcataataacgagaagaattcagaaaaccacttaagcaagacccttctgaaataaaaaatgttgctttttaaatagtttgtcctaaggtgtttaaaacatgtcaaccttatgtaaggaaaaatttcctggtccaaataaagttgaagtttaagaaaaattg

SEQ ID NO: 792 - DNA, 4241 bp, human
cggaagtgttgggcgcagggcgtggctgcggctgcggctgccacgttggaacggaacgtggaggtggccctggccggggaggaggggcggcggcgaatgctgggagagtccgacgagcgctgcactaacgcaggatccggctgccgaaggtcctcgccaggatgaagttaaaggaagtagatcgtacagccatgcaggcatggagccctgcccagaatcaccccatttacctagcaacaggaacatctgctcagcaattggatgcaacatttagtacgaatgcttcccttgagatatttgaattagacctctctgatccatccttggatatgaaatcttgtgccacattctcctcttctcacaggtaccacaagttgatttgggggccttataaaatggattccaaaggagatgtctctggagttctgattgcaggtggtgaaaatggaaatattattctctatgatccttctaaaattatagctggagacaaggaagttgtgattgcccagaatgacaagcatactggcccagtgagagccttggatgtgaacattttccagactaatctggtagcttctggtgctaatgaatctgaaatctacatatgggatctaaataattttgcaaccccaatgacaccaggagccaaaacacagccgccagaagatatcagctgcattgcatggaacagacaagttcagcatattttagcatcagccagtcccagtggccgggccactgtatgggatcttagaaaaaatgagccaatcatcaaagtcagtgaccatagtaacagaatgcattgttctgggttggcatggcatcctgatgttgctactcagatggtccttgcctccgaggatgaccggttaccagtgatccagatgtgggatcttcgatttgcttcctctccacttcgtgtcctggaaaaccatgccagggggattttggcaattgcttggagcatggcagatcctgaattgttactgagctgtggaaaagatgctaagattctctgctccaatccaaacacaggagaggtgttatatgaacttcccaccaacacacagtggtgcttcgatattcagtggtgtccccgaaatcctgctgtcttatcagctgcttcgtttgatgggcgtatcagtgtttattctatcatgggaggaagcacagatggtttaagacagaaacaagttgacaagctttcatcatcttttgggaatcttgatccctttggcacaggacagccccttcctccgttacaaattccacagcagactgctcagcatagtatagtgctgcctctgaagaagccgcccaagtggattcgaaggcctgttggtgcttctttttcatttggaggcaaactggttacgtttgagaatgtcagaatgccttctcatcagggagctgagcagcagcagcagcagcaccatgtgttcattagtcaggttgtaacagaaaaggagttcctcagccgatcagaccaacttcagcaggctgtgcagtcacaaggatttatcaattattgccaaaaaaaaattgatgcttctcagactgaatttgagaaaaatgtgtggtcctttttgaaggtaaactttgaggatgattctcgtggaaaataccttgaacttctaggatacagaaaagaagatctaggaaagaagattgctttggccttgaacaaagtggatggagccaatgtggctcttaaagactctgaccaagtagcacagagtgatggggaggagagccctgctgctgaagagcagctcttgggagagcacattaaagaggaaaaagaagaatctgaatttctaccctcatctggaggaacatttaatatctctgtcagtggggacattgatggtttaattactcaggctttgctgacgggcaattttgagagtgctgttgacctttgtttacatgataaccgcatggccgatgccattatattggccatagcaggtggacaagaactcttggctcgaacccagaaaaaatacttcgcaaaatcccaaagcaaaattaccaggctcatcactgcagtggtgatgaagaactggaaagagattgttgagtcttgtgatcttaaaaattggagagaggctttagctgcagtattgacttatgcaaagccggatgaattttcagccctttgtgatcttttgggaaccaggcttgaaaatgaaggagatagcctcctgcagactcaagcatgtctctgctatatttgtgcagggaatgtagagaaattagttgcatgttggactaaagctcaagatggaagccaccctttgtcacttcaggatctgattgagaaagttgtcatcctgcgaaaagctgtgcaactcactcaagccatggacactagtactgtaggagttctcttggctgcgaagatgagtcagtatgccaatttgttggcagctcagggcagtattgctgcagccttggcttttcttcctgacaacaccaaccagccaaatatcatgcagcttcgtgacagactttgtagagcacaaggagagcctgtagcaggacatgaatcacctaaaattccgtacgagaaacagcagctccccaagggcaggcctggaccagttgctggccaccaccagatgccaagagttcaaactcaacaatattatccccatggagaaaatcctccacctccgggtttcataatgcatggaaatgttaatccaaatgctgctggtcagcttcccacatctccaggtcatatgcacacccaggtaccaccttatccacagccacagccttatcaaccagcccagccgtatcccttcggaacaggggggtcagcaatgtatcgacctcagcagcctgttgctcctcctacttcaaacgcttaccctaacaccccttacatatcttctgcttcttcctatactgggcagtctcagctgtacgcagcacagcaccaggcctcttcacctacctccagccctgctacttctttccctcctcccccttcctctggagcatccttccagcatggcggaccaggagctccaccatcatcttcagcttatgcactgcctcctggaacaacaggtacactgcctgctgccagtgagctgcctgcgtcccaaagaacaggtcctcagaatggttggaatgaccctccagctttgaacagagtacccaaaaagaagaagatgcctgaaaacttcatgcctcctgttcccatcacatcaccaatcatgaacccgttgggtgacccccagtcacaaatgctgcagcaacagccttcagctccagtaccactgtcaagccagtcttcattcccacagccacatcttccaggtggccagcccttccatggcgtacagcaacctcttggtcaaacaggcatgccaccatctttttcaaagcccaatattgaaggtgccccaggggctcctattggaaataccttccagcatgtgcagtctttgccaacaaaaaaaattaccaagaaacctattccagatgagcacctcattctaaagaccacatttgaggatcttattcagcgctgcctttcttcagcaacagaccctcaaaccaagaggaagctagatgatgccagcaaacgtttggagtttctgtatgataaacttagggaacagacactttcaccaacaatcaccagtggtttacacaacattgcaaggagcattgaaactcgaaactactcagaaggattgaccatgcatacccacatagttagcaccagcaacttcagtgagacctctgctttcatgccagttctcaaagttgttctcacccaggccaataagctgggtgtctaaaaggacagcttctcttccactcaatattgccatttttccaaagaaacatgttaaaaaaaaaaattataagacatggactagtcctcattagcatgtttgcatagcaaccagtcaagagcatttacactatttctgctgatatactcaccttagaactgctcagaaccctggtgctttatttttgttttaatcttttgttgccagtgatgattttcctattctgcaaatagtgtatttcctggattacacatagtatggtttcctgaagtattctgataaatgtgttttttaaaacctcaatatactttttagaaaaggagcatctggttatgcataaagcagagctaaaactaaatttctttcatgtcctccctacttcctcagtgtcaatcagattaaagtgtgtaatcctaaaaa

SEQ ID NO: 793 - DNA, 4490 bp, human
gcggtgtcctgcgcgtcttcgggtcagtacggggggccgcgtcgtagggactcactggcggtgcgcgacctgggctggctccgggggtggcgggcgcagctgctgtgacagcttattgcaggagtgaccaggacactacctcctagaagtaatgcccacagaaagcgcaagttgttcgactgctcgccaaacaaaacagaagcgcaaatcccatagcctttctatacgaagaactaacagctcggagcaggagaggacgggactgccaagagacatgttagaaggacaagattctaaactgccttcctcggttcgcagtacacttctggaactgtttggtcaaatagaaagagaatttgaaaacctttatatcgaaaacttagaattacgtagagaaatcgacactcttaatgaacgtttagctgctgaaggacaagcgattgatggagcagagctgagtaagggccaactcaaaacaaaagccagtcacagcaccagccagctctcccagaaactgaagaccacttacaaggcttccaccagcaagattgtctccagctttaagaccacgacatcgagagctgcctgccagctcgtgaaggagtacatcggccaccgggacggcatctgggatgtcagcgtggccaagacacagccagtggtgctcgggactgcatcagccgatcacacggctttgctgtggagcatagagacagggaagtgcctagtcaagtacgcaggccacgtgggctcagtaaattctatcaaatttcatccctcagagcagttggctctcactgcttctggagatcagactgctcatatctggagatacgcggtgcagctgccgacaccccagcctgttgctgacactagtatatctggggaagatgaagtagagtgctctgacaaggacgagcccgacctcgatggggatgtgtccagcgactgccccaccatccgcgtcccactgacatccctcaagagccaccagggcgtggtcatcgcctccgactggctggttggggggaagcaggctgtgactgcctcctgggaccggacggcaaacctgtacgacgtggagacgtccgagctcgttcactctctgacagggcacgaccaggagttgacgcactgctgcacacaccccacccagcggctcgtggtgacctcctcccgtgacacgactttccgcctctgggatttcagggacccctccatccactcggtgaatgtttttcagggacacacggacactgtgacttctgccgtgttcaccgtgggagacaacgtggtttcaggcagcgatgaccgcacggtgaaagtctgggacttgaaaaatatgagatcccccattgcaactattcgcacggactctgccattaacaggatcaatgtatgtgtcggccaaaaaatcatagccctcccccatgacaaccgacaagtgagactgtttgatatgtcaggagtgcgcctggcgcggcttccccggagcagccgacagggccacaggagaatggtatgctgctcggcatggagtgaagaccaccccgtgtgcaatctgttcacctgtgggtttgaccggcaagccattggttggaacatcaacatccctgcattgctacaagaaaaataaggacaccggcagcccttagtttcactgtttgccagcacagacctttgatgggtgcaggcttttctgcgtattaatcagccatttttgtgagagtttgaccctggaaagggtgctttgtatatgttcttttcacatagtgcccagcttgcatgaaatgtacagagaaatgtgtggtcgtattttttacttttgtcttgtatatgtatgtatattgggtcctctgggcagtagaggcaaagctcacctcccatgtagcacatgaaatgcttgtgagttgttgacattggacaggtgaacagtagggcattacatttgtgtgaattaaatgtgaacttctgtattacgttgcggcgtcggcagtcctgcgttccctggagtaactgtacgtatctgcctttgctgggaagactgtggggctgcctgtgttggctggcgaccagcaggattgctccaggattttgtgtttacctcgcgtgaagttcagcacgtgctgtcgtgtagtcagcttctactctaatttctgttacagttctgcaaaggtaacctggagtttagaagttaaaaaaaagcatgggatgttggatttgcaccatttggagtttctttaggaaagaaaagttttctgcttttttatagaaaatcatttcagtctcctgaggtctcatgctagcaaattttgaaataggattctaatcactgatttcaaatattaagcaaaatgtaaagcactttaatttatagctatggttataaacaggttttagatgtttcaaatgacttgtccactgaatgtcacttgaccttgataagaggccgcctgcacacagagcccagttaattctccgcacctcggttgtgtgcttccgaatgggctcactcccgtggtggtgtttgagagccaacaacactacctcagagacgggtctttgggaaactttgggtctcactgttgcctggctggagcactttggtttatagctggaatactgagttcagttcagaaggcaggaaagacagtcacaccgacgtgtcctgaaggtgtaggctctccacttaggcgcacaagctgacggctgcagccagcaggccccggtgacgagacacttccaggtcttgtggtggggacgcctctcagtgccagtcccgccactgctgagtgagcctggtgttcttgccttcttggaaattactgctcacctggtatctgtacgttaatgtttcttgctgagttacagttttgataaagaggctctcatttcctgtgtcttgtatattcagtcctttcaatacgtccacctggaggctcaccacttggagagacacaggaaggtaatatttacagctgtcatgtgacatccccaggtctttgtgttttgccctgttttacggtgaggtaggagggaacccatctggggaccggtaggtgcaggtgcagtaggacgtgggacttttggacccgtcctttggtgcagctcgccagggatgagaggcacctccctacttgggtcttcaggagctggtccaaggagcttcgaatctaagtcatctagaatgaccctgaaatgactgacagccccgggcccaagaaaaacccataaccacctcagatggatctgacgtggctaagggacaaacagcaaatatttcagtcattttgattttacaaataaaaaatgtgttgtgtttttgtccgacattatttcctgactgcactgttctgagaatggagtccacctggtccctctggttgattagaatctcaggtttcagctcctgctgtcctgagcgaacttgcctgatgcagggctgtgctgtgtccagatgttgctggggcctcactttttctcttggctggaggtccaattgccagagcctcccacactgcacatacaaaggtctgagcccagggcagcttctggggccactgcacaggccacctgcttgggttcctcggagtttaatttgaaagtctgggtgtcttaggatgatggttaggaacattgaaaaatggctgcaaatagccaaatcaaacttaagaaccagatctctgccagattaaacatttttgaagcttttaaaagtcaatattcctagtggccactgagttccaggcacactggtgccctttactgccacagctgctcaccttgtctggcaaactggagggacctcagaaactggactcctgcatgtccttgggggcgcagccctgtggtgctcaggcagagctctcaggagccggggcaccttgctgttcgctgctgtgtcgtcttctaatgtgagctcatccactgctgctgcagcgtggtgatcaggagtcacagacaagatcggggatggtgtgtgtgtgtgtgtgtgtgtgtgtgtgtgtgcacgtgtgtgtggctaaattaagtcatactgtcaaccacacgtgatctcgtctgaaacagtgtttggaagtgggaacagttttgtcctgtatgctgatgtgtccagaatttcatttaatgatagacggaaaatgtgtggttactgaaaactgtatatgatacagaatttcataagagccatgctgttgggcaaagcaactctttttcaaccactgctcatcagtttctgtagagacaaaaactctgtacatattttggaatctgaagaatcctatgtaaatcatttgttacttaagtctgtgaaaaacatatttctttggaggaaaatgtatgcatttataagtgttccatggaatcagtttttattgtatcgatataattgtctctaagtgttgactgtcttcattgcaatatgaaattcattaaaatgtccatgttccataattactattataaaaaaaaaaaaaaaaaaaaaaaaaaaa

SEQ ID NO: 794 - DNA, 4566 bp, human
gcgtgcgggtgcccgccgagcccgccgggcgctggatctccgagtgccccggccggggcctgaggagcgggcacagggcaaggcggcggacggctgcgtcgcccgaggcgaggaggagcgctggcgagacggtaaagaacaggtccaagaaaagctcaaagaaagcaaataccagcagcagcagtagcaacagcagcaagttgccaccagtttgttatgaaataattaccttgaagactaaaaagaagaagatggctgctgatatattcccccgtaaaaagccagccaactccagcagcaccagcgtccagcagtaccaccagcagaatctcagtaacaacaaccttatcccggccccaaactggcagggtctttatcccaccattagagagagaaatgcgatgatgttcaataatgatttgatggcagatgtacattttgtggttgggccaccaggtgggactcaacggttgccaggacacaaatatgttttagctgttgggagctctgtgttccatgcgatgttttacggagaacttgcagaggacaaagatgaaatccgtataccagatgtcgaacctgctgcttttctcgctatgctgaaatatatctattgtgatgaaattgacttggctgctgacacagtgctggccacactttatgctgccaaaaagtacattgtccctcaccttgccagagcctgtgttaatttcctggagaccagcctgagtgccaagaatgcctgtgtgctcctctcccagagctgcctgttcgaggagccagacctgacccagcgttgctgggaggtgattgatgcccaggctgagttagctctcaagtctgagggattctgcgatattgacttccagacactagaaagtattctccgtagggaaactctgaatgccaaagaaattgtggtttttgaggcagctctcaactgggctgaagtagaatgccaacgacaagatctggcgttgagcattgaaaataaacgcaaggttctaggaaaggcactttacttgatccgcatacccacaatggccctcgatgattttgcaaatggtgctgcacagtccggggtattaactctcaatgagaccaacgacatcttcctctggtatactgcagccaaaaagcctgagcttcagtttgtgagtaaagcccgtaagggccttgtcccccagcgctgtcaccgtttccagtcgtgtgcctatcgaagcaaccaatggcgctatcgtggtcgctgtgacagcatccagtttgcagttgataaaagagtgttcattgctggctttgggctgtatggctccagctgtggttctgcagaatacagtgccaagattgaacttaagcggcagggcgttgtcctggggcagaacttgagcaagtacttctcagatgggtccagcaatacctttcccgtatggtttgaatacccagtgcagatcgagccagacaccttctacacagccagtgtgatactggatggcaatgaactcagctactttggacaagaaggcatgacagaagttcagtgtggcaaagtgactgtccagtttcagtgctcctcagatagcaccaatggcactggggtacagggagggcagatccctgaacttatattctatgcttgaaaactcacttcctgaagcagcttgagctccaaagtgcacatctggttccaacttgcctgatgcttagctcatctgcaaatatgtgatcagtgccggtaatttgtaatgaatgaagcggtaggcaggttctaatttcttttaaccttttaattatgtacaggcaaaaatgcagcattccgcttttaactatctgcttaaaagagctaacgttcttattaaggctttgtggtttttagagttgcatctatgaacctggggagattatgtgctttcccaagcgttccaccaccctctcagttttgtccctctgaagataattttggatcaccttgaatttccttttggacgttatttgatgaacagaaataaattgataacaagagttatttttaaacagaactcctcttaccccccaaaacagataaacctcagtgtacaattttgaaagaagttttgccttgtaatgagtaataatttagaaagtagacagtggttgtgtttggctctcgttttattccttttacatttgttgcttctgggatttaaaaaattactaaattcataagatagttaggtattaaacacttcagaatatcaatgtaaaattggaaaataaggaactgggggcatttgtttaggccatgacttctacaagcagatttcttttcttttagtttagaagacaaaaaatttcaatacagatacttcttttagaagtaaatttttagattttattgtcagtagaaaaaagttaaactcctactaatttaaactaagacagtttaaaaaggaagcctgaaaaagactcatactacaaataatttaattgatggcatataagaatatgcagtttgaaaaagccaaactcttctctccacttagcttttgatccccactgtttgcttatttgtataagtcatactgtgtagaatttctattttctttttccccattaaaagaggaccaaacaattctttatacaaatggagtagcaactagttttgtagcactacatttaatgtaatgagatacctttgttcatttttttaaatttgaaatatactttacctgatccactttgattgtatactatattctttgttaattttaattttgtcctgttcctagactgctagaatctggcccctggccatcttaaagtgccaacatatgcctgcagggtttataaaaaatggcctggagtgacacattttattatacctaatattcactgcatcagtatcacatctagctcccttacttgtccacagataatgtaaacaaaggagggaaaaacttattaaattctccttcgctgctggcttgtgctggtttagtgcctgtgtccctggcagtgtccagtgtgttcacttccagttgaagtatccatgtgtttctgggcagcttttctgctcagtgtgatcctgagatggcttccccgccgccacccagagtgtggtccttggccgcctcctgctcctgctctgcaagcctgaaactggcttgtctggagccaggagttagtcctggggtgtgtgtgtgcctgcgcacccatgcgcatgcaagtgtgtttgccagctcaggagctgtctcctctctacctggctagtaagaggtgggacagtaatggtcctcctgctggccccagcaaggcccatgagtgactgccctgacgtattcactgtgcctctgggccacttcttcccctgtagatgtgggcttgttgccttcagccggcttccctgagggaggagaacactggattattggaaatgttttaatcactcttgccattacctacatctattagcatagatgatgaaaagctgttactggtgattatagatgagtatttccaggacaacattctaaaagtacaattatttcttattggggagattacaggtagtttggcaaagcattgaagtacaaaggtacattttcaattaaaaagcacacttctacaaaagatttggtttttaaattatggttacacatttcagtaactcatagctgctgtgcaaattggtagaccttataagaaggcacttgtttgtaagccagagaagaaactttaattgcatcctatcagattgttgaggtgggtgtgatagtcttcaggtgcagtgcgttcattcactaacgctcactgtcagtgcccatgtttgctagctgcctccatgtgactagtgagctgctggtgaaagtcgtgtgaaatcctgtacactgtgtatagaacaatgtaattttatgttaattgttattactttaaaacatatctaccatctgattggctggtaccgagagctgtgggtaaaatttgaaaattgtatttagaataagaaattttacattttaaaccctattgtcctttatgcattttcaatgaaatggaatgaaggctaatatgcttgctttatttacttttgtaatcttggattttgtagcttttaaaactagaaaccattgttctaacaaagcaggcaactttattctataaacacaactttattaagcagaatacactgtagatgcttttccccaacgtatctggctggcagtctttgtcgttgttcattctggggataaaggggaactaggctagcagttctaatgtgacattctttaagcatatcttaaaatagtatttaagtaaatggtctaatttctacataattattgcactgaacttttttgtttattaaggtgtttaaataagctcagctaattcaagacactgtagtcacttgtgcatcagtgtgcttgaatttagtagcttacagcattatttatgaaggaaaaaatacataaatatgaagtacctcatgttgaatgttattgtactgtatttttaatgtaacagtgcagatcttgttagacacatgaatgtgtataatcatgttaaatgcaaataaaactagttcataga

SEQ ID NO: 795 - DNA, 4814 bp, human
tgttggctggtgtgtgggtgtcaaactgagccagacgcggcggtggcggcggctccgcgggctacggtcgctcccgcctctcgagcgctgccggtggccgcagcggcgcacccacgccggcccggaggagcagagtgttcatttctgtgtcgggcacagtgctaagtgctgggtgctcactggtgatgaggcagatgaaggttaccaaacttgtggacaggagcctcatatcagagacgtggacctcactgtagcctggtcatggcttccagcttttcgaatctgaggctccaaaggaggaaatgaccattcagggatcttactccagcttgattacggagactgaaccttcatagggtgcgcacttaccaaggacaggaaggtttctctgtttgaagggctttaaacttataacaaagaaaataaaaatgacgacttcgtctatcagacggcagatgaaaaacatcgtgaacaattactcagaggcagaaatcaaagtccgggaagccacctccaatgacccgtggggcccgtccagttctctgatgaccgagattgccgacctgacctacaacgtggtggccttctcggagatcatgagcatggtgtggaagcggctgaatgaccatggcaagaactggcggcatgtgtacaaggcgctgaccctgctggactacctcatcaagacaggctccgaacgtgtggcccagcagtgccgggagaacatcttcgccatccagaccctgaaggacttccagtacattgaccgagatggcaaggaccagggcatcaatgtgcgtgagaagtcaaagcaactggtggctctcctcaaggacgaggaacggttgaaggctgagagggcccaggctctcaaaaccaaagagcgcatggcccaggttgccactggcatgggcagcaaccagatcacctttgggcgaggctccagccagcccaacctctccaccagccactcggagcaggagtatggcaaggccgggggctccccggcctcctaccatggctcgcctgaggcctcgctgtgcccccagcaccgcacaggggccccgctgggtcagagtgaggagctgcagccactgagccagcgccaccccttcctgccgcacctggggctggcctcccgcccaaatggcgactggtcccagccctgcctcacttgtgaccgcgcagcccgagccacctccccgcgagtgtcctccgagctggagcaagcccggccccagactagtggagaagaggagcttcagctgcagctggcacttgccatgagcagagaagtggctgagcaggaagaacgcctcaggcggggtgatgacctcagattacagatggccctggaagaaagccgaagggacacagttaaaattccaaaaaagaaagagcatggctctctcccacagcagactacgctgttggatttaatggatgctctccccagctcgggccccgcggcccagaaagcagagccctggggcccgtcagcctccactaaccagaccaacccctggggcgggccagcggctcctgcgagtacttcagacccctggccatcgtttggtaccaagccagctgcctccattgacccatggggggtgcccactggagccaccgcacaatctgtccccaagaactcggacccctgggcagcttcacagcagcctgcctccagtgctgggaaaagagcttctgacgcgtggggcgcagtctccaccaccaagcccgtgtctgtctctgggtcctttgagctcttcagtaatctgaatggtacaattaaagatgacttttctgaatttgacaaccttcggacttcaaaaaaaacagccgaatctgtgacctctctgccatcccaaaacaatggaactaccagccctgacccctttgagtctcaacccctgactgtcgcctcaagcaagcccagcagtgcccggaaaacacctgagtccttcctgggccccaacgcggccctggtgaacctggactcactggtgaccaggcctgccccaccagcccagtccctcaaccctttcctggcaccaggtgctcccgccacctcggcccctgttaaccctttccaggtgaaccagccccagccgctgacactgaaccagcttcgggggagcccagtcctggggaccagcacatcctttgggcctggcccaggagtggagtccatggctgtggcctcgatgacctccgcggccccacagccagctctgggggccactggttcctctctgacaccactgggccctgcaatgatgaacatggtgggcagtgtgggtatacccccatcagcagcccaggccactggcacaaccaaccctttccttctctagtgcctgggcctgggacccacccagagcacctgtgctggaggatgccgagcagggactctcgtctgtgggacgggatccaagagtttggggattaggggtattagggcttttcagctccagcttcctgatgaaagggctgtctttacagccccaaccctcagaccctcgccttccaaggcaggcccctcagcctggcctgctctcaccacctcctccaaagcactgaggtcctggcagggctcctctgaggccttggacgaggacgtggagtcatcagtgttgcccttgcccctaacctcagcccgagggtctccaggatgttgcctggcccaggacttgggacagtggccttgtctttgtcctccccaccccccagccctagggacaccccaggcagtcctgggtgtggacacgatgaagcaccggctccataagacaccttttggggaagtggttgtgcatattttatttttctttgactcgtgtgagttcaaagtaaacaccaccaccgtggacaactcttgaattaaatccactagagcgagctttaaaactaatctgagcataacccccaacgtggctctatgcttgtgtacctttgcacatattttgtttagtacagtttcatatttgagtttgcagaattatctaatagtctttttttggctaatatttttataacgtggttcttatttaactgtctagttttgatagaatttaccaggtctggctgaatgaagatgttggcacgtgtcattttagtggtttaaatcctcttatttatggttttaactctaagaaaattttaaaaggaagagatgtttggatgacaaaaaaatgccttattgaaaaactaaagcaaattctttataggaagaaaatatgggaatttgattacacatagatgatgatgtttatttaaaaaaaaaacaacagcaacaaaaaatcctagcctccagttgccttttcctttctttagctcctgtttttggtgaattactaaactgattgactttcagcctttttggctagatcctgagaggctatttttcttacgaatataccaacatcctgaaagttaaagaaaaaaatctaatgtatgaatgtgactcaccaatttttatcaactaattccttttttttattaaaggcatgcagggattaacaggacttctgtttacaatggaaatctgaaatggaagaaacatctttaaccttgtgtgtctgtgatctcctctgtcttaatccacgctcaggctaaagatggggataatgtggaaatggcagttgtcccgagggcgtggggtggggggtgcttctgtgcccacgggtccctgggcaacagtccctaggctaagacaggggtggggggctaagggaccagggctggccctgatccacctacctgctaactccagatattatttttaagttggagacctaaaaataattctcttgtattttggagatgaagaaaaaagtcattcacctgggagggatttttaacaaacatgcactaatattacctccctcttccaaactcctactgtcctcacctcacccaccactgtaaaagtattacgtcgtgcattaaagaccagaaaagacttgcttttacccagggaggggacattcccccaatcctgtgtctgggcagcttgcctggtggatgtttctggccctttttccaccatgggaatttctcacctctagctctaagggcagctgaccacctgccagcccctctctggttccagaagattacccttcgcaccggcacaggagagatcttaaatggtctctgggctgctgggacatgcaggctctgagtggggactgcacccactcatgctgttcctgaggctgccctctccagtcccaggagccgtgtctagagttcctgaccagccaccttctgccagaactgcaggcctgcggctgggtcttaggctcccgctgccatttgggtaagccggtggctggtctcgtctgccgggggaagggtggggaggtgcaatgggatgggaggcaggatgcttgcccagaaaggtgctttccttcagacggtgcagggcctgggccagccttacaggtcagtagactagactcgactacttggggtcagtgattcttttgtaacgagtctttcatgatgtgactttgaggccccaacatgacagccactgggccaccgggacccaagaagacagccccctgccccatcttctggcacaggccatcccgagtgcatgtccctgttgcccactgcactgatcatgaagccaccggccactgccacgcatgttgcacctgtgccatcgtgctccctcctgatgggcaccgtggtggaggaagtcacccagctgtttctcagtcccagaggccggtggctggttttgaacttgtgttgactgttgatacttatttactgtataaatataatttatcatttgtaccatg

SEQ ID NO: 796 - DNA, 4259 bp, human
actggacaaccgcagtctgcaagaggctgagctgaggagtcgctgggccgggaggggcggacgtgagaaggacggattgacgaactgatggattgacgcgcgggcggtaggagggaggaccgacgccaaacccagaccgccgccgtcgtgctcctgccgcagcccggagccggcagcttcggggccctggccgccggcctcccagccgcgttctcctccgccgctcctccgggcttgccctggagccctcaggctatcaatatgacggctgaagaaacagtgaatgtaaaagaggttgaaatcattaagctaattttggacttcctgaattcaaagaagcttcacattagtatgctggccctggagaaggaaagtggagtcataaatggcctgttttcagatgatatgcttttcctgaggcagctaatacttgatggtcaatgggatgaagttcttcagttcattcagcctctagaatgtatggaaaaatttgacaaaaaaaggtttcgttatattatcctgaagcagaagtttttagaagctttatgtgttaacaacgcgatgtcagcagaagatgagccccagcatctggaatttaccatgcaagaagctgtgcaatgtttacatgctctagaagaatactgtccttctaaagatgactatagtaagctctgtttgcttttgactttgcctcgtctgaccaatcatgccgagtttaaggactggaatcccagcaccgcacgagttcactgttttgaagaggcttgtgtcatggttgcagaattcatccctgctgataggaagctaagtgaagctggttttaaggctagtaacaatcgtttatttcagcttgtaatgaaaggcctgctttatgaatgctgtgtagaattttgtcagagtaaagcaactggagaagaaattacagaaagcgaagtgcttcttggcatcgacctcttatgtggtaatggttgtgatgatttggatctgagtttactgtcatggcttcagaatcttccatcttctgtcttctcttgtgcttttgaacagaaaatgcttaatattcatgttgacaaacttctgaaacctacaaaagctgcatatgctgatcttttgactcctcttatcagcaaactctctccctatccatcatccccaatgagaaggcctcaatcagctgatgcctatatgacccgctctctgaatcctgctttagatggcctcacctgtggactaaccagtcatgataagagaatttcagaccttggaaacaaaacttctccaatgtcacactcctttgctaacttccattatccaggggtacaaaacctcagtagaagtctcatgcttgagaatacagaatgtcacagtatttacgaagaatcccctgagcgaagtgatacacctgttgatgcacagaggcctatcggcagtgaaatcttgggccagagttcagtttcagaaaaagagcctgcaaatggagcacagaatccaggaccagctaaacaagaaaaaaatgagcttcgagattcaacagaacaatttcaagaatattataggcaaagattacgctatcaacagcatttagaacagaaggagcaacagcggcagatataccaacagatgttgcttgaaggaggcgtgaatcaggaggatggtcctgatcagcagcagaatcttactgaacagttccttaataggtccattcaaaagcttggtgaattaaatattggaatggatggccttggtaatgaggtatcagcactcaaccagcaatgtaatgggagcaaaggcaatggatctaatggttcttctgtgactagttttactacaccaccccaagactctagtcagagattaacacatgatgcttcaaatattcatacaagcactcctcgtaatcctggatcaacaaatcacataccttttctggaggaatcaccttgtggaagccaaatctcttcagaacattcggtcattaagccacctcttggagattctccagggagtctttcaaggtcgaaaggggaagaggatgacaaatcaaaaaagcagtttgtttgtattaatatcctagaagacacacaagctgttagagcagtggcttttcatccagctggaggtttatatgctgttggttcaaattcaaaaactctgagagtatgtgcctatccagatgtaattgatccaagtgcacatgagactcctaagcagccggtggtacgttttaaaaggaataaacatcataaaggatccatttactgtgtggcctggagtccttgtgggcagttattagcaacaggatcaaatgacaaatacgtcaaagtgctgcccttcaatgcagagacttgtaacgcaacaggaccagatctggaatttagtatgcatgatggaacaattagagacttggcatttatggaaggcccagaaagcggaggagctattttaataagtgctggagcaggggattgtaacatttatacaaccgattgtcaaagaggacagggcctccatgctttgagtggacatactgggcatattttagcactttatacctggagtggctggatgattgcatctggttcccaagataagactgttggattttgggatcttcgagtaccaagttgtgctcgtgttgttggcacaacatttcatggaactggcagtgcagtggcatctgtagctgtagatcccagtggtcgtctcttagccacaggtcaagaagattctagctgcatgttgtatgacataagaggaggaagaatggtacaaagttatcatcctcattccagtgatgttcgctctgttcgattctcccctggagctcactacttgctaacaggctcttatgatatgaaaataaaggtgacagacctacaaggggacctcaccaagcagcttcctatcatggtggtgggggagcacaaggacaaagtgattcagtgcagatggcacacccaggatctttccttcctgtcatcctctgcagatagaactgtcaccctctggacttacaatgggtagagcacaccgcatgtcagtctatgcagcaaaagcacagagacttaagactactgagttgtgaaaattacaaatctgaagaacatagtgtccaggaaagtggtttagcacgaagaggccccttattaccatgtatcccactgataggaggtgttgggtggtgttattccgcagtgctttcagtcttccatgtgagctcgtgctgctgtgacctgctatatgtagtctcgttgccaaagtctgcagaagagctcttcagttgttggtgtgcactccaagtcaggatggacaatgtgtttacggtttagtattcaatgcattccttggtctttgcctaaataacagttttatatgcacattgaaatggaattatacttcaactatattattaaatgtaatgcaaccaagttcctcccagattaaacttcccaggtgttcagaattacttttgctcttctcacgatcccatattgtattatcacttgtcttctagaggtcagaattccataatatatgtcactcaaaagttacatggttgctttcacttaaggatcattatggagtttaaagatgaatgaaaaactgcttcttagtttactacatggtataggcccttttttcttaaacccagggatatgattattttgtcatataattttgtttcaggctaaaaggtaaatgtgtttgcttcagaaacttgttaacttcagttttttgaatgcaacaggatacctcccttccaaactgaactgtagaagcagagcagcagcagttatgtgacgcaacacttgatggtacagtaaatttactggcatttttctccttaaaaattaaaatccttgacatagaccatagcatggcttgaaatgctatgtctgcatgataatttaaaatggaagatttaaactttgcactccaaaagcttatttggatttttttcttgcactgttttgtgtaatgcagaataatgattttatttctacagctttgtagattctaacatttatgtatctttattttcatattgtacagtaattttactttaaattatttaaataggctattttatttatttcaaatgcagttgtattagttctcattattgaactgtctgtgcactgtatgtagcaagcatttttcatctgttgtatacaagtggaaagggtattagaagtgtaactgtgctattatttcaataaagacctcttgacatttaaaaaagaaaaaaaaaaaaaaaa

SEQ ID NO: 797 - DNA, 2540 bp, human
acgagacgaagacggaaccggagccggttgcgggcagtggacgcggttctgccgagagccgaagatggcagtgaacgtatactcaacgtcagtgaccagtgataacctaagtcgacatgacatgctggcctggatcaatgagtctctgcagttgaatctgacaaagatcgaacagttgtgctcaggggctgcgtattgtcagtttatggacatgctgttccctggctccattgccttgaagaaagtgaaattccaagctaagctagaacacgagtacatccagaacttcaaaatactacaagcaggttttaagagaatgggtgttgacaaaataattcctgtggacaaattagtaaaaggaaagtttcaggacaattttgaattcgttcagtggttcaagaagtttttcgatgcaaactatgatggaaaagactatgaccctgtggctgccagacaaggtcaagaaactgcagtggctccttcccttgttgctccagctctgaataaaccgaagaaacctctcacttctagcagtgcagctccccagaggcccatctcaacacagagaaccgctgcggctcctaaggctggccctggtgtggtgcgaaagaaccctggtgtgggcaacggagacgacgaggcagctgagttgatgcagcaggtcaacgtattgaaacttactgttgaagacttggagaaagagagggatttctacttcggaaagctacggaacattgaattgatttgccaggagaacgagggggaaaacgaccctgtattgcagaggattgtagacattctgtatgccacagatgaaggctttgtgatacctgatgaagggggcccacaggaggagcaagaagagtattaacagcctggaccagcagagcaacatcggaattcttcactccaaatcatgtgcttaactgtaaaatactcccttttgttatccttagaggactcactggtttcttttcataagcaaaaagtacctcttcttaaagtgcactttgcagacgtttcactccttttccaataagtttgagttaggagcttttaccttgtagcagagcagtattaacatctagttggttcacctggaaaacagagaggctgaccgtggggctcaccatgcggatgcgggtcacactgaatgctggagagatgtatgtaatatgctgaggtggcgacctcagtggagaaatgtaaagactgaattgaattttaagctaatgtgaaatcagagaatgttgtaataagtaaatgccttaagagtatttaaaatatgcttccacatttcaaaatataaaatgtaacatgacaagagattttgcgtttgacattgtgtctgggaaggaagggccagaccttggaacctttggaacctgctgtcaacaggtcttacagggctgcttgaaccctcataggcctaggctttggtctaaaaggaacatttaaaaagttgccctgtaaagttatttggtgtcattgaccaattgcatcccagctaaaaagcaagaggcatcgttgcctggataatagaggatgtgtttcagccctgagatgttacagttgaagagcttggtttcattgagcatttctctatttttccagttatcccgaaatttctatgtattattttttggggaagtgaggtgtgcccagttttttaatctaacaactacttttggggacttgcccacatctctgggatttgaatggggattgtatcccattttactgtcttttaggtttacatttaccacgtttctcttctctgctccccttgcccactgggactcctctttggctccttgaagtttgctgcttagagttggaagtgcagcaggcaggtgatcatgctgcaagttctttctggacctctggcaaagggagtggtcagtgaaggccatcgttaccttgggatctgccaggctggggtgttttcggtatctgctgttcacagctctccactgtaatccgaatactttgccagtgcactaatctctttggagataaaattcattagtgtgttactaaatgttaattttcttttgcggaaaatacagtaccgtgtctgaattaattattaatatttaaaatacttcattccttaactctccctcatttgctttgcccacagcctattcagttcctttgtttggcaggattctgcaaaatgtgtctcacccactactgagattgttcagcccctgatgtatttgtattgatttgtttctggtggtagcttgtcctgaaatgtgtgtagaaagcaagtattttatgataaaaatgttgtgtagtgcatgctctgtgtggaattcagaggaaaacccagattcagtgattaacaatgccaaaaaatgcaagtaactagccattgttcaaatgacagtggtgctatttctcttttgtggccttttagacttttgttgccctaaaattccattttattgggaacccattttccacctggtctttcttgacagggtttttttctactttaaacagtttctaaataaaattctgtatttcaaaaa

SEQ ID NO: 798 - DNA, 1963 bp, human
gtgttgtacgaaagcgcgtctgcggccgcaatgtctgctgagagttgtagttctgtgccctatcacggccactcccatttctggtgccgtcacgggacagagcagtcggtgacaggacagagcagtcggtgacgggacacagtggttggtgacgggacagagcggtcggtgacagcctcaagggcttcagcaccgcgcccatggcagagccagacccctctcaccctctggagacccaggcagggaaggtgcaggaggctcaggactcagattcagactctgagggaggagccgctggtggagaagcagacatggacttcctgcggaacttattctcccagacgctcagcctgggcagccagaaggagcgtctgctggacgagctgaccttggaaggggtggcccggtacatgcagagcgaacgctgtcgcagagtcatctgtttggtgggagctggaatctccacatccgcaggcatccccgactttcgctctccatccaccggcctctatgacaacctagagaagtaccatcttccctacccagaggccatctttgagatcagctatttcaagaaacatccggaacccttcttcgccctcgccaaggaactctatcctgggcagttcaagccaaccatctgtcactacttcatgcgcctgctgaaggacaaggggctactcctgcgctgctacacgcagaacatagataccctggagcgaatagccgggctggaacaggaggacttggtggaggcgcacggcaccttctacacatcacactgcgtcagcgccagctgccggcacgaatacccgctaagctggatgaaagagaagatcttctctgaggtgacgcccaagtgtgaagactgtcagagcctggtgaagcctgatatcgtcttttttggtgagagcctcccagcgcgtttcttctcctgtatgcagtcagacttcctgaaggtggacctcctcctggtcatgggtacctccttgcaggtgcagccctttgcctccctcatcagcaaggcacccctctccacccctcgcctgctcatcaacaaggagaaagctggccagtcggaccctttcctggggatgattatgggcctcggaggaggcatggactttgactccaagaaggcctacagggacgtggcctggctgggtgaatgcgaccagggctgcctggcccttgctgagctccttggatggaagaaggagctggaggaccttgtccggagggagcacgccagcatagatgcccagtcgggggcgggggtccccaaccccagcacttcagcttcccccaagaagtccccgccacctgccaaggacgaggccaggacaacagagagggagaaaccccagtgacagctgcatctcccaggcgggatgccgagctcctcagggacagctgagccccaaccgggcctggccccctcttaaccagcagttcttgtctggggagctcagaacatcccccaatctcttacagctccctccccaaaactggggtcccagcaaccctggcccccaaccccagcaaatctctaacacctcctagaggccaaggcttaaacaggcatctctaccagccccactgtctctaaccactcctgggctaaggagtaacctccctcatctctaactgcccccacggggccagggctaccccagaacttttaactcttccaggacagggagcttcgggcccccactctgtctcctgcccccgggggcctgtggctaagtaaaccatacctaacctaccccagtgtgggtgtgggcctctgaatataacccacacccagcgtagggggagtctgagccgggagggctcccgagtctctgccttcagctcccaaagtgggtggtgggcccccttcacgtgggacccacttcccatgctggatgggcagaagacattgcttattggagacaaattaaaaacaaaaacaactaac

SEQ ID NO: 799 - DNA, 2146 bp, human
cgctcgcgctggaagaagcggaagaagatggcgctcaccagctttttacctgcacctactcagctatctcaggaccagcttgaggctgaagaaaaggcaagatcccagagatcacggcagacctcactggtctcctcccgaagagaacctcccccgtacggataccggaaaggctggatacctcggttattagaggattttggagatggaggtgcttttccagagatccatgtggcccagtatccactggatatgggacgaaagaaaaaaatgtcgaatgcgctggccattcaggtggattctgaaggaaaaattaaatatgatgcaattgctcgacaaggacagtcaaaagacaaggtcatttatagcaaatacactgacctggttccaaaggaggttatgaatgcagatgatccagacctgcaaaggcccgatgaagaagctattaaagagataacagaaaagacaagagtagccttagaaaaatctgtatcacagaaggtcgccgcagccatgccagttcgagcagctgacaaattggctcctgctcagtatatccgatacacaccatctcagcaaggagtggcattcaactctggagctaaacagagggttattcggatggtagaaatgcagaaagatccaatggagcctccaaggttcaagattaataagaaaattccccggggaccaccttctcctcctgcgcctgtcatgcattctcctagccgaaagatgactgtaaaggaacaacaagagtggaagattcctccttgtatttctaactggaaaaatgcaaagggttatacaattccattagacaaacgtctggctgctgatggaagaggactacagacagtacacataaatgaaaatttcgccaaattggcagaagccctctacattgctgatcggaaggctcgtgaagctgtggaaatgcgtgcccaagtagagagaaaaatggctcagaaagaaaaggaaaaacatgaagagaaacttagagaaatggcccagaaagccagggagagaagagctgggatcaaaactcatgtggaaaaagaggatggggaggcacgtgagagggatgaaatccggcatgacaggcgaaaagagagacagcatgaccggaatctttccagggcagctcctgataagaggtcgaaacttcagagaaatgaaaatcgggatatcagtgaagttattgctctcggtgttcctaatcctcggacttccaatgaagttcagtatgaccaaaggctcttcaaccaatccaagggtatggacagtggatttgcaggtggagaagatgaaatttataatgtttatgatcaagcctggagaggtggtaaagatatggcccagagtatttataggcccagtaaaaatctggacaaggacatgtatggtgatgacctagaagccagaataaagaccaacagatttgttcccgacaaggagttttctggttcagaccgtagacagagaggccgagaaggaccagtgcagtttgaggaagatccttttggtttggacaagtttttggaagaagccaaacagcatggtggctctaaaagaccctcagatagcagccgccccaaggaacacgagcatgaaggcaagaagaggaggaaggaataggcacaggtctctccaaagtgaatgaactcttacccataaccctaatgatgcaagtcatatgggggaacactttgtaaatggtcaggataaaaaccaaatctgggtgccagatcccagcactactttttattactggagaaatgggggggatagaaaattctactttgaattatttagttttttttaaagagtgggttgtgtttgtgcttctcccacctttcagcatttatagaacatgctgccccacatacaaagtcaagaccacttacttttatgtgacactagtagtttggggttaatgttttgtgtaagaacagctgcatatgagtaaagttaccccaaccacagtgaggaggaagatgttcacatactggaactgtcctgccaaataaattttgcccctattgtgctctgttttaatttggagtgggcaaagtaacctcttgcttggtgcaactatttgtttcaaataaaaacatttagacaaaaaaaaaaaaaaaaaaaaaaa

SEQ ID NO: 800 - DNA, 4935 bp, human
cttttctctcgaagggcacccgaagattgtcacgagtccttagactccaactactgcggcagcttccaaatttcctaaaaccctaagctgggccagcccggcagcccacgcacttccggcctcggacccgccccaaacacccaagcgccccagcgcctcatctctaggtccggaaataaacgaacatctccgattatggttataccagggtcgagggtttccgaatatattcgattcaaagcttcggcaagacgaagaaaaccgagcctgaaagcagggcgagaaaaggggcgctgcagggcggatggaaagaattgattggtaacgatgtggagacggaaacatccgaggacatccggaggaacccggggagttctgagtggtaatcgaggggtagagtatggcagtgggcggggtcatctcggtacgttcgaagggcgttggcggaaattaccgaagatgcccgaagccgtcgggacggacccgagtacctcacgcaagatggcggagctggaggaggtgactctggacgggaagcctcttcaggcgctgcgggtgaccgacctgaaggccgcactggagcagcgaggcctagccaagagcgggcagaagagtgccctggtcaagcggctcaaaggggctctaatgctagaaaatttacagaaacactcaacaccccatgctgcattccagccaaattcccagattggtgaggaaatgagccagaacagtttcataaaacagtatctggaaaagcagcaggagctacttaggcagcgtctggaacgtgaagctcgagaagctgcagaacttgaagaagcttcagctgagtcggaggacgagatgatccatcctgagggagtggcttccctgctgcctcctgactttcagagcagcctggagagaccagagctggagctcagcagacattcgcccagaaaaagctcctcaatttctgaagagaaaggtgactctgatgatgagaaaccaaggaaaggagaaagacgatcatctagggtcagacaggcaagagcagctaaactgtctgagggcagccaacctgctgaggaggaagaggatcaagaaacaccttccagaaacctaagggtcagagcagatcgaaatttgaaaacagaggaggaagaagaggaggaggaggaggaggaagaagatgatgaagaagaggaaggtgatgatgagggacaaaaatctagggaggcaccaatcctgaaagagtttaaggaagaaggggaagagatacctagagtaaaaccagaggagatgatggatgagagacccaaaacaagatcccaggaacaggaggtgttagagagaggagggagatttacaagatcccaggaagaggctagaaaaagtcatctggccagacagcagcaggagaaggaaatgaaaacaacatctccccttgaggaggaagaaagagaaataaaatcttcacaaggcttaaaggaaaaatcgaagtctccttcccctcctcgactgactgaagatcgaaagaaggcctcacttgtagcgctgccagagcaaactgccagcgaggaggagactcctccacctttactaacaaaggaagcatcttctccaccacctcatccacagctccatagcgaagaagaaatagagcccatggaaggcccagccccccctgtcctcattcagttatctcctcctaatacagatgctgacaccagggagctattagtatctcagcatactgtccagttggtaggaggcctgtctcctttgtcaagtccttcagacaccaaagcagaatctccagcagagaaagtgccagaggagagtgtcctgcctctggttcagaaaagcacactggctgactactcagcccagaaggatcttgaacctgagtcagacagatctgctcagcccctccctctaaaaattgaggaattagcactggccaaaggaatcactgaagaatgtctgaaacagccatctttggaacagaaggaaggcagaagagcttctcatacccttctcccaagccacagattgaaacagtcagctgattcatcctctagccggtcctcctcatcttcctcctccagttctagatcaagatctcgctctcctgacagttcaggttctcggtctcattcaccgctcagatccaagcagagagatgtagcccaggcacgtactcatgccaaccctcgtggtagacccaagatgggctccagatcaacatcagagtccagatcaaggtcacgttcacgttctcgttcagcatcaagcaacagcagaaaatctctgagccctggagtctccagggacagcagcaccagctatactgaaaccaaagatccctcttctggtcaggaggttgcaactccaccagtgccacaactgcaggtctgtgagccaaaggagaggacttccacctcctcatcctctgtccaagcaaggcgtctgagtcagcctgaatcagctgaaaagcatgtgacccagaggttacagcctgagcgggggagcccaaagaagtgtgaagctgaagaggcagagccaccagctgccacacagccccaaacctcagagactcagacctctcatctgccagaatcagaaagaattcatcacactgttgaggagaaggaggaagtgaccatggacacaagtgaaaacagacctgaaaatgatgttccagaacctcccatgcctattgcagaccaagtcagcaatgatgaccgcccggagggcagtgttgaagatgaggagaagaaagagagctcgctgcccaaatcattcaagaggaagatctccgttgtctcagctaccaagggggtgccagctggaaacagtgacacagaggggggccagcctggtcggaaacgacgctggggagccagcacagccaccacacagaagaaaccttccatcagtatcaccactgaatcactaaagagcctcatccccgacatcaaacccctggcggggcaggaggctgttgtggatcttcatgctgatgactctcgcatctctgaggatgagacagagcgtaatggcgatgatgggacccatgacaaggggctgaaaatatgccggacagtcactcaggtagtacctgcagagggccaggagaatgggcagagggaagaagaggaagaagagaaggaacctgaagcagaacctcctgtacctccccaggtgtcagtagaggtggccttgcccccacctgcagagcatgaagtaaagaaagtgactttaggagataccttaactcgacgttccattagccagcagaagtccggagtttccattaccattgatgacccagtccgaactgcccaggtgccctccccaccccggggcaagattagcaacattgtccatatctccaatttggtccgtcctttcactttaggccagctaaaggagttgttggggcgcacaggaaccttggtggaagaggccttctggattgacaagatcaaatctcattgctttgtaacgtactcaacagtagaggaagctgttgccacccgcacagctctgcacggggtcaaatggccccagtccaatcccaaattcctttgtgctgactatgccgagcaagatgagctggattatcaccgaggcctcttggtggaccgtccctctgaaactaagacagaggagcagggaataccacggcccctgcaccccccacccccacccccggtccagccaccacagcacccccgggcagagcagcgggagcaggaacgggcagtgcgggaacagtgggcagaacgggaacgggaaatggagcggcgggagcggactcgatcagagcgtgaatgggatcgggacaaagttcgagaagggccccgttcccgatcaaggtcccgtgaccgccgccgcaaggaacgtgcgaagtctaaagaaaagaagagtgagaagaaagagaaagcccaggaggaaccacctgccaagctgctggatgaccttttccgaaagaccaaggcagctccctgcatctattggctcccactgactgacagccagatcgttcagaaagaggcagagcgggccgaacgggccaaggagcgggagaagcggcgaaaggagcaagaagaagaagagcaaaaggagcgggagaaggaagccgagcgggaacggaaccgacagctggagcgagagaaacgtcgggagcacagtcgggagagggacagggagagagagagagaaagggagcgggacaggggggaccgagatcgggatagggaaagggaccgagaacgaggcagggaaagggatcgcagggacaccaagcgccacagcagaagccggagtcggagcacacctgtgcgggaccggggtgggcgccgctagctgggaaaacactagagctgcaggtaccagccactcggccccagggggttatggccacagagggataggcacagtctccaccaccctggagccaagggtctttcacatcacctatccctacatacataccaaatggaaaagtggccatccttttccccccaaacacacccccttaacctatctcttgggacttagcccgaccctccctctcatttcccattaagtctgagaggcaagagctaggttaggcaaggaggtggttggccagagatggggaacagccaggtgccccagtcctctgatttttcctccatcctgcttaccacctccctgggtacttacagccttctcttgggaacagccggggccaggactgggtcacctatgagctgaatcagcatctcctcctgagtcccagggcccctgcagttcccagtctcttctgtcctgcagcccttgcctctttcccacaggttccactttatatccaccttttccttttgttcaatttttatttttattttttttattattaaatgatgtggtctatggaaaaaaaaataaaaatctgacttagttttt

SEQ ID NO: 801 - DNA, 4908 bp, human
atggccggccagggggactgctgcgtcaaggtggccgtcaggatccggccccagctgtcgaaggagaagattgagggctgtcacatctgtacctctgttaccccgggagagccccaggtcctgctggggaaggacaaggccttcacctatgactttgtcttcgacctggacacctggcaagaacagatctattccacctgtgtgagcaagctcatcgagggctgcttcgagggctataatgccacggtgctggcctatgggcagacgggggccgggaagacgtacaccatgggcactggctttgacatggcaacgtcggaggaggagcagggcatcatcccgagggccatcgcacacctctttgggggcattgccgagcgcaagcgccgggcacaggagcagggcgtggctggacctgagttcaaagtcagcgcccagtttctggagctctacaacgaggagatccttgacctgtttgacagcacccgtgaccctgacacccgccaccgcaggtccaacatcaagatccacgaggacgcaaacggtggcatctacaccactggcgtcacttctcgcctcatccactcccaggaggagctgatccagtgcctgaagcagggggccctgtcccgcaccacagccagcacccagatgaacgtgcagagctcacgctcccacgccatcttcaccatccacctgtgccagatgcgcatgtgcacccagcccgacctggtgaatgaggcggtgactgggcttcctgatggtacacctccctcgagtgagtatgagacactcactgctaagtttcactttgtggacctggccggctcagagcggctgaagcggacaggggctactggcgagcgggccaaggagggcatctccatcaactgtggcctgctggccttgggcaatgtgatcagcgccttaggggaccagagcaagaaggtggtgcacgttccctacagggactccaagctcactcggctcctccaggattcgctggggggcaacagccagaccatcatgatcgcctgtgtgagcccctcagaccgagatttcatggagaccctcaacacactcaaatatgccaatcgggcccgcaacatcaagaacaaggtggtagtgaaccaggacaagaccagccagcaaatcagtgcactgcgggctgagattgctcggctgcagatggagctgatggagtataaggcgggcaagcgagtgataggagaggatggcgctgagggctatagtgatctgttccgagagaatgccatgctacagaaggagaatggggccctgcggctgcgggtgaaagccatgcaggaggccatcgatgccatcaacaaccgcgtcacccagctcatgagccaggaggccaacctgctgctagccaaggccggcgatggcaatgaggccattggtgcgctgatccagaactacatccgggagatcgaggagctacggactaagcttctagagagtgaagccatgaacgagtccctgcgccgcagcctctcacgggcctcggctaggagcccctactccctgggtgcttctccagccgccccggccttcgggggcagccctgccagctccatggaggatgcctcggaggtgatccgcagggccaagcaggacctggagcggctaaagaagaaggaggtcaggcagcggaggaagagccccgagaaggaagccttcaaaaagagggcaaaactccaacaggagaacagcgaggagacggatgagaacgaggcggaggaggaggaggaagagcgagacgagagtggctgtgaggaggaggaagggcgcgaggatgaagatgaggactcgggcagtgaagagagcctggtggactcagactcagaccccgaggagaaggaggtgaacttccaggcggacctggccgacctgacttgtgagatcgaaatcaagcagaagctgatcgacgagctggagaacagccagcggcggttgcagacgctcaagcaccagtatgaggaaaagctgattctgctgcagaacaagatccgagacacacagctggagcgcgaccgtgtgctgcagaacctcagcaccatggagtgctatactgaggagaaggccaacaagatcaaggcagactatgagaagaggctgcgggagatgaaccgggacctgcagaagctgcaggccgcccagaaagagcacgcccggctgcttaagaaccagtcgcgctacgagagggagctgaagaagctacaggccgaggtggctgagatgaagaaggccaaggtggccctgatgaagcagatgcgtgaggagcaacagcggcggcggctagtggagaccaagaggaaccgggagatcgcacagctcaagaaggagcagcggcgacaggagtttcagatccgagctctggagtcccagaagcggcagcaggagatggtcctgaggaggaagacccaggaggtttctgcactgaggcgcctggccaagcccatgtctgagcgggtggcagggcgtgcaggactaaagccacccatgctggactctggggctgaggtgtcggccagcactacctcatctgaggctgaatcaggggcccgctctgtctccagcatcgtgcgccagtggaaccgcaaaatcaaccacttcttgggggaccatcctgcgcccactgtcaatggcacccgtcctgcccgaaagaagttccagaagaagggggccagccagagcttcagtaaggcggcaaggctcaagtggcagtccctggagcgacggatcattgacatcgtcatgcagagaatgaccattgtcaacctggaggctgacatggagcggctcatcaagaaaagggaggagctgttcctcctgcaggaggcactgcggaggaagcgggagcggctgcaggctgagagccccgaggaagagaaggggctgcaggagctggctgaggagatcgaggtgctggcagccaacattgactacatcaatgacggcatcaccgactgccaggccaccatcgtgcagctggaggagaccaaggaggagctggactccacagacacatccgtggtcatcagctcctgctccctggctgaagcccgcctcctgctagacaacttcctcaaggcatccattgacaaggggctgcaagtggcacaaaaggaagcccagatccggctgttggagggccgactgaggcagacggatatggcaggctcctcccagaaccatctgctcctggacgccctgcgtgagaaggctgaagctcaccccgagctgcaggccctcatctacaatgtgcagcaggagaatggctacgccagcacagatgaggagatctcagagttctctgagggcagcttctcccagtcattcaccatgaaaggctccaccagccatgacgatttcaagttcaagagcgagcccaaactgtctgcccaaatgaaagctgtgtcggctgagtgcctgggccccccactggatatctccaccaagaacatcaccaagtccctggcctccctcgttgagatcaaagaggacggagtgggcttctctgtccgagacccctattaccgggacagggtctcgcgcaccgtcagtctgcctacccggggcagcactttgcaatctcgagccacagagacgtccccgctgacgagaaggaagtcctacgaccgagggcagcccattaggtccacagatgtgggattcacacccccatcatcccctcccactcggccccgcaatgaccgcaatgtcttctctcgtctcaccagtaatcagagccaggggtcagcgctggacaagtctgatgacagcgactcctctttgtcggaggtcctgaggggcatcatctccccggttggaggagccaagggtgcacggacggccccactgcagtgtgtctccatggccgaaggccacaccaagcccatcctctgcctggatgccacagatgagttgctattcacagggtccaaagaccgaagctgcaagatgtggaacttggttacgggacaggagatcgcagctctaaagggccaccccaacaacgtggtctccatcaagtactgcagccactcggggcttgtgttctccgtgtccacctcctacatcaaggtgtgggacatccgggactcagccaagtgcattcggactctcacgtcctcgggccaggtgatctcaggggatgcctgtgccgccacatccacccgtgccatcaccagtgctcagggcgagcatcagatcaaccagatcgccctcagcccttcgggcaccatgctgtacgccgcctcgggcaatgccgtccgcatctgggagcttagcaggttccagcctgtcggcaagctgactggccacatcggccctgtgatgtgcctgacggtcacccagacggccagccagcatgacctcgtggtgactggctccaaggaccactacgttaagatgttcgagctgggcgagtgtgtgacgggcaccatcggccccactcacaacttcgagcccccgcactacgatggcatcgagtgtctcgccatccagggagacatcctgttcagtggctcccgagataacggcatcaagaagtgggacctagaccagcaggagctcatccagcaaatccccaatgcgcacaaggactgggtgtgcgccctggccttcatcccgggccgccccatgctgctcagcgcctgccgtgcgggtgtcatcaaggtctggaacgtggacaacttcacacccatcggtgagatcaagggccacgacagtcccatcaatgccatctgcaccaatgccaagcatatcttcacagcctccagtgactgccgggtaaagttgtggaattacgtccctggactcaccccctgccttcctcgccgagtcctggccataaagggccgcgccaccaccctgccctga

SEQ ID NO: 802 - DNA, 6973 bp, human
atgccaattgtggaaaatatcaagacaggtcccgcggacaccacaggctctgcaagcccagccgcccgggtcacctgctttgcctccaccgatctccctgtgcggccctcatgtgctgtgctcgctgacacccgaagtccgcggctttccgcacacggtggggtcgtcagacccgctgcccttggcggtcgaagtcgtcgtgcgggcccgcggcggccgcccatggagaaggccaggagaggcggggatggcgtcccccgggggcccgtactgcacatcgtggtggtcggatttcaccacaagaagggctgccaggttgaattctcttacccgcccctgattccaggagatggacatgacagccacactttacctgaagaatggaagtatttgcccttccttgccttaccagatggcgcacacaactaccaggaagatactgtgttttttcacttgccacccagaaatggaaatggagccacagtatttggtatctcttgctatcgacaaattgaagccaaggcactgaaagtaaggcaagcagatatcaccagagagactgttcagaaaagtgtctgtgttctaagcaagctgcctctgtatggtttacttcaagcaaaacttcaactcattacacatgcatattttgaagagaaggatttttcccaaatttctattctaaaggagctttatgaacatatgaatagttccttgggaggtgcttcattagaaggatcccaagtatatcttggtctgtcacctcgagatcttgtccttcattttcgacacaaggtcttaatcctatttaagctaattcttcttgaaaaaaaggttcttttttatatttctccagtgaataaattggtgggtgcactgatgactgtgttatccctttttccaggcatgattgaacatggtctcagtgactgttctcagtatagaccccggaaaagtatgtctgaagatggtgggcttcaggaaagtaacccatgtgcagatgattttgtttctgcatccactgctgatgtttcacataccaacttgggaactatcaggaaagtcatggcaggaaaccatggagaagatgctgccatgaagactgaggagcctttgttccaagtggaagacagcagcaaagggcaggaacccaatgataccaatcaatatttgaaacctccatctcgcccatctccagattcttcagaaagtgactgggaaactttggatcctagtgtcttagaggaccccaacttgaaagaaagggaacagctgggatcagaccagacaaatttgtttccaaaggactctgtcccctcagagagtcttccaattactgtacaacctcaagctaatacgggacaggtagtcctgataccagggctcatttcgggtttggaagaggatcagtatggcatgcccctggccatcttcacaaagggatatctgtgtttgccttacatggcattgcagcagcatcatcttctctccgatgtcaccgttcgggggtttgttgctggagctactaacatcctttttcgacaacagaaacacctcagtgatgccattgtggaagtagaagaagctctgatccagatccatgatccagaactcaggaagctgcttaacccaaccactgcagacctaaggttcgcagactacctagtgaggcacgtgactgagaatcgggatgacgtcttcctagatggcacgggctgggagggaggtgacgaatggatccgggcccagtttgcggtctacattcatgccctgctggctgccacactgcaattagacaatgaaaagatattatcggactatgggacaacttttgttacagcatggaagaatactcacaactacagggtgtggaacagcaacaagcatccagcacttgcagaaataaatccaaaccatccatttcaaggccaatactcagtatcagacatgaagttaaggttctcacattctgttcagaatagtgaacgtggcaaaaaaattggaaacgtcatggtcacaactagccggaatgttgtacaaacaggaaaagctgttggccagtcagttggaggagctttttccagtgcaaagacagctatgtcttcatggctttccactttcaccacttccacctcccaaagtctcactgagccaccagatgagaagccttgagcaaggcgtcagaggctgctattgctttctgaggtttaagtgtcccctgtctgtctgctgctcccaggctgttactagccacagatccacagcaggggaccatatgtcgaactgtttacatggatgttgctctaagtgaatgtttcgggatgccgaaatgatgaaatcacagccatagcagggatggctttccaggttggggtttcaattgactacttttatttcagtctgagcctgattaaaacatacagtgaaccttctaatgaattttgagttctgatattgtacattggtttactttagaagagtttttacttatgtaaattttgttctgttttggtgtttgaatatctagatggtcactgtaatttatacttgctaaaattaatttatattaccattttctctaaagttggccttaaaacgtgcttataaagtgaaggggtcatacagttgggccttcattattttgctgaattatgtgatgatttttttgctttctacccacaaaacatttattaattcacttcctcccagaaacatgaaagttagaggtggtagttctgaggattgggtgttttgttttacgtttttagtttgttctttccacatccttaaaaacttggtttcagacatcaaggagtatcactgtgctttcctcctctttataactgtgcaggtgggtgtgcagagaaatagcagagtgatggttcgatgatactgaagcagtttaacatgaatgtgtctgtagggcaatactttcaaagaagacctatgtgtttatttttcaaccgcagtcatgttgcagtcttacaagcactttttttttattccagagtttgtgccatctgtttctctttttttttttggggggggggggggggcggggtctcactctatcgcccaggctggagtgcagtggtgccatctcggctcactgcaacctccatctcccgggttcaagcaattcttgtacctcagcctcccaagtagctgggattatggacatgcgccaccatgcccagctaattattgtatttttagtagagacggggttttgccatgttggccaggctggtcttgatctcctggcctcaagtgatctgcccgcctcagcctctcaaagtgctgggactacaggcatgagccactgcgcctggcctgtttcttttttaaacagttttctattgggtgtttgcagacctacagcttttctcgtagtcttattcataaagcttttcaaagcacttagtcttctacttccctaactgaaagtcctcctataatcaatccctacccccttctagaagtatcttaaaagaaaagcaaggtgattgtaagtattaaatagaaatctcatcttagtttatattcagcaaagtaagaggcaagagaagaaaactgcagccttgacatctgtcatctgagaaaggatatctggtttcatgttaggcacatacatgcatgtgtgtgccatctactgatgatttgtacacagctggacctcgtgtgtttgccatgctcagctctcatttgcttttcaaggatacctgggatggctgttctcagagagtacttacggggaacagactgccttttagtaacaagggatacttgggaaatacattgtgagtatgatctatcccagattgctggggaaataaaggagggccctgattatatttggtttattcctcactaaatgtttaagaagtaaatgctcccaaggcatttgaaatgaacatagaaacataatctaaatgtctctaaattttccactttgtgttttctaaacacaaattgtattactcatttgagcataactcaagaattcagcgatgataaattgaagggctgaatgtgagaactccattaattccacttcttccaagaaagttaacctcaggaaatgctgtttgaagagaagaaagtagtaccaaacaaaaaccttaaacagtacttgaatcttttttgcgctgagactataaagaattcattctaacatcttgtttcataagggccacatcattcgttggagcatgatagtgtgatttgtgtacaattgttacctctcagctgctgaagttcacacttcaaggatctaggagctctgtgaggggtcgtccagcaagatgctgatttgtctttcagttggtatggtttctgtgatcggggtaaactcccgtctcccactattcaaaagcagcccaactcatgctttggaatccactgaaataaaaatagttacatgaagtttaactttgctttaatatcacttgttcctcattgaatatacactttgatcggactttctattaacatttctagctaagagtttgactcttagtggtcactttactgactttccaacataaaacaagtatctcagaagatacaactttcatcatagaaatggtcaaaagaccatagctatatttccttcaggttctgggaggtggagtttttcaaggaacactggctgttgtattgttggcaggggccccaaggcagctcgcacaatcaaaggcaggaagcctcacccctggtcctgtgaccccccccccccacacacacacatacttcaggcttggattctaggctccaagtggccagcatagaagcagcagcctctctccaaaccctggctctgtgagccataggaaccagcactaggtcatcttctgacatagccctggtgaaggtgtgtgtgtgttggtggccacacttgctaaggcttttgtgtctaagaattgagtatttgtacctaggtgtgagggaaccagggtcagccagcctttttcagatggcgccaggcacacacactacatcaatggcttgctggtggcttcaccactatccaggtgacttaaaagagtgtttggaaaatgtccctggtatacttcaattcctactagacattgtaatgacaatggtgtaggtaaggaagagagagttaaaactaccagttgtggaatagaaatagttgcatgtccaaagaaggcttagaatgattgtgcatatgcagttggctcacataaccagcatgaacagtctctccccaaatccattagtgattcactaccccccgccaagcacagccctaaaacaattctcgtccactttcctgttaagaaacacagcagcaatatactttggcagcaaaccagagcatatgatgtaacttgctcaaccttatcttcctttccaaattctatactaagcatctgatgttttttagaataatttcctttggaaagccaacgagaaaacaaattaggaagagagagaagtgagaaattgttgcatggctgaggaacaagatgcttaaaatctgaatggaagtattttgagagcagtatttcatgtgctaagggttataagaattcttttagaaagggattagaattttactctgctagttacaagttttaaagtcacgctacggcattatcaccctggcaggtaggttttgttattgttttacattttgtgaaaaaaagttttgtagaagttacagctagtggtcttttccctccagagccagtgatgagtgtgggagcacttcagctctgtaaggggccagcgttctgacctttaaccacatgaactaacctgcgtcagcagttgcagaaagtagcctgttaggacagcagctgctaagcgttgcctggtattttagtggggagaaggctgggactcttcatggcatcaacacttgcatgctctgaatctttgatcagagatgaggtgccatttttggcatttccaccccgtctcgtggtagcctttaaaagtggtagaagatgctgccctaattccccgaggatgattgtcattccatgcagcataatgtgccgtgaggagttttctcattccagttctttggacttcgtaacattggaattgtttttccataatttccggcattccataaatatttgtcaaggacaaagaaaaggaatgtggatgtttattcttttcatatgaatgactttgtacacatgacttcctgctttcattatgaaggaggggaaactagttcccttgtatggtaactccaaagttaaaaaattgtgcatgtctgaggggttgaatatattttgtaaaactctaaatacatttgtatttctgtgctgttctaaagtttacctttttacttatatgaaagataactatatatttaaatcatgtaagtggaacacagtgtagggggtttttccaatcttatttttcatcaggttctcacacccacgtagtatgctgctcaaattttttcgtgtgtgcaaatgtgaacatttgaacatttcagttaggtactgagccagaaaaggtaattgaagttttcagaaagcttctgtgcttagaaaatattttgttgttttcttaaaatattagtattttgtagctggaagaataagatcaaggcttacatgtttcaggccacttggtcactggttcctgaatttagaaaacattggattaatgagttggtgaaggcatttagtggttacaaaaacagtttaaatatttatgattaaaggcttttcacaaacctttttaaagaaaatttagctgagaaaacttaaaaagttttctaaggaagtttaactgtggcacatgttttgatcagaaaggtagttctctttgctctggtagttttaaagtttgtactagttctttatttctgttgtttttttaaattgttaaaattataaatcacgtctaatcatactgaattgtaaaacttgaattgtatctttattttaagcataaatgagaataaaatgatcctgttcaccctgcc

SEQ ID NO: 803 - DNA, 3507 bp, human
ccacgcgtccgagcggggcgcctgggtggatgggcgcttgggcgcctgggctgccggacggtgggaacggaagtcgctgtgggacgctgaggaagccaggatggcgactccgagcaagaagacgtcaactccaagcccccagccttccaagagagctctcccgagagacccttcgtcggaggtcccgagcaagaggaagaattcggccccgcagctgccgctgttgcagtcgtccgggcctttcgtggaaggctctatcgtccgcatctcgatggagaacttcctaacatatgatatttgtgaagtatctcctggaccccacttgaatatgatcgttggagccaatggaacagggaagtcgagcattgtgtgtgccatttgccttggtttagctggaaaacctgctttcatgggacgagcagataaggttgggttttttgtgaagagaggatgttctagaggcatggttgaaattgaattgttcagggcttctggaaatcttgtaatcacccgtgagattgatgtggcaaaaaatcagtccttttggttcatcaacaaaaaatctacaacccagaaaatagtggaagagaaagttgcagccttaaatattcaagtggggaatctttgccagtttctccctcaggacaaagttggagaatttgctaaactcagcaaaattgaactcctcgaagccactgaaaagtcaattggtcccccagaaatgcacaaatatcactgtgaactcaaaaacttaagggagaaagaaaaacagctcgagacctcatgcaaagagaaaactgagtatctacagaaaatggttcagaggaatgaaagatataaacaagatgtggagaggttctatgaacggaagcgacatttagatttaattgagatgcttgaagcaaaaaggccatgggtggaatatgaaaatgttcgtcaggaatatgaagaagtaaaactagttcgtgaccgagtgaaggaagaggtcagaaaacttaaagaagggcagattcctataacatgtcgaattgaagaaatggaaaacgagcgtcacaatttggaggctcgaatcaaagaaaaggcaacagatattaaggaggcatctcaaaaatgcaaacagaagcaagatgttatagaaaggaaagataaacatattgaggaacttcagcaggctttaatagtaaagcaaaatgaagagcttgaccgacagaggagaataggtaatacccgcaaaatgatagaggatttgcaaaatgaactaaagaccacggaaaactgcgagaatcttcagccccagattgatgccattacaaatgatctgagacggattcaggatgaaaaggcattatgtgaaggcgaaataattgataagcgaagagagagggaaactctagagaaggagaaaaagagtgtggacgatcatattgtacgttttgacaatcttatgaatcagaaggaagataagctaagacagagattccgtgacacgtatgatgctgttttatggctaagaaataacagagacaaatttaaacaaagagtctgtgagcccataatgctcacgatcaatatgaaagataataaaaatgccaaatatattgaaaatcatattccatcaaatgacttaagagcctttgtatttgaaagtcaagaagatatggaggttttcctcaaagaggttcgtgacaataaaaaattaagagtaaatgctgttattgctcccaagagttcatatgcagacaaagcaccttcaagatctttgaatgaacttaaacaatacggatttttctcttatttgagagaattatttgatgcacctgatcctgtaatgagttacctttgctgtcagtatcatattcatgaagttcctgtaggaactgaaaagaccagagaaagaattgaacgggtaatacaagaaacccgattaaaacagatttatacagcagaagaaaagtatgtggtgaaaacttctttttattcaaacaaagttatttctagtaacacatctctaaaagtagcgcagtttctcactgtcactgtggacctagagcagagaagacacttagaagaacagctaaaggaaattcatagaaaattgcaagcagtggattcagggttgattgccttacgtgaaacaagcaaacatctggagcacaaagacaatgaacttagacaaaagaagaaggagcttcttgagagaaaaaccaagaaaagacaactggaacaaaaaatcagttccaaactaggaagtttaaagctgatggaacaggatacttgcaatcttgaagaggaagagcgaaaagcaagtaccaaaatcaaagaaataaatgttcaaaaagcgaaacttgttaccgaattaacaaacctaataaagatttgtacttctttgcatatacaaaaagtagatttaattctccaaaatactacagtgatctctgagaagaacaaattagaatcagattatatggccgcatcttcacaactccgtcttacagagcaacatttcattgaattggatgaaaatagacagagattattgcagaaatgcaaggaacttatgaaaagagctaggcaagtatgtaacctgggtgcagagcagactcttcctcaagaataccagacacaagtacccaccattccaaatggacacaactcctcactccccatggttttccaagaccttccaaacacattggatgaaattgatgctttattaactgaagaaagatcaagagcttcctgcttcacgggactgaatcctacaattgttcaggaatatacaaaaagagaagaagaaatagaacagttaactgaggaactaaagggaaagaaagttgaactagatcaatacagggaaaacatttcacaggtaaaagaaaggtggcttaatcctttaaaagagctggtagaaaaaattaatgaaaaattcagcaatttttttagttccatgcagtgtgctggtgaagttgatctccatacagaaaatgaggaagattatgataaatatggaattcgaattagagtcaaatttcgaagtagtactcaactgcatgaattaactcctcatcatcaaagtggaggtgaaagaagtgtttctaccatgttatacttgatggcacttcaggagctaaatagatgtccattcagagtagttgatgaaatcaatcagggaatggacccaatcaatgaacggagagtgtttgaaatggttgtaaatactgcctgtaaagaaaatacatctcaatactttttcataacaccaaagctcctgcaaaatcttccttattctgaaaagatgacagttttgtttgtctacaatggccctcatatgctggaaccaaacacatggaatttaaaggctttccaaaggcggcggcgccgtattacattcactcaaccttcttaataaaagtaaagagagggaacttgggaattttttttgttaaattctgtttataagtatggctcaactgaataaaaggagattcactaaaaaaaaaaaaaaaa

SEQ ID NO: 804 - DNA, 3268 bp, human
cggtctcgggagatggaggaaaaggagatgttacggcggcagatccgcctactgcagggtctgattgatgactacaaaaccctccacggcaatgccccggcccctggtaccccagcagcttctgggtggcagccacccacttaccacagtggcagagcctttagtgcccgctaccctcgtccaagccggaggggctactcttcccaccatgggccttcgtggcgcaagaaatactccctcgtgaatcggcccccgggaccctcagaccctcctgccgaccatgctgtgcggccgttgcacggggcccgggggggccggcctcctgtcccgcagcagcatgtccttgagagacaggtccagctcagtcagggtcagaacgtggtcatcaaagttaaaccgccatcaaagtctggctctgccagtgcctcaggggcccagcggggctctttggaagaatttgaggaaaccccctggagtgaccaaaggccccgggaaggtgaaggtaagccccctcggggacagctgcagccctcgaggccaacaagagccagggggacctgcagtgtggaagatcctcttctggtctgccagaaggagcctggtaagcccaggatggtgaagtcagtgggcagtgtgggcgacagcccccgggagccccgccggacagtcagtgagagtgtgattgccgtcaaggcgagcttcgcatcctccgctctgcccccacgcactggcgtggccctgggccggaagctgggttctcattccgtggccagctgtgctccacagctccttggggacaggagagtagatgctggccacacagatcagccagttccgtctggctcagtggggggccccgccagaccggcctcaggacccaggcaggcccgggaggcctcgctggttgtgacctgtcgaactaacaagttccggaaaaacaactacaaatgggtggctgcctcctcgaagagtccccgggttgctcggagggccctcagtcccagagtggctgcagagaatgtgtgcaaggcctctgctggcatggcaaacaaggtggagaagccgcagctcatagctgacccagagcccaagcccaggaagccagccacgtcctccaagccagggtctgcccccagcaagtacaagtggaaggcctccagcccctctgcctcctcctcttcctccttccgttggcagtcggaggccagcagcaaggaccatgcctcccagctctccccagtcctgtctaggtccccgtcgggggacagaccagcagtaggacacagtggcttgaagcccctctctggggagaccccgctctcggcttacaaagtgaagagccgcaccaagatcatccggagacgcggcagcacaagccttcctggagacaagaaaagcggcacctcacctgccgccaccgccaagagccacctcagcctccggcggagacaggccctcagggggaagagcagccctgtcctgaagaagacccccaacaagggcctggtacaggtcaccacgcaccgactatgtcgcctgccaccgagccgggcccacctccccaccaaggaagcgtccagcctgcatgccgtgcggactgcacccaccagcaaggtgatcaagacccgctaccgcattgtcaagaagacgccggcctcgcctctcagcgccccgcccttccccctgtctctgccctcctggcgggcccggcggctctcactatccgggtccctggtgctgaaccacctgcgtccagttgccagcgggggtgggaaagcccaaccgggctccccttggtggcggagcaaaggctaccgctgcatcggaggggtcctctacaaagtatctgccaacaagctctccaagacctccggccagcccagtgatgcgggcagcaggcccctcctgcgcacaggctggctggatcctgcaggcagctgtagccgttccctggccagccgggcagtgcagcgcagcctggccatcatccggcaggcgcggcagcgcagggagaagaggaaggagtactgcatgtactacaaccgcttcggcaggtgcaaccgtggcgagcgctgcccctacatccacgatcccgagaaggtggccgtgtgcaccaggtttgtccggggcacctgcaagaaaacggatgggacctgccccttctcccaccatgtgtccaaggagaagatgcgggtgtgctcctacttcctgaagggcatctgcagcaacagcaactgtccctatagccacgtgtacgtgtcccgcaaggccgaggtctgcagcgacttcctcaaaggctactgccccctgggtgcaaagtgcaagaagaaacacacgctgctgtgccccgactttgcccgcaggggggcgtgtccccgcggcgcccagtgccagctgctccaccgtacccagaaacgccacagtcggcgggcagccacgtcccccgccccagggcccagcgacgcaaccgccaggagcagggtctcggccagccacgggcccaggaagccttcagcatcccagcgccccaccaggcagacgcccagctcggctgccctcactgcggctgccgtggctgcacctccccactgcccaggggggtcagcctctccctcatcctcgaaggcttcgtcctcctcctcctcctcctcatcccctcccgcttccttggaccacgaggcaccatctctccaggaggctgccttagcagcagcgtgctccaacaggctctgcaagctgccttccttcatctccctgcagtcctcgccgagcccaggagcccagcccagggtccgggcccctagggcccccctcaccaaggactcagggaagcctctgcacatcaaaccacgtctgtgaggaccccagggaccggcctgcacctacctcagaccctcatccttggagaggaaagaggctctgtccaccactctaccccacaggagggccgcccgccaccaagcctcacctgggggccacagggacactgctctgcctgcctggccctcaaccttccatgaccagcgtgtgcgcagggcctggtcttcctcccccaagccaggcccctgtccccaccccaccaccttccagggtgccaggcagggctggcctccaggcctgtccccgactgccattggcaacagtggccctgcagcccccagccctccccacccaggttttcggcccagtgaagaggccactggccaggcctcccaggcaggtgttttatgttcagcaataaaggttctatccgaaaaaaaaaaaaaaa

SEQ ID NO: 805 - DNA, 3737 bp, human
agcagcggcccgaggctcccggagcatcgcgctgggagaagacttcgccgctcggggccgcagcctggtgagctcagcccccttcgggccctcccctgcatcccagccggggcctctccgagccggcgctgatcgatgccgacacaccccggggaccctatcgcgactccatcgcgccatatcgcgacaccatcgtgccctgtcgagactccattttgtcacagcccttttcaatatatatctttttttttttaatttgccctgtcatctttgggggctgtctcccatgtcgtgattttgacgtgatctctccgtgacatcaccgcgccatcgtgaagtgtgatctcatcgccgccctgtcgtgacttcatcaatgtcgtgttgtgacctggctgcggcgggacagttgggcaaggcgagcatcatggcctcggattgcgagccagctctgaaccaggcagagggccgaaaccccaccctggagcgctacctgggagccctccgtgaggccaagaatgacagcgagcagtttgcagccctgctgctagtgaccaaggcagtcaaagcaggtgacatagatgccaaaactcggcggcggatcttcgatgctgtcggcttcaccttccccaatcgtctcctgaccaccaaggaggcgccggatggctgccctgaccatgttctgcgggctttgggtgtggccctgctggcctgcttctgcagtgaccctgaactggccgcccatccccaagtcctgaacaagattcccattcttagcaccttcctcacagcccggggggacccggacgatgctgcccgccgctccatgattgatgacacctaccagtgcctgacggctgtagcaggcacacccagagggcctcggcacctcattgctggtggcaccgtgtctgccctatgccaggcatacctggggcacggctatggctttgaccaggccctggcactcctggtggggctgctggctgctgccgagacacagtgctggaaggaggcggagcccgacctgctggccgtgttgcggggcctcagtgaggatttccagaaagctgaggatgccagcaagtttgagctctgccagctgctgcccctctttttgcccccgacaaccgtgccccctgaatgctaccgggatctgcaggccgggctggcacgcatcctgggaagcaagctgagctcctggcagcgcaaccctgcactgaagctggcagcccgcctggcacacgcctgcggctccgactggatcccggcgggcagctccgggagcaagttcctggccctgctggtgaatctggcgtgcgtggaagtgcggctggcactggaggagacgggcacggaggtgaaagaggatgtggtgaccgcctgctatgccctcatggagttggggatccaggaatgcactcgctgtgagcagtcactgcttaaggagccacagaaggtgcagctcgtgagcgtcatgaaggaggccataggggctgttatccactacctgctgcaggtggggtcagagaagcagaaggagccctttgtgtttgcctcggtgcggatcctgggtgcctggctggccgaggagacctcatccttgcgtaaggaggtgtgccagctgctgcccttcctcgtccgctatgccaagaccctctacgaggaggccgaggaggccaatgacctttcccagcaggtggccaacctggccatctcccccaccaccccagggcccacctggccaggagacgctctccggctcctcctgcctggctggtgccacctgaccgttgaagatgggccccgggagatcctgatcaaggaaggggccccctcgcttctgtgcaagtatttcctgcagcagtgggaactcacatcccctggccacgacacctcggtgctgcctgacagcgtggagattggcctgcagacctgctgccacatcttcctcaacctcgtggtcaccgcaccggggctgatcaagcgtgacgcctgcttcacatctctaatgaacaccctcatgacgtcgctaccagcactagtgcagcaacagggaaggctgcttctggctgctaatgtggccaccctggggctcctcatggcccggctccttagcacctctccagctcttcagggaacaccagcatcccgagggttcttcgcagctgccatcctcttcctatcacagtcccacgtggcgcgggccaccccgggctcagaccaggcagtgctagccctgtcccctgagtatgagggcatctgggccgacctgcaggagctctggttcctgggcatgcaggccttcaccggctgtgtgcctctgctgccctggctggcccccgctgccctgcgctcccgctggccgcaggagctgctccagctgctaggcagtgtcagccccaactctgtcaagcccgagatggtggccgcctatcagggtgtcctggtggagctggcgcgggccaaccggctgtgccgggaggccatgaggctgcaggcgggcgaggagacggccagccactaccgcatggctgccttggagcagtgcctgtcagagccctgaggggtgtccaccggggacagacccaggggcgggcagagagggaaggagggaggaggcatcttccctgaagcccccaatctggcccccccctccccagacttcctccccaaaacaccccagctttctggcttttctgagggcaagggcatggtgcccacccctcaagtgtaaggaactgcgttccgcccctcaggcccccatgggggcagggatcggcttggaaatcaacgtggttgtccccgccaggccggggaaggttggagcagcccccagggaggggggcactaggtgtcattgtgcccgatgtctggctcccctgcaggagggaggctccagggtaagacagggctggcaggagcagactgcctcagcccatgtgccctgccggccagggcgtgggctcccctcggctgtggtgcctcctctggccccccaggtccacgtcctttaaattggccctttggctcttgcccttggctcccttgggcagacagcaggcttaggccattgatatcgcagttcttcctatcagcttcagtgacccagggtctgaactgcctccatcctagggcaacctggggcagacaggcctggtggggggtggggaaacctccttccacctgagcttgcttgaagggacccagagtctttgggcccagatctttaaacctttgtgtcgtgttgcagcagagtgacgatgggggttggggggttatttattttgcctgtccttatccctgcttggacacctgagcatctgattcctgtccccctggtgccatctggcctggctggagccaggaacaggagggacacttccccagaatccgcatgtttccccagtgattacactccactgccaccgtggtgcctggctttaactcccacccctgctatgactcctctctgcagagacgcgactggcggctccagcagggactacctttcttataaacccagggggaccacacacacacacacacacacacacacacacacacacacacacacacacacacacacacactcttgatcccttgcttccctcccccagtgcgttctgtgatcgccaagttcaaagctgtgcacatgtggacactcaataaatgttcattggtgaaaaaaaaaaaaaaaaaaaaaaaaaaaaaaaaaaaaaaaaaaaaaaaaaaaaaaa

SEQ ID NO: 806 - DNA, 5363 bp, human
cagccggcggcgggctgggtgtttgcaatacaaaggcggccacgcgcggcgccgctcggtgcagaccatgaattacgtggggcagttagccggccaggtgtttgtcaccgtgaaggagctctacaaggggctgaatcccgccacactctcagggtgcattgacatcattgtcatccgccagcccaatggaaacctccaatgctcccctttccacgtccgctttgggaagatgggggtcctgcgctcccgagagaaagtggttgacatagaaatcaatggggaatctgtggatttgcatatgaaattgggagataatggagaagcattttttgttcaagaaacagataatgatcaggaagttatccctatgcacctggccacctcccccatcctgtcagaaggagcttcgagaatggaatgccagctgaaaaggggctctgtggacaggatgagaggcctggaccccagcacgccagcccaagtgatcgctcccagcgagacgccgtcaagcagctctgtagtaaagaagagaagaaaaaggaggagaaagtcacagctggacagcctgaagagagatgacaacatgaacacatctgaggatgaggacatgttccccatcgagatgagctcggatgaggccatggagctgctggagagcagcagaactcttcctaatgatatacctccattccaagatgatattcctgaggaaaacctctccctggctgtgatttaccctcagtcagcctcataccctaattcggatagagagtggtcacccactcccagtccttccggttcccgaccttcaacacctaaaagtgattcagaattggtcagcaagtccacggaaaggacagggcagaagaacccagaaatgctttggctgtggggagagctgccgcaggctgctaagtcttcttctccacacaagatgaaagagtccagcccattgagcagtagaaaaatttgtgataaaagtcactttcaggccattcacagcgaatcttcagacacttttagtgaccaatcgccaactctggtcggtggggcacttttggaccagaacaagcctcagacagaaatgcagtttgtgaatgaagaagacctggagaccttaggagcagcagcgccactcttgcccatgatcgaggagctcaaacccccctctgccagtgtagtccagacagcaaacaagacggattctccttccaggaaaagagataaacgaagccgacatcttggtgctgacggcgtctacttggatgacctcacagacatggatcctgaagtggcggccctgtattttcccaaaaacggagatccttccggactcgcaaaacatgcaagcgacaacggagcccggtcagccaaccagtccccgcagtcggtgggcagctcgggcgtggacagtggcgtggagagcacctcggacgggctgagggacctcccttccatcgccatctccctctgcgggggcctcagcgaccaccgggagatcacgaaagatgcattcctggagcaagctgtgtcatatcaacagtttgtggacaaccccgctattatcgatgaccccaatctcgtggtaaagattgggagtaaatattataactggacaacagcagcacccctcctcctggcaatgcaggccttccagaaacctttgccaaaggccactgtggaatctatcatgagggataaaatgcccaaaaagggaggaagatggtggttttcatggaggggaagaaacaccacaatcaaggaggaaagtaagccagagcagtgcttggctggcaaggcccatagcaccggagagcaaccgccgcagctcagcttggccaccagggtaaagcatgaatcatcctccagtgatgaggagcgcgcagctgccaagccatcaaacgcaggccacctccctcttctgcctaatgtcagctacaagaagactctccggctgacttccgagcagcttaaaagcttgaagttgaagaatggccccaacgacgtggttttcagtgtcaccacgcagtaccaaggcacgtgccgctgtgagggcaccatctatctgtggaactgggatgataaagtcatcatttctgatattgatgggacaattaccagatcagatactcttggccacattttgcccacccttgggaaggattggacccatcagggcatcgctaagctgtaccataaagtgagccagaatggatataaatttctctactgttctgcccgtgccatcgggatggcggacatgacgcggggctacctgcactgggtcaacgagaggggcacggtgctgccccaggggcccctgctgctgagtcccagcagcctcttctctgccctgcacagagaagtgattgaaaagaagccagaaaagtttaaagtccagtgtttgacagacatcaaaaacctgtttttccccaacacagaacccttttatgctgcttttggaaaccgaccagctgatgtgtattcatacaagcaagtaggagtgtctttgaatagaatatttaccgtcaaccctaaaggagagctggtacaggaacatgcaaagaccaacatctcttcgtatgtgagactctgtgaagtagtcgaccacgttttcccgttgctgaaaagaagccattcttcagactttccctgttcggataccttcagtaacttcaccttttggagagagccactgccaccttttgaaaaccaggacattcattctgcctcagcgtaaaatgtcccaagcagcctcttgccagcagtgcagagcctggttgtcacccattaaaggataggtctccccggagtgcacagctccacctgggagcctggcgcgtcatcattggcctgacagcagagagaattgagaagcatttctcccctgccccaccccggggctgacatttctaagcaagataggaagggagcactttctaggctaggagttgggtgcatttgtaccgtgaaaagcattcctcagttgtggcttaatgccagttacgacgctgcctttccggcctgctccagcaagtagctactggttcacgtgcagtttggggctgtgaaacctaggcagaaggcggctgtctgagggctgtccccgcctaggacagggtcaatcgaggaatgccagatgtgcacggtttttggcaaagtagggggcacatttccattatagcaatgttagtgccaccaccttctgaacacagtggggagggctgtgaaggctcatgtgacctggatctgaggtctctgatagaaatctggacgccaccgggtccaggcctggcctcagacttggccttgtggatgggccccttacagtatttgctgactagtctcatttttaggtgataaatttttctttaattcctttggttaaagatagtctatttcattggcatatctccccccagtttttgtggctcaaggctggaatatttatgccttaatatatctatggcagacatttaagaatgcgctttatctagctcatggtaactttgcaacgccttagattaaaatgacagtaaatattactaaggcagtattttgaatgagtttgacactgccggcttccttccatccagcgaggtggtgctgacagtgtggacttgagcacacttatgccaaatgataatgatactgacttctgttgggagctctccaaagaaactggttggttttaagaaaatagtttcaagaagttcaactatattcttttagatattatgtattgttttactctgattaggttactgtgataggcatttattcatattctttctataccactgtcattaatatattaaaaagatgtatgtgttagactatcgaaagggccttattctctctttctcatagactgaccttcttttggaatttctgagtcatttattttccttagctttttccactcaaattaagggcaagcgaaaaagtaataatttggcattctttaagcctacagaatgtgattctttcacttgtttattacactggctcgtggacagaacaatttgaaaagtgaaagaattattttggtaaaagattttgctttacttttcgaagcattatttttttaaagagtgttttactccaacgattgaaacattttcctatttaaatttcattgttagaatcacaggaggcaaaaaatggaacggttgaatgaaattttactctttctgtgaaagaaaatccacagagttgttgcctccgttgtagttggtgggccccgttagcattggatgcctttgccaaatggttcatgtggacacacaaaggcaaacagatctgccatcgatcgcagatttctgtagaaacacggatgtgcatgtgcagattcccttttgcaggtattaaaaataattaaaaatagtcctgcctgaggttgcagtgagccgagcttgcactactgcactccagcctgggtgacagagtaagactccatgtcaaaaaaaaaaaaaaaaaaaaaaaagtcctgccttaactaactcctctgcgcttgttcactagtaacctaaagaggctatattcattctttatgcaatgagggtatttttgagtgaattttaactgctctgaactaagtataagctcatgggcctgcaaaggttcagacggtttctcctttgcacccaggaggaactttggctgcgagaatggggggatgtatccctcatgcagttggcatccaggcagccctctgcagcagcacaccctgcaggcggagttttcagaggatgcaattttggatcccgaattttgatgtaccttaaacttccacatcactgcaccctgaaacagagcatgctttccagaaagtcacactctcagatctgtgtcaagttcaatgtgagccctggcaaggctggcatattaacacctgccttctggcttctgaaagtgagatttgtatatgggctgcactcacgcatatacgagttggtttatctttgtgtacatgactataacccagtgatgctgaggtcatgtgctggaatgctgtatttggaccacacatttcaaagttgccctatggaaatgaatcctacttagtgacaagtcatcaaatgtttgtcacatgtgatgaagacaaatatgtatacctggcatagagaaaaatatatacctggtacattggagaaaaataattacactttcaaagagaattccctttgcaattttatgtttggatcaccactgtaagcacactttatttgcatttgatctgtatttgtatatgctgatgcaatgataaaaatcactgtaatacttcattgtgttgtactggatgcaaagctagaaaatattgcaataaatgagaccgatgaaagacttctctgaaaaaaaaa

SEQ ID NO: 807 - DNA, 2892 bp, human
gcgccggcacacctattggcccccgcggcgtcccgtcgccgcgtcgcgttgctggcccgtcggagcgacgccgctcgggtcagtcggcggccggactgggaagatggacgcagctactctgacctacgacactctccggtttgctgagtttgaagattttcctgagacctcagagcccgtttggatactgggtagaaaatacagcattttcacagaaaaggacgagatcttgtctgatgtggcatctagactttggtttacatacaggaaaaactttccagccattggggggacaggccccacctcggacacaggctggggctgcatgctgcggtgtggacagatgatctttgcccaagccctggtgtgccggcacctaggccgagattggaggtggacacaaaggaagaggcagccagacagctacttcagcgtcctcaacgcattcatcgacaggaaggacagttactactccattcaccagatagcgcaaatgggagttggcgaaggcaagtccataggccagtggtacgggcccaacactgtcgcccaggtcctgaagaagcttgctgtcttcgatacgtggagctccttggcggtccacattgcaatggacaacactgttgtgatggaggaaatcagaaggttgtgcaggaccagcgttccctgtgcaggcgccactgcgtttcctgcagattccgaccggcactgcaacggattccctgccggagctgaggtcaccaacaggccgtcgccatggagacccctggtacttctcattcccctgcgcctggggctcacggacatcaacgaggcctacgtggagacgctgaagcactgcttcatgatgccccagtccctgggcgtcatcggagggaagcccaacagcgcccactacttcatcggctacgttggtgaggagctcatctacctggacccccacaccacgcagccagccgtggagcccactgatggctgcttcatcccggacgagagcttccactgccagcacccgccgtgccgcatgagcatcgcggagcttgacccgtccatcgctgtggggtttttctgtaagactgaagatgacttcaatgattggtgccagcaagtcaaaaagctgtctctgcttggaggtgccctgcccatgtttgagctggtggagctgcagccttcacatctggcctgccccgacgtcctgaacctgtccctagattcttctgatgtagagcgactggaaagattcttcgactcagaagatgaagactttgaaatcctgtccctttgaaaatcctggggtcgggggtggcacctgtgagagcctggggctcctggtgccgctgcgtttcatccatcccgcccgctcgcctgccgagggctgcgccccgtgctgcctccccccagagggccacccgctgtgctcgtggactgaggctgcgctgcccgggaggccttactgcttggtgtcagactgcccagctcagagtgcccgtcagggcctgtgcatccgcacgcggagccgtctgttaggagcttccagagtgttctctcgacactgccagccccgtgttagcacctgggcctcagtcccacttgctcccaggcgccggttctgtggttggtttggaattaaagtcctgtttgaagttgtcagacacagacatgaatttctgggcgctccctgagtcagagtctcagaagacctgtgcaggctggcgtgagaggagcggcagccacactgcggccccacgcccaaggactgggctgctctcgaggggggcgcgcccaccgctgtgtcctctctgcccagcctggcttaccaagggctacctcagtgggagatgaggttggaggaacgaaggcgaggttcctccttgctttggggagaaaagtattcaggaagtgggtgtgtgggaaacctgaagatggcgtgcacaggacacagcgtgggcggcctgggcagaagggcggctggctgtcctggagctgctgctggagcctgccctcagagtgtccctttccagtgctgtggcattctgtggcagcttccccaggtgtggtgacggggggggggcggggcctccacctgtgacagccaggcttgagggtggacggcgtgcctctcccaggagccttccccatgtccttgccttgctgagaattgccctcccatgccgctgaggtgttaggtggtttagggccaaaaggggaaaaccacttgagtcttgtggtgtgtggtgggcagacaccacagggtggcatcacctggtggcatttccagaacctcagccccgattccagcacccaccaccgcctgaccctgtgtaacctgctgtcccgggtcccagagtgcactctgccccgctgctctgctgcctgtcctgggaaagtatctttgccccactaggaaatgtaaacaggagggcttggggagcgtgggcacttttctcatgagcagctactgcggcgttggcaggactcgctgctgctgctgctgcttgtgtaggtcggggagccagagatccccgaggacgcgcgccggacagtcggcactgaccggcccacctggtagcagaggacacccccagccccccaagcattgaagacatagtgtatttcctcgtatcctttctcccttgggtgtagttggggtggggaagcagggaaggctggtgcgatctccattccttgggctccacgtccgagttcatggtgcgccgctgtgctgggagctgcagtggtaatgtgtgggacaccttgaccaaaggggagctttgtctcgtgtgttttgaaaaaggcttaatgaagagaatgttgttcattcttagtagtatagtttgcaattcttaatggcaaataataagtttcagtagaaaacaaaaaaaaaaaaaaaaa

SEQ ID NO: 808 - DNA, 2867 bp, human
aaggctagcctctctcagtgggtgactgagctgtcttcagtggaagcccgaggcagatgccacgcaattctggagctggatacggctgcccacacggggaccccagcatgctggacagcagagagaccccacaggagagccggcaggacatgattgtgaggaccacccaagaaaaattgaaaaccagctcactgactgacaggcagccactctccaaagagtccctgaaccatgctctcgagctctcagtgccagagaaggtgaataatgcccagtgggatgctccagaggaggcgctgtggacgactcgggccgatgggcgggtgcgcctgcgcatagaccccagctgcccacagcttccctacactgtgcatcggatgttctacgaggccctggataagtatggggacctcatcgctttgggcttcaagcgccaggacaagtgggaacacatctcctactcccaatactacctgctcgcccgcagagccgccaagggcttcctgaagctcggcctgaagcaggcccacagtgtggccatcctcggcttcaactccccggagtggttcttctcggcagtgggcacagtatttgcaggtggcatcgtcactggcatctacaccaccagctccccagaggcctgccagtacatcgcttatgactgctgcgccaatgtcatcatggtcgacacgcagaagcagctggaaaagatcctgaagatctggaaacagttgccacatctaaaggcagtcgtgatatataaagaacctcctccaaacaagatggccaatgtgtacacgatggaggaattcatggagctggggaatgaagtgcctgaggaagccctggacgccatcattgacacccagcagcccaaccagtgctgtgtgctagtctacacttccggcaccactgggaaccccaagggcgtgatgctgagtcaagacaatatcacgtggacggcacggtacggcagccaggccggtgacatccggccggcagaagtccagcaggaggtggtagtcagctacctgcccctcagccatattgccgcccagatctacgacctgtggacaggcatccagtggggggcccaggtttgctttgccgaacccgacgccctgaaggggagcctggtgaacacgctgcgggaggtggagcccacatcacacatgggggtgccccgggtatgggagaagatcatggagcgcatccaggaggtggcggctcagtctggcttcatccggcgaaagatgctgctgtgggccatgtcggtgaccttggagcagaacctcacctgccccggcagcgacctgaagcccttcacaaccagactggcagattacctggtgctagccaaggttcgccaggcactgggatttgccaagtgtcaaaagaacttctatggagcggcccccatgatggcagagacacagcacttcttcctgggtctcaacatccgcttgtatgcgggctacggcctcagtgagacctcaggcccccacttcatgtccagtccctacaactaccggctgtacagctcaggcaagttggtgcccggctgtcgggtgaagctggtgaaccaggacgcagagggcattggcgagatctgcctgtggggccgcaccatattcatgggctacctgaacatggaggacaagacttgtgaggccatcgacgaggaaggctggctgcacacgggtgatgctggccgcctggacgccgatggcttcctctacatcactgggcgcctcaaagaattaatcatcacagctggtggggagaatgtgccccctgtgcccatcgaggaggccgtgaagatggagctgcccatcatcagcaacgccatgctcattggggaccagaggaagttcctgtccatgctgctcaccttgaagtgcactctggacccagacacctctgaccagactgataatctgactgaacaagctatggagttctgccagagggtgggcagcagagccaccacagtgtccgagatcatagagaagaaggatgaggccgtgtaccaggccatcgaagaggggatccggagggtcaacatgaacgcggcggcccggccctaccacatccagaagtgggccattctcgagagagacttctccatttcgggtggagagttgggtcccacgatgaaactgaaacggctcacagttttggagaagtacaaaggtatcattgactccttttaccaagagcaaaaaatgtaatcagggcctatgcctgcagtttctatagaatagagggcaggcgttccgagcctcttcctgagccccaggtctcttcagtctgggcacaggcatttctgccaagtctgttagatctccaggtcagggcacagcactggctctacatttaccaggtcttacgccaacaatagctgacaattccaagaagcttcacgtgtgggtagttttaattcagtttaagtattgctttttgttcaggtgacaaatgagatcagctctccttccagaacgaaagggctgataatttttggccttagttccaggtagattaaaaagctgctagctcacatacaggacagccagcagtaggctgtggagcgggtaggagagagatggctgatactgctcacgtgcgctgcaggaaaagcaatcagtcacaactcacctagcgacctgacttactctggaatcttggcgggcatcgccgaccctattattccattaccaggcactccgccacccacatgccaactgacttgatgcttaataaaactgctgctgcctgtttgattctatttaatgtataatttgaatattaaaccttttaacagaactgtcaaaaaaaaaaaaaaaaaaaaaaaaaaaaaaaaaaaaaaa

SEQ ID NO: 809 - DNA, 4387 bp, human
cacgtgggttctgagcgtgtttctacgtccctggaagccggtcatttaagctcattcctcgccacggcttagtcaacatgggtcgctcgggaaagttgccctctggtgtctcagctaagttgaagcgctggaagaaaggccacagcagcgacagcaaccccgccatctgccgccaccgtcaggccgcccgcagccgcttcttcagccggccgtcaggaaggagtgacctgacagtcgatgctgtgaagttacataatgagctgcagtcagggtccttgcgcttgggcaaaagcgaagccccggagacgcccatggaagaagaggcggagctggttctcaccgagaagtcctcgggtaccttcctgagtggcctttccgactgcacaaacgtcaccttcagcaaagtacagcgcttctgggagtccaactcggctgcccacaaggagatctgtgctgttctggctgctgtcactgaggtgattcgctcccagggagggaaggagacggagactgagtacttcgctgctctgatgacaacaatggaagcagtggagtccccggagtccctggccgccgttgcttacctgctgaaccttgtcctgaagcgtgttcccagccctgtgcttattaagaagttctctgatacctccaaagccttcatggatatcatgtcagctcaggccagcagcggctccacctctgtcctccgatgggtcctttcctgcctggccacccttctgcggaagcaagacctggaggcctggggctaccccgtgacccttcaggtgtaccatgggctgctgagcttcacggtgcatcccaagcccaagatccggaaggctgcccagcatggagtatgctcagtcctcaagggcagtgaattcatgtttgaaaaggcccctgcccatcatcctgctgccatttccactgccaagttctgcatccaggagattgagaagtctggaggctccaaggaggccaccaccacgctgcacatgctgacgctgctgaaggacctgctgccctgcttcccggaaggcctggtgaagagctgcagtgagactctcctcagggtcatgaccttgagccatgtgctggtgacagcctgtgccatgcaggcctttcacagcctcttccacgccaggcctggcctgagcaccctgtcagcagagctcaacgcccagatcatcacggccctgtacgactatgttcccagtgagaatgatttacaacccctgctagcctggcttaaggtcatggagaaagcccacatcaacctggtgaggttgcagtgggacctggggctaggccacctccctcgcttttttggaactgcggtgacctgcctcctttccccacactcgcaagtgctgactgctgctacgcagagcctcaaggagatcctgaaggaatgcgtggctccccacatggctgacattggctccgtgacctcctcggcctcaggccctgcccaatctgttgccaagatgttcagggcagtggaggagggcctgacgtacaaattccatgcggcctggagctccgtgttgcagctgctgtgtgtcttcttcgaggcgtgtgggagacaggcccaccctgtgatgaggaagtgcctccagtccctgtgtgacctgcgcctctcccctcatttcccccacacggcggctcttgaccaggcagtgggggctgcggtgaccagtatgggacctgaggtggtgctgcaggctgtgcctttggaaattgatggctctgaggagactctggatttcccacggagctggctgctgcctgtcatccgagaccatgttcaggaaacgcgacttggttttttcaccacctacttcttgcccctggctaacaccctgaagagcaaagccatggacctggctcaggcaggcagcacagtggaatctaagatctacgacacactccagtggcagatgtggacactcctgcctgggttctgcacaaggcctacagatgtggccatctccttcaaagggctggcacggacgctgggcatggccatcagcgagcgtccagacctgagggtcaccgtgtgccaggccctgcgcaccctcatcaccaagggctgccaggcagaggctgaccgtgctgaagtgagtcgctttgccaagaactttctgccgatcctcttcaacctgtatgggcagcccgtggcagccggggacactccagcccctcgccgggctgtgctggaaaccatcagaacttacctcaccatcactgacactcagttggtgaacagtctcctggaaaaagccagtgagaaggtgctcgaccctgccagctctgactttaccagattgtctgtcctggacctggtcgtggccttggctccgtgtgctgacgaagctgccatcagtaagctatactccaccatccggccctacctagagagcaaggcccacggggtgcagaagaaggcctaccgagtgctggaggaggtgtgtgccagtcctcagggccccggggccctcttcgtgcagagccacctggaggacctgaagaagacactgctggactcgctgcggagcacctcctcacccgccaagaggccccgtttgaagtgcctcctacacatcgtgaggaagctctcagctgaacacaaggagttcatcactgccctcatcccagaggtgatcctgtgcaccaaggaggtgtcggtgggcgcacggaagaacgcttttgcactgctcgtggagatgggccatgctttcctaaggtttggctcgaaccaggaagaggccctgcagtgctacctcgtcctgatctaccctggcctggtgggcgcggtgaccatggtcagctgcagcatcctggccctgacccacctccttttcgagtttaaaggtctgatggggaccagtacagtggagcagctgctggagaatgtgtgcctgcttctggcctcccgcacccgtgacgtggtcaagtctgcactgggcttcatcaaggtggcagtgactgtcatggacgtggcgcacctggccaaacatgtgcagctggtgatggaagccattgggaagctttcagatgacatgcggcggcacttccgcatgaagcttcggaacctgttcaccaagttcatccgcaagtttggatttgagctggtgaaaaggctgttgcccgaggagtaccacagagtcctggtcaacatccggaaagctgaggcccgggccaagaggcaccgagccctgagccaggctgccgtggaggaggaagaagaggaggaggaggaggaggagcccgcccagggcaaaggtgacagcattgaggagattttagctgactcagaggacgaggaggacaatgaggaggaggaaagaagccgaggcaaggagcagcggaagctggcacgacagaggagccgggcatggctgaaagagggcggtggggacgagcccctcaacttcctggatcccaaggtggcccaacgagtcctggccacgcagccagggccaggccggggcaggaagaaggaccacagcttcaaggtgagcgccgatggccggctgatcataagggaggaggcagacggcaacaagatggaggaagaggaaggtgccaaaggcgaagatgaagagatggctgacccaatggaagatgtgatcatcaggaataaaaagcaccagaagctcaagcaccagaaagaggctgaggaggaggagctggagataccccctcagtaccaagctggaggctctggcattcatcgccctgtggccaagaaggctatgcctggggctgaatacaaggccaagaaagcaaaaggtgatgtgaagaagaaaggccggccggatccctatgcctacatccccctcaacagaagcaagctcaaccgcaggaagaagatgaagctgcagggacagttcaaaggcctggtgaaggctgcccggcgaggttcccaggtgggacacaaaaaccgcagaaaggatcgtcgaccctgaggcccagggcccctgggctgccctgtggtccagtctgaggccctttcagcccccaggctgccttgccaccagctccaggtgctcaagattctggcagagcctggactcaggatgacttggaactagggcttggctctcagaagtcctggattttggaaactccaaatggaatcacccttcagagacatccctggtgcctggagatgggaatgtggcctcagtgcctctgagtaggtgccatgaggcacctttgctttctgcccagagtggccatgagcaccagaacagatgatctccatttccgccagctgcctgtagccacgtggcatcctgcctgtggtctgggtgagatttactgtgaccagatgtagaataaatgtgtctcatcctgcaaaaaaaaaaaaaaaaaaaaaaaa

SEQ ID NO: 810 - DNA, 4344 bp, human
ctgccggcggcccgggcgggctggcagctagagtgggtgcgatagccgcctccgcctctgcccgcctccgccgtcgcctcctccgcccgggccgttcgctgctgcgcggggagagcgaggcggggccgccggggccgccatggagcccgactcggtgattgaggacaagaccatcgagctcatgtgttctgtgccaaggtctttgtggctaggctgcgccaacctggtagagagcatgtgcgcactgagttgcctgcagagcatgcccagtgtcagatgtctccagataagtaatggaacatcatctgtgatcgtctccagaaagaggccatcagaaggaaactatcaaaaagaaaaagacttgtgtattaaatattttgaccagtggtctgaatcagatcaagtggaatttgtggaacatcttatttcacgaatgtgtcattatcagcatggacatattaactcttacctgaagcccatgttgcagcgggactttattaccgctttaccagagcaaggcttagatcacatagcagaaaacattctttcgtacctggatgccaggtctctgtgtgcagcagagctggtatgtaaagaatggcagcgagtgatctcagaaggaatgctttggaagaagctgattgaacgaatggtacgcactgatcccctatggaaaggactttcagagagcagagggtgggatcagtacctgtttaaaaacagacccacagatggccctccaaattcattttataggtcattatacccaaagattatccaggatatagagactatagaatctaactggcggtgtggacgacacaacttgcagaggattcagtgccgctctgaaaatagtaaaggtgtctactgtttacagtacgatgatgaaaaaattatcagtggcctacgagataattctattaagatatgggataaaaccagcctggaatgtttgaaagtgttaacaggacacacaggctctgtcctctgtctgcagtatgatgagcgtgtcattgtaactggctcttcagattctacggtgagagtgtgggatgtgaacacgggtgaagttcttaacacattgatccaccacaatgaggctgtattgcacttacgcttcagcaatggactgatggtgacctgttccaaggaccgctccattgctgtgtgggacatggcttctgcgaccgacatcactttacgccgtgtcctggttggccaccgggctgccgtcaatgtagtagactttgacgacaagtacatcgtgtctgcctctggtgacaggaccatcaaagtctggagcacgagcacctgtgaatttgttcgtactctcaatgggcacaagcggggcattgcctgtctccagtacagggatcgcctggttgttagtggatcatcagataataccattaggctctgggatattgaatgtggtgcctgtttaagagtcctagagggacatgaagaattggtccgatgcatccggtttgataacaagaggattgtcagtggggcctatgatgggaaaattaaagtttgggacttgcaagctgctcttgaccctcgagccccagcaagcacattgtgtttgcgcacattggtggaacattctggacgtgtgtttcggctccagtttgatgagtttcagatcatcagcagctcccatgatgacactattttgatttgggatttcttaaatgtgcctcccagtgcccagaatgagacccgttctccctccagaacatacacttacatctctagataacagtctgcactttcacccgtttcagggttttctagtcttgaactactggctacgtggctaccaaatgcctaagggagttcgttcacagctgagttatgaagctggaattggttctagacgctgggtagatgcaaagcagcctaactcttcaagtaccgacatttctcacctctgattccggctctcctttgagaaggagaccttagcttccccggcttcaagtagaacagaagcccgtttccttccctcatcagtgaaaaaatctaatgtttcaaatgtaaattgttcatagaaaaggaacatagaatctgttttacagaagtaaatcgaccgtcaagagaagacttggcctctaatttatattgctttgcactttggtttgatattaagaaacagcattcttcttcagtgaaattttgggtgccaaacacctacccagaatgtccagggctttcattttcaaaagttagcattctccttttgaccgtccaagtcattatgaattctgacttgttgtattaggaacatgttggacagtggaaaattttctctggattgttttagtaatatttttgggattatacttcctttctgtaccaatttcttttaatttaaagaactataagtcagttatattatctaccaacaggtaatatagctctttcttttattaactgttctctgtcccccaaccatctcctgatatttggtagagtaacacctttatacgtgtgcttgcctcctaatttaaaatactgtattcgcatgtagatataatgtacataacagtttaacctcaaagttgctggagtcagggccccctgtgcttgagacactaatacagagtgtgttcgcacttagccatgggctgggctcaagaacctgatacctgggttgatgtggattacctagaacccttcctgcagtattcatacagtgtttttattttgttgttgtcattgcgtgtgtgtggtttgtgtgtgtttttaatgagaatcttgttttaaaatgtaatttctaaggtttaacaccaaaatgttttatttgttgtggagtatatattatacaatagagaggtaccttaaacattttttgttcttattctttttctcataagtactcctgagtacaagtggtcacctcccatagtattcatttggcttcgctgtcaaaaatcattattctgtgcagtcgtggccctgggaaggggaaataagaaggccctgttgacgggctgtcttggctctggaattcatgcatcctggccttgccaaggttctggcagggcctgctggtgtgttggagcctgcagggcaggtcaggctggttcagaggcccatgctgaggggtgggtgctctgaagtggagtgaagcctcaagcccatgaatgccaccccagtcatctctggtgtcagctgctgctgtggccccagcaggttctcaaagctcccaagtcctccctacgacacagcccaaatgtgtaaatggcactgttgccctgacagtgcatggaaaggacgttggcatccaattggcactccttctcccttattcaatattaggtttgatttgcccttcgccattgtttccaaagatcaaggaatgtcaataacattttaaaggaccaataaacagcctcctataaagtaaacctcttcccgtggaagcacactctactactaaagggaaggcccctgggctctgatttgtcctttgcattgagaacggtgtggggatcagtgtgtgtgtatgtgatttgtttattgagttggctttgcttttttagtttttcttttaaaaataaaatccttccttcccatgttactaaattaatttatgtttttgagaggttgagtctcaaagtgtaaacaataaacctccattcataaggtggatgttgtaagcttgatggtggttgtgaaagtgatttagctttgaccacttttcatcctacagcttcaatatcaaactggttaggaaagcccagggggaagggagggggcaggggaggaggcaattctgaatgaatgaatggattttttgttgtttttgcatgtttaatatagaagttcccctcgttccttgggagatgatggcctttgaatatgcagacaacctttgaattgtgcctactaaattatagcaggggactttggcacccaaggagttctgactttctgggattataatagtaattcccagccatactctggactttattttgctaaccataactgagcaaatgtaaattactgctatattaatgttttaaagcactgggatagtctaattctaacttgtaattaattatgtttgccaattatctgtttgaaataaatttgtgtctgaacagctattgaaactgttaaattgtacagatattattcatgacagctttgtactgtggaatgtgcttaataaaaaacaaaaaagtttgacttttgtccagtaaattgctaagtaatgtcaataaatcgagtatgggtattatgcagtgcacctaatctggcttcatgcaattgttacttcagctactgattcaaagccaatactcttaataaagtgttgcaatactc

SEQ ID NO: 811 - DNA, 5077 bp, human
ctatgctgcgagaagacgacagaagggggagcggctatgagaagggaacggggccagactcagcccgacagcgggattagagccctccagaatacccatcatatagcccctgaggtggcatggtgatgtctccatgagggaaccccttcccactcatcctgtcacgtatatcatagtgttcttgactgggccattcatctaagatgggatttaccctgtgaaacagggagaagacttatggaccccaagcatcatttcgagttgtagttgagtttttaaaagacatacatgcaaagttcctttgctttggaccctctgcattattaaagctgctgtattgctaacccagaactgctccagtgtcttgactgatcatcatggcttcagtttggaagagactgcagcgtgtgggaaaacatgcatccaagttccagtttgtggcctcctaccaggagctcatggttgagtgtacgaagaaatggcaaccagataaactggtggtagtttggaccagaagaagccgaaggaagtcttctaaggcacatagctggcaacctggaataaaaaatccctatcgtggtgttgttgtgtggcctgttcctgaaaacattgaaatcactgtaacactttttaaggatcctcatgcggaagaatttgaagacaaagagtggacatttgtcatagaaaatgaatccccttctggtcgaaggagagctcttgctactagcagcatcaatatgaaacagtatgcaagccctatgccaactcagactgatgtcaagttaaaattcaagccattatctaaaaaagttgtatctgccgctcttcagttttcattatcttgcatttttctgagggaaggaaaagccacagatgaagacatgcaaagtttggctagtttgatgagtatgaagcaggctgacattggcaatttagatgacttcgaagaagataatgaagatgatgatgagaacagagtgaaccaagaagaaaaggcagctaaaattacaggaattgtaaaccagttgaatgctctgagcagcttagatgaagatcaagatgactgcataaagcaagcaaatatgcgttcagctaaatcagccagttcctctgaagagcttatcaacaaacttaactttttggttgaagcagaaaaggacttggccaccgtgaattcaaatccatttgatgatcctgatgctgcagaattaaatccatttggagatcctgactcagaagaacctatcactgaaacagcttcacctagaaaaacagaagactctttttataataacagctataatccctttaaagaggtgcagactccacagtatttgaacccattcgatgagccagaagcatttgtgaccataaaggattctcctccccagtctacaaaaggaaaaaatataagacctgtggatatgagcaagtacctctatgctgatagttctaaaactgaagaagaagaattggatgaatcaaatcctttttatgaacctaaatcaactcctcctccaaataatttggtaaatcctgttcaagaactagaaactgaaaggcgagtgaaaagaaaggccccggctccaccagtcctctcaccaaaaacaggagtattaaatgaaaacacagtttctgcaggaaaagatctctctacttctcctaagccaagccctataccaagtcctgttttggggcgaaagccaaatgctagtcagtctttgcttgtatggtgtaaagaagttacaaagaactaccgaggagtaaaaatcaccaattttactacatcgtggagaaatggtttatctttttgtgcaatattacaccactttagaccagatttaattgactacaagtctctgaatcctcaagatattaaagagaacaacaaaaaggcatacgatggatttgccagcataggaatttcccgattattggaaccttctgatatggtattattagcaattcctgataaactgactgttatgacttatctctatcaaataagggcacatttcagtggccaagaactaaatgtcgttcagatagaggaaaacagcagtaaaagcacatataaagttggaaactatgaaacagatacaaacagttctgttgatcaagaaaaattctatgcagagcttagtgatctgaagcgggagcctgaactacaacagcctatcagcggagcagtagacttcttatcacaggatgactctgtatttgtaaatgatagcggggttggagagtcagaaagtgagcatcaaactcctgatgatcaccttagtccaagcacagcctccccttactgtcgcaggactaaaagtgacacagaaccccagaagtctcagcagagctctggaaggacttcaggatctgatgaccctggaatatgttccaatacagattcaacccaagcacaggttttgttaggcaaaaagagactattgaaagctgagactttagaattgagtgacttatatgttagtgataagaagaaggatatgtctccaccctttatttgtgaggagacagatgaacaaaagcttcaaactctagacatcggtagtaacttggagaaagaaaaattagagaattccagatccttagaatgcagatcagatccagaatctcctatcaaaaaaacaagtttatctcctacttctaaacttggatactcatatagtagagatctagaccttgctaagaaaaaacatgcttccctgaggcagacggagtctgatccagatgctgatagaaccactttaaatcatgcagatcattcatcaaaaatagtccagcatcgattgttatctagacaagaagaacttaaggaaagagcaagagttctgcttgagcaagcaagaagagatgcagccttaaaggcggggaataagcacaataccaacacagccaccccattctgcaacaggcagctaagtgatcagcaagatgaagagcgacgtcggcagctgagagagagagctcgtcagctaatagcagaagctcgatctggagtgaagatgtcagaacttcccagctatggtgaaatggctgcagaaaagttgaaagaaaggtcaaaggcatctggagatgaaaatgataatattgagatagatactaacgaggagatccctgaaggctttgttgtaggaggtggagatgaacttactaacttagaaaatgaccttgatactcccgaacaaaacagtaagttggtggacttgaagctgaagaagctcctagaagttcagccacaggtggcaaattcaccctccagtgctgcccagaaagctgtaactgagagctcagagcaggacatgaaaagtggcacagaagatctccggactgaacgattacaaaaaacaacagaacgttttagaaatcctgttgtgttcagcaaagattctacagtcagaaaaactcaacttcagtctttcagccaatatattgagaatagaccagagatgaaaaggcagagatcaatacaggaagatacaaagaaaggaaatgaggagaaggcagcgataactgaaactcagaggaagccatcagaagatgaagtgcttaataaagggttcaaagacaccagtcagtatgtagtaggagaattggcagcactagagaatgagcaaaagcaaattgacacccgtgccgcgctggtggagaagcgccttcgctatctcatggacacaggaaggaacacagaagaagaagaagctatgatgcaggaatggtttatgttagttaataagaaaaatgccttaataaggagaatgaatcagctctctcttctggaaaaagaacatgatttagaacgacggtatgagctgctgaaccgggaattgagggcaatgctagccattgaagactggcagaagaccgaggcccagaagcgacgcgaacagcttctgctagatgagctggtggccctggtgaacaagcgcgatgcgctcgtcagggacctggacgcgcaggagaagcaggccgaagaagaagatgagcatttggagcgaactctggagcaaaacaaaggcaagatggccaagaaagaggagaaatgtgttcttcagtagccatcagatcagaaagaatctctcccaacattttagagtcttgcttcccaaaccagaaaaagtcagactcattgttgatttaaaacttttaacattttgtttggctggattgtactactttacctctactttaccaccaccacccttttcctccctcctttccaaataatatacagaactccaaaatagcttcatttaaggatttttttgtgagttaacaatttccttgaaatcctgtgagatagatttgcacagacaccttgtgagtgattggtattggaggtgttcaagaaactgttcgaaaaagaacaaaaacacttccctcgttattttctctcattttttgatgagaggaaaatttgaaacattattcttgttgttgttggtaatagcataatgacagtgggaggggtacaaggggataagaaaaatgtcatgatttttttccggtcctgccacatgtaacacttactctgttacctaaattttatagttagatcatatccaatctacttattaaactgtgttctatttaccagtggagattttctgcagtggttgcgtttcactgtaaggataatggagttcctctcctctgctttcctcagaggatggtcctttaacatagccagaaacaagccctgtggtttgaaggtgagctgtgaggatgggactaattgatatgcaccagtttacaaagacagtcttaacatccgagaatacaccatctttttctctggataattatttcttacatcatgcttgattcctacattttgttgggtctcaacattggctcacgaatgctgttaatatttattctgtattgataaaaagtcagtcttgccactacaagtaaatcccccatttaatattttcttctttagcatagcactgtcattttttgtgaaaatggttatgtttatttattacaatactgagtcatatataaattttcaataaaagcagaaactttcttaccttaaaaaaaaaaaaaaaaaaaa

SEQ ID NO: 812 - DNA, 9609 bp, human
gacccgggcggcggcggcggtcgaggagctcccatggcagggacgaggcggagggaaggcgaaaggggggcgaggagttaagccagagcctccgcggggcgggtttccgagggaggcacagagggaaacggctctcgcagcccgaggagggtcaggcgcggagcttgtcgcacctcccgcgcattctgtccagcccgggctccggagatgcatctgcatcaggtcctcaccggagctgtcaaccctggagacaactgctactccgtgggcagcgtcggggatgtccccttcacggcatatggatcaggctgtgatattgttattttggcaaatgactttgaatgtgtacagatcattcctggtgctaagcatggaaacatccaagtcagctgtgtggagtgttctaaccaacaaggaagaattgcagcttcatatggtaatgctgtttgtatatttgagcccttgggcataaattctcataaaagaaattgtcaactcaagtgccagtggcttaaaactgggcagttttttttgagttctgtgacatacaacttagcatgggatcctcaagataatagattgttgacaacaactgattctattcagttgtgggctcctccaggagatgatattctggaagaggaggaagaaattgataatacagttcctcctgttttaaatgattggaagtgtgtctggcagtgcaaaacctcagtatctgtacatttgatggaatggtctcctgatggtgaatattttgctactgctggaaaggatgattgtcttttgaaagtgtggtatcctatgactggttggaagtcttcaattatacctcaggatcatcatgaagtaaaaaggagacagtcctctactcaattttcttttgtttacttggcacatccccgagctgtgacaggtttttcgtggcgcaaaactagcaagtatatgcccaggggttctgtctgtaatgtgttgttaacttcatgtcatgatggtgtgtgccggctctgggcagaaactttattaccagaagactgtcttttgggtgagcagatttgtgagactaccacttccagcattgccagcagcctttctcatgctggaagacacaaagacagaatacagcatgctcttgagacaatacaccatttgaaaaatttaaggaaaggacagaggaggtcatctgttcttgtaactcatgctgaattaatgcccgaccagacagcaatgcatgaagttcaaagacacatttcccaccatgcaaatgcactctgtcattttcatattgcagcaagcatcaaccctgccacagatattccaaatgtcttggttggcactgcatttaatgttgatgatggaaatgggggctttgtagttcattggttaaacaacaaggaatttcattttacatcatctacagaagtatttatgcatcaattacgaaaactttctgataagcaggtagatcatgaaaatgatgatgcagatagagaagatgaggaacattcacaggaggatagagaacggggtttacatatgaaattagaccatgatttatccctggatagagaatctgaggcaggtacaggatcatcagaacatgaagatggagaaagagaaggaagtcctagaacttactcacgacttagtgtaccaatgccactgcctacggttctgcttgatcggaagattgaaacgctgctaactgaatggaataagaatcctgatatgctttttacaatacaccctgtagatggtacctttctagtgtggcatgtgaagtatttggatgaatataatcctggaatatttagacaagttcaggtttctttttcttctcggattcctgttgcatttccctctggtgatgcaagctctcttagtaaaaatatcatgatgtatgcctgtataaatgcgacaaaagattctcaccacacgctgttacaccaggaggggatgtctgtaggcagtcctcacggatcacagccacactctagatcccacagtacacatatgaacatcttagctcccacagtaatgatgatctctaaacacatagatggttctttaaatcagtgggcagtcacttttgctgataagtctgcctttaccactgttctaactgtatctcacaaatttagatattgcggtcatcgatttcacctcaatgacctggcatgtcattcagttttaccactgttattgacatcctctcatcataatgctctattgactcctgaattagattgtcagtgggactcagacaataaattaagtagattaatggaccctgtaaaacatataaaaggttcctcgaaacaacctcttagaaatgcagcaactcgtacatttcatgacccaaatgcaatctacagtgaacttattctgtggcgtgtagacccaataggacctttgtcatacactggaggagtatcagaattggctcgaattaactctttacatacctcagcgttctctaatgtggcttggcttccaactctcattcccagttactgtctaggcacatactgcaattctgcaagtgcttgctttgttgcttctgatggcaaaaatctgagactctatcaagctgtagtggatgcaaggaaattattagatgaattgtcagacccagaatcttcaaaacttattggagaagtgtttaatattgtgagccaacagtctactgctcgacctggctgcattattgaactcgacgcaataaccaaccaatgtggctcaaatacacagttgcttcatgtgtttcaagaagacttcattataggatataaaccacataaggaagatatggagaaaaaggaaacagaaatattttttcagccatcacaaggataccgcccaccaccattttcagaaaagttctttctagtagtaattgagaaggacagcaataataactctattctgcatatgtggcaccttcatcttaaatctgtacaagcatgtttagctaaagcttcagaaggggcttcctctgagagtctactttcagtccctggacagaagaacgtagattcttctccagaaacctctcctagtgtgagccccatgccacattcttcatcaattgccaatcttcaaactgccagtaaacttattctgagttttagactggtgtatagccaaccccttgatctcccagaatcagttgaagtaataagagcaacgccttcagcaggccatctgagttcttcttcaatttatccagtgtgccttgcaccttatttagtggttacaacttgttctgacaataaagtacgcttctggaaatgttgtatggaagccaacccagagtgtaataaaagtgatgagaaagaaatttatcattggaagagatggcctttgatgaatgatgaaggagaagataatagcagtacagtgagcattgtgggaagaccagttgctgttagctgttcatacacaggtcgccttgcagtggcttataagcagcctatccaccataatggttttgtttctaaagaattttccatgcatgtttgtatatttgaatgtgaatctacaggaggatcagagtgggttttagaacaaacaattcatcttgatgatttggttaaggttgggagtgtacttgattcaagggtcagcgtcgacagtaatctgtttgtgtatagcaagtcagatgcactcttgagcaaggatagatatcttattccgaatatcaaacatttagtacatttggactgggtatcaaaagaagatggctcccacattcttacagtgggagtcggtgcgaatatcttcatgtatggaaggctttcaggaattgtgactgagcaaaccaacagtaaggatggagtagctgtcatcactttaccactaggtggtagtatcaagcaaggagttaagtcaagatgggttcttcttagatctatagacttggtatcttctgttgatggtactccttcactgcctgtttctctctcttgggtaagagatgggatattggtggtaggaatggattgtgaaatgcatgtatatgcacagtggaagcatgctgtcaaatttggagacactgaagctgatagttctaatgcagaagaggcagcaatgcaagatcattcgacctttaaatctaatatgctggcaagaaaaagtgttgttgaaggaacagctatttctgatgatgttttttgttcaccaactgtaattcaagatggtggcttatttgaggctgcacatgtactttcccctactcttccacaatatcatccaactcagctgttagaattgatggatttagggaaagtgcgaagggctaaagccattctctctcatttagtaaaatgtattgcaggtgaagtagcaatagttagagatcctgatgctggagaaggaactaagcgacatctctctcgaactattagtgtaagtggcagtacagcaaaggaaacagtcaccgtaggaaaagatggtactcgagattatactgagatagattctatccctccactaccactatatgcattacttgctgcagatcaagatacatcctacagaatttcagaagaaagtacaaagataccacagagctatgaagatcagacagtaagtcaaccagaggatcagtattcagagctgtttcaaatccaggatataccaacggatgatattgatttagagcctgaaaagagagaaaacaaatcaaaagtaataaatctttctcaatatggaccagcttactttggccaagaacatgcaagggtactttcaagtcatcttatgcactcaagtctaccaggccttacccgtttggagcagatgttccttgtagctttggctgatacagtggctactactagtactgagcttgatgaaagcagagataagagttgctcaggaagagatacattagatgagtgtggtttgagatacttgttagctatgcgcctacacacatgccttttgacatcgctgcctcctttataccgagtgcagctacttcatcaaggtgtctctacatgccattttgcctgggcttttcattctgaggctgaagaagaactgattaatatgattccagcaattcagagaggggacccccagtggtctgaattaagagctatgggcataggatggtgggtgaggaacattaacacgcttcgaagatgcattgaaaaggttgccaaagcttcttttcaaaggaacaatgatgccttagatgctgcactattctacctttcaatgaagaagaaagcagtagtgtggggtctgtttaggtcacagcatgatgaaaaaatgacaacatttttcagccacaactttaatgaagatagatggcgaaaagctgctttgaaaaatgctttttccttacttggaaaacaacgctttgaacaatcggctgcttttttcttgctagctggttcattgaaagatgccatagaggtatgtcttgaaaaaatggaagatattcagctagccatggttattgcccgtttatatgaatctgaatttgagacttcatccacttatatatccatcctaaatcagaagattttgggttgccaaaaggatggctcaggattcagttgcaaaagattacatcctgatcctttcctgcgtagtcttgcctattgggtaatgaaagattacacccgagccttggacacattactggaacaaacaccaaaggaggatgatgaacatcaagttatcatcaagtcttgtaacccggtggcatttagtttttataactaccttcgaactcatcctttgctcattcgaagaaatcttgcctcccctgaaggaactttggcaaccttaggtctcaaaactgagaagaactttgttgataaaattaacctcatagaaagaaaattattctttaccactgcaaatgctcattttaaagttggatgccctgttttagccttggaggtactctccaaaattccaaaagtaaccaaaacatctgccttatctgcaaaaaaagatcagcctgacttcatttctcacaggatggatgatgtaccttcacattcaaaagctctgagtgatggcaatggaagttctggcattgaatggtcaaatgtaacttcatcacagtatgactggagtcagccaatagtaaaagttgatgaggaacctcttaatcttgattggggtgaagatcacgacagtgccttagatgaagaggaagacgatgctgttggtttagtgatgaaaagtacagatgccagggaaaaagataaacaatcagatcagaaggcctcagaccctaacatgttattaacacctcaggaagaggatgatcctgaaggtgatactgaagttgatgtgattgctgaacaactaaaattcagagcttgtttaaagatccttatgactgaattaagaacattggctacaggttatgaagtagatggaggaaaactcagatttcaactctataactggcttgaaaaggaaattgctgccttgcatgagatatgtaatcatgaatcagttattaaagagtattccagtaagacatattccaaagtagagagtgatctgctggatcaggaagaaatggtagacaaaccagatattggttcctatgagcgccatcaaatagaaagaagaagattgcaggccaaacgagagcatgcagaaagacgaaagtcgtggttgcagaaaaaccaagatctcctgagagtatttctcagctactgtagccttcatggggcccaaggtggtggtttggcttcagtaaggatggaactcaaatttttgctacaagaatcacaacaggaaactacagtaaagcagctccagtctccactaccactgcctaccaccctacctctgctttcagcaagtattgcgtcaacaaaaacagtcatagctaatcctgtattgtacttaaataatcacatccatgatatactttatactattgttcagatgaaaacaccacctcatcccagtattgaagatgtgaaggtgcacacacttcattcactagcagcatcactttctgcatcaatttaccaagcattatgtgacagtcatagctacagtcaaacagaaggaaatcagtttacaggaatggcttatcaaggacttcttttaagtgatcgtagaagactaaggacagaaagcattgaagaacacgcaacaccaaattcatctcctgctcaatggcctggtgtgagctcacttattaatcttttgagttcagcccaagatgaagaccagccaaaactgaacattttgctatgtgaagctgttgttgctgtttacttaagtttattgatacatgctcttgccacaaattcctccagtgaattatttcggcttgcagcccacccattaaataatcgaatgtgggctgctgtttttggaggcggtgtaaaacttgttgtgaaacctcgaagacaatcagaaaatatttcagcacctcctgtcctttctgaagacatagataaacaccgtaggagatttaacatgagaatgctcgtccctggaaggcctgtaaaagatgctaccccaccaccggtgcctgcagaaagaccatcttacaaagaaaaatttattcctcccgaacttagtatgtgggattattttgttgcaaagccatttcttcctttgtctgatagtggtgttatatatgattctgatgaaagcattcatagtgatgaagaagatgatgcctttttttcagatacacaaatacaggagcaccaagatccaaattcctatagctgggctcttctacatttgacaatggttaaactagcacttcacaatgtcaagaatttctttcctattgctggactggaattctctgagctgcctgtaacatcaccattaggtattgctgtgattaaaaacttggagaactgggaacagatcttgcaagagaaaatggatcagtttgaaggtccaccccctaactatatcaacacatatccaactgacctttcagtgggagctggaccagctattcttcgaaataaagcaatgctagaacctgaaaataccccattcaagtcccgggattcttctgcatttccagtcaaacgactttggcatttccttgttaaacaagaggtccttcaagagacatttattagatatattttcactaagaaaagaaagcagagtgaggttgaagctgatctgggctatccaggtggaaaggcgaaagtcatccataaggaatctgatatgatcatggcattttctgttaataaggcaaattgtaatgaaattgttttggcttcaacacatgatgttcaagaacttgatgttacttctctactggcctgtcagtcatacatatggatcggagaagaatatgacagagaatccaaaagttcagatgatgttgattatcgtggttccactacaactctttatcaacccagtgcaacatcctattcagcaagtcaggtgcatccaccttcatctctgccatggctgggcactggacagactagcactggagctagtgtgcttatgaaaaggaatctacataatgttaagagaatgacttcacacccagtccatcaatactatcttacaggtgctcaggacggcagtgtacgaatgtttgaatggacgcggcctcagcaacttgtctgctttcgtcaagctggcaatgcaagagttactagattatattttaattcacaaggcaacaagtgtggtgttgcggatggagagggttttctgagtatctggcaagttaaccaaactgcatcaaatcctaaaccttatatgagttggcagtgccacagtaaagccacaagtgactttgcatttattacctcttcaagtctagttgccacatctggacactccaatgacaatagaaatgtttgcctctgggacacattaatatcacccggaaacagcctcattcatggtttcacgtgccacgatcatggtgccacggtactgcagtatgcacccaaacagcaactcctaatctcggggggtaggaaaggacacgtctgcatttttgacatcaggcaaaggcagctcattcacacgttccaggcccatgactcagctattaaggctctggccttggatccctatgaggaatattttaccacaggttcagcagaaggtaacataaaggtttggagattgacaggccatggcctaattcattcatttaaaagtgaatatgctaagcagtccatatttcgaaacattggggctggagtcatgcagattgacatcatccagggcaatcggctcttctcctgtggtgcagatggcacgctgaaaaccagggttttgcccaatgcttttaacatccctaacagaattcttgacattctataaagattggggttttatttttatatacatttcagttaaaaggcacactacagtcatcactaggcaattctgctttctaagcagttgtattgaaaacagagaatctctgtgtagatttgaatatgacccaagctgagtattatctaaacaggttggtggaatgaatgcgcatgtaccttattatgctgacatactaaaaaaaataaaacctagtattgtatgaaggatagctattctttacagcatttagcaaacctgattcagaaaacatttgagattagcaaattagtaact

SEQ ID NO: 813 - DNA, 4871 bp, human
ccgcagggtagggtgcgggaccggggggacctggaggcagaggggagaaccggccgtccgcgccgcagcacagccgctgggagcgcctcagaccccgcgcggggcgccggctccatggcgaccgggctcggggagccggtctatggactttccgaagacgagggagagtcccgtattctcagagtaaaagttgtttctggaattgatctcgccaaaaaggacatctttggagccagtgatccgtatgtgaaactttcattgtacgtagcggatgagaatagagaacttgctttggtccagacaaaaacaattaaaaagacactgaacccaaaatggaatgaagaattttatttcagggtaaacccatctaatcacagactcctatttgaagtatttgacgaaaatagactgacacgagacgacttcctgggccaggtggacgtgccccttagtcaccttccgacagaagatccaaccatggagcgaccctatacatttaaggactttctcctcagaccaagaagtcataagtctcgagttaagggatttttgcgattgaaaatggcctatatgccaaaaaatggaggtcaagatgaagaaaacagtgaccagagggatgacatggagcatggatgggaagttgttgactcaaatgactcggcttctcagcaccaagaggaacttcctcctcctcctctgcctcccgggtgggaagaaaaagtggacaatttaggccgaacttactatgtcaaccacaacaaccggaccactcagtggcacagaccaagcctgatggacgtgtcctcggagtcggacaataacatcagacagatcaaccaggaggcagcacaccggcgcttccgctcccgcaggcacatcagcgaagacttggagcccgagccctcggagggcggggatgtccccgagccttgggagaccatttcagaggaagtgaatatcgctggagactctctcggtctggctctgcccccaccaccggcctccccaggatctcggaccagccctcaggagctgtcagaggaactaagcagaaggcttcagatcactccagactccaatggggaacagttcagctctttgattcaaagagaaccctcctcaaggttgaggtcatgcagtgtcaccgacgcagttgcagaacagggccatctaccaccgccatcagtggcctatgtacataccacgccgggtctgccttcaggctgggaagaaagaaaagatgctaaggggcgcacatactatgtcaatcataacaatcgaaccacaacttggactcgacctatcatgcagcttgcagaagatggtgcgtccggatcagccacaaacagtaacaaccatctaatcgagcctcagatccgccggcctcgtagcctcagctcgccaacagtaactttatctgccccgctggagggtgccaaggactcacccgtacgtcgggctgtgaaagacaccctttccaacccacagtccccacagccatcaccttacaactcccccaaaccacaacacaaagtcacacagagcttcttgccacccggctgggaaatgaggatagcgccaaacggccggcccttcttcattgatcataacacaaagactacaacctgggaagatccacgtttgaaatttccagtacatatgcggtcaaagacatctttaaaccccaatgaccttggcccccttcctcctggctgggaagaaagaattcacttggatggccgaacgttttatattgatcataatagcaaaattactcagtgggaagacccaagactgcagaacccagctattactggtccggctgtcccttactccagagaatttaagcagaaatatgactacttcaggaagaaattaaagaaacctgctgatatccccaataggtttgaaatgaaacttcacagaaataacatatttgaagagtcctatcggagaattatgtccgtgaaaagaccagatgtcctaaaagctagactgtggattgagtttgaatcagagaaaggtcttgactatgggggtgtggccagagaatggttcttcttactgtccaaagagatgttcaacccctactacggcctctttgagtactctgccacggacaactacacccttcagatcaaccctaattcaggcctctgtaatgaggatcatttgtcctacttcacttttattggaagagttgctggtctggccgtatttcatgggaagctcttagatggtttcttcattagaccattttacaagatgatgttgggaaagcagataaccctgaatgacatggaatctgtggatagtgaatattacaactctttgaaatggatcctggagaatgaccctactgagctggacctcatgttctgcatagacgaagaaaactttggacagacatatcaagtggatttgaagcccaatgggtcagaaataatggtcacaaatgaaaacaaaagggaatatatcgacttagtcatccagtggagatttgtgaacagggtccagaagcagatgaacgccttcttggagggattcacagaactacttcctattgatttgattaaaatttttgacgaaaatgagctggagttgctcatgtgcggcctcggtgatgtggatgtgaatgactggagacagcattctatttacaagaacggctactgcccaaaccaccccgtcattcagtggttctggaaggctgtgctactcatggacgccgaaaagcgtatccggttactgcagtttgtcacagggacatcgcgagtacctatgaatggatttgccgaactttatggttccaatggtcctcagctgtttacaatagagcaatggggcagtcctgagaaactgcccagagctcacacatgctttaatcgccttgacttacctccatatgaaacctttgaagatttacgagagaaacttctcatggccgtggaaaatgctcaaggatttgaaggggtggattaagcaccctgtgcctcgggggtggttgttcttcaagcaagttctgcttgcacttttgcatttgcctaacagacttttgcagaggcgatggcagagagcagctgcaggcatggtccctggagccgagccttcaccacgcactcgtccaagttcggatgcgggaacctggtcccagcttgagttcctgcctttcccaccacaaattatcaactggttgatgtgtacactaattacatttcaggaggacttaatgctatttatgttgtgcctctgcaggcaaagcccttaataaatattttacatcctttctaatgacaatgaatggaattaatcactcaacaggtatagtattacgactcatgtttactttttaaaatgatttagaccgattttcagattttatttcgttatgattaaagatgtctcatgtacttggaaaagtgagcatttttttttttttttgtatttcactttcataccaggcttaatgtcaatgacatttttatttttgaagtactctgacacctccaccctctactttattagaattggaaggcaaatttttgtccaaaaacctacagacaagtactttgagagaatttccaatataatattagacataatgataattttttccatactcagaatgaaaaactggatattacgtttttgttttggggtttttttgtacaaatttagctaatagctacaggctgagagaattgtaacatagcatgacaaattttgtgttgacttgaaaggaatcacaccattattccttagaagtaattacatgtgttctaacacatttgagacagggttggactcccatttctcatccgagaaattacttaacccttcctggcgctgtacagtcatcttttattctatttcctctttgctgtttgtagtagagacattttgaatgaaacttggcactgcttgattcaaaactgtggaaaccagatctgtttagtctcctgtttgtatgcgtttgctaatggtagctaaataaccagtttttgttgtaaatgcaccaattctgaaggcactttatgtactacatggaggtcatatctggttttgtttttatttttttatcatgaacattaaatgtgatgatgatttcttttccctgcacacatctttccggtgcaatatctatcaattgtgaatctggctgctggtgtataaaaacctggatgtaaagctgagcctacagacctgtcctcaccaactgttttgtgatttctactcaactacaaagatttatttaatgtactcttaatctaactgagttttgttaccaatgacctgttgcatgcttcaataccgtgtactgcctgagttgtgcctcttgtgtgctagattaaaagtgagacagagacttgacttgatcctctgagctcaagctattgagctggtagtggcagaggactgagggtacctgcacagtttgattcttttccacgtgtaagtctccattgcagaattgtcgtgctttgagaaaacacctgaggcagtgtgggagttgaacgaccctgctgtcctttttaacctgtgttgtcctagaccctgtcggggcagtcaggggacactagagatttgatctcatgcgagtcatcaataggacaaaaaagttgtggtttggggaggtctgtttgttacataaaaaggacctttcggtgtaagaaattgccgtttttaccctgccctggctggcatgtgagaagccatggaaggttgtggttgtaaatgagttgtctaaaggggtgcagaggcctgaggtttctaaaagaaggtagatttctacagagctgagtgttggttcctttttcttattggttgaaaattacctggtagtgatcagaaaacttagatgctatgtaact

SEQ ID NO: 814 - DNA, 4578 bp, human
agcgggtcgtgggcagccgcctcacagcgatggcggccgagcagggccggtggcggcggcggctgcggctacggccggagacggcagtgttggcggtagtggtgggtggcaggggcctgtgaccgggagctgcccccggacccgggcaccatgagccaaggcccccccacaggggagagcagcgagcccgaagcaaaagtcctccacactaagcggctttaccgggctgtggtggaggctgtgcatcgacttgacctcatcctttgcaacaaaactgcttatcaagaagtattcaaaccagaaaacattagcctgaggaacaagctgcgtgagctctgcgtcaagcttatgttcctgcacccagtggactatgggagaaaggctgaggagctgctgtggagaaaggtatactatgaagttatccagcttatcaagactaacaaaaagcacatccacagccggagcactttggaatgtgcctacaggacgcacctggttgctggtattggcttctaccagcatctccttctctatatccagtcccactaccagctggaactgcagtgctgcatcgactggacccatgtcactgaccccctcataggatgcaagaagccagtgtctgcctcagggaaggagatggattgggcacagatggcatgtcaccgatgtctggtgtatctgggggatttgtcccgatatcagaatgaattagctggcgtagataccgagctgctagccgagagattttactaccaagccctgtcagtagctcctcagattggaatgcccttcaatcagctgggcaccctggcaggcagcaagtactataatgtggaagccatgtattgctacctgcgctgcatccagtcagaagtgtcctttgagggagcctatgggaacctcaagcggctgtatgacaaggcagccaaaatgtaccaccaactgaagaagtgtgagactcggaaactgtctcctggcaaaaagcgatgtaaagacattaaaaggttgctagtgaactttatgtatctgcaaagcctcctacagcccaaaagcagctccgtggactcagagctgacctcactttgccagtcagtcctggaggacttcaacctctgcctcttctacctgccctcctcacccaacctcagcctggccagtgaggatgaggaggagtatgagagtggatatgctttcctcccggaccttctcatctttcaaatggtcatcatctgccttatgtgtgtgcacagcttggagagagcaggatccaagcagtacagtgcagccattgccttcaccctggccctcttttcccacctcgtcaatcatgtcaacatacggctgcaggctgagctggaagagggcgagaatcccgtcccggcattccagagtgatggcacagatgaaccagagtccaaggaacctgtggagaaagaggaggagccagatcctgagcctcctcctgtaacaccccaagtgggtgagggcagaaagagccgtaagttctctcgcctctcctgtctccgccgtcgccgccacccacccaaagttggtgatgacagtgacctgagtgaaggctttgaatcggactcaagccatgactcagcccgggccagtgagggctcagacagtggctctgacaagagtcttgaaggtgggggaacggcctttgatgctgaaacagactcggaaatgaatagccaggagtcccgatcagacttggaagatatggaggaagaggaggggacacggtcaccaaccctggagccccctcggggcagatcagaggctcccgattccctcaatggcccactgggccccagtgaggctagcattgccagcaatctacaagccatgtccacccagatgttccagactaagcgctgcttccgactggcccccacctttagcaacctgctcctccagcccaccaccaaccctcatacctcggccagccacaggccttgcgtcaatggggatgtagacaagccttcagagccagcctctgaggagggctctgagtcggaggggagtgagtccagtggacgctcctgtcggaatgagcgcagcatccaggagaagcttcaggtcctgatggccgaaggtctgcttcctgctgtgaaagtcttcctggactggcttcggaccaaccccgacctcatcatcgtgtgtgcgcagagctctcaaagtctgtggaaccgcctgtctgtgttgctgaatctgttgcctgctgctggtgaactccaggagtctggcctggccttgtgtcctgaggtccaagatcttcttgaaggttgtgaactgcctgacctcccctctagccttctgctcccagaggacatggctcttcgtaacctgcccccgctccgagctgcccacagacgctttaactttgacacggatcggcccctgctcagcaccttagaggagtcagtggtgcgcatctgctgcatccgcagctttggtcatttcatcgcccgcctgcaaggcagcatcctgcagttcaacccagaggttggcatcttcgtcagcattgcccagtctgagcaggagagcctgctgcagcaggcccaggcacagttccgaatggcacaggaggaagctcgtcggaacaggctcatgagagacatggctcagctacgacttcagctcgaagtgtctcagctggagggcagcctgcagcagcccaaggcccagtcagccatgtctccctacctcgtccctgacacccaggccctctgccaccatctccctgtcatccgccaactggccaccagtggccgcttcattgtcatcatcccaaggacagtgatcgatggcctggatttgctgaagaaggaacacccaggggcccgggatgggattcggtacctggaggcagagtttaaaaaaggaaacaggtacattcgctgccagaaagaggtgggaaagagctttgagcggcataagctgaagaggcaggatgcagatgcctggactctctataagatcctagacagctgcaaacagctgactctggcccagggggcaggtgaggaggatccgagtggcatggtgaccatcatcacaggccttccactggacaaccccagcgtgctttcaggccccatgcaggcagccctgcaggccgctgcccacgccagtgtggacatcaaggatgttctggacttctacaagcagtggaaggaaattggttgatactgacccccaggccctgcagtggggctgactccagatctctcctgccctccctggcagccaggaccagcacctgtagtcaccccaccacacgcagactcatgcacgcacacaggagggaggcctagctgctcagaggctgcagggagggcccaggagccggctgggagggtggggtccctttgttgccaagacgttaggaaagcgaggaaagtgcttggattaggagagtcttgtgggcccctggccagccttcctgcctcagctcccctgctgtctccaggggcaggtggtaggcatgggtacctgcatttcactggaatgggttcttggatctctgaggggaaggaacagcaaaagaggcccttcttcctcacccaagatgcagggtggttggggccaggagtttggaccctctaggtcttgggggaagagctgggtaatacctggtgtctgagtgattctctgcagacccttcccctcctcaaggatcacccatcctcctttcagccccctttatggggaccaggcagctctggagccagccacaggggctgttagagaagcaaggcctggagtggcctgcaccgagtagcagggtcagggttcgtgtgctcctcctcctgctgcaggggctgcacatcccattgccccacttctgctttgtgtctccctctgtctagcttccagggcagggagcaggccccacctagggctgcaggcagtctggcctgtgccagcacggtctcctgtgcccaccagccccacaggtgctgtgctttgtgctcttggctgctgtgctgggacagaatgggatgccaggaagagaagaaagggggtgcagtctgaggccaccaccccccttcctatctaagggagggctgaagacaaggggccggcattcagtgggcagcagaaaggagaggctccttgaagctgctcagtcagaggcccccgtccctccttttgccttccgcaggactgaagacctgaaggggctggcttttggagtgttgaggtgaatatctgggagcagagatcatgaatagctcagggcagtgaatggcgcaccaagagcagggctgtgtgtgggaggctgcagccaggattgcctcagctcctccccctcaggctgggaggatagcacaggctaggggctcggggtggagggtctcagctctgctgcccccaccccagtactagcctagcttcccaagctgtggcttagaggatagttggcttcctgcctctctcctctaaaatagcaagtctgggaaatcctggggtgagtggagtcaccccactcccagttgctggcagagactgagactaaagcatcacttaataaaccccccaagcccaaaaaaaaaaaaaaaa

SEQ ID NO: 815 - DNA, 1850 bp, human
cgcgctcgcagctcgcaggcgccgcgtagccgtcgccaccgccgccagcccgtgcgccctcggcgcgtacccgccgcgctcccatccccgccgccggccaggggcgcgctcggccgccccggacagtgtcccgctgcggctccgcggcgatggccaccaagatcgacaaagaggcttgccgggcggcgtacaacctggtgcgcgacgacggctcggccgtcatctgggtgacttttaaatatgacggctccaccatcgtccccggcgagcagggagcggagtaccagcacttcatccagcagtgcacagatgacgtccggttgtttgccttcgtgcgcttcaccaccggggatgccatgagcaagaggtccaagtttgccctcatcacgtggatcggtgagaacgtcagcgggctgcagcgcgccaaaaccgggacggacaagaccctggtgaaggaggtcgtacagaatttcgctaaggagtttgtgatcagtgatcggaaggagctggaggaagatttcatcaagagcgagctgaagaaggcggggggagccaattacgacgcccagacggagtaaccccagcccccgccacaccaccccttgccaaagtcatctgcctgctccccgggggagaggaccgccggcctcagctactagcccaccagcccaccagggagaaaagaagccatgagaggcagcgcccgccaccctgtgtccacagcccccaccttcccgcttcccttagaaccctgccgtgtcctatctcatgacgctcatggaacctctttctttgatcttctttttcttttctccccctcttttttgttctaaagaaaagtcattttgatgcaaggtcctgcctgccatcagatccgaggtgcctcctgcagtgaccccttttcctggcatttctcttccacgcgacgaggtctgcctagtgagatctgcatgacctcacgttgctttccagagcccgggcctattttgccatctcagttttcctggaccctgcttcctgtgtaccactgaggggcagctgggccaggagctgtgcccggtgcctgcagccttcataagcacacacgtccattccctactaaggcccagacctcctggtatctgccccgggctccctcatcccacctccatccggagttgcctaagatgcatgtccagcataggcaggattgctcggtggtgagaaggttaggtccggctcagactgaataagaagagataaaatttgccttaaaacttacctggcagtggctttgctgcacggtctgaaaccacctgttcccaccctcttgaccgaaatttccttgtgacacagagaagggcaaaggtctgagcccagagttgacggagggagtatttcagggttcacttcaggggctcccaaagcgacaagatcgttagggagagaggcccagggtggggactgggaatttaaggagagctgggaacggatcccttaggttcaggaagcttctgtgtaagctgcgaggatggcttgggccgaagggttgctctgcccgccgcgctagctgtgagctgagcaaagccctgggctcacagcaccccaaaagcctgtggcttcagtcctgcgtctgcaccacacattcaaaaggatcgttttgttttgtttttaaagaaaggtgagattggcttggttcttcatgagcacatttgatatagctctttttctgtttttccttgctcatttcgttttggggaagaaatctgtactgtattgggattgtaaagaacatctctgcactcagacagtttacagaaataaatgttttttttgtttttcagaaaaaaaaaaaaaaaaaaaaaaaaaaa

SEQ ID NO: 816 - DNA, 4341 bp, human
ccggcccggcccgcccggcccagccgctcctgctgggcgccccaaccgggtccggcccgggggggcgggggccgcggccgccgaggatggggaaatccaacagcaagttgaagcccgaagttgtggaggagctgaccaggaagacctactttaccgagaaggaggtccagcagtggtacaaaggcttcatcaaggactgccccagtgggcagctggatgcggcaggcttccagaagatctacaagcaattcttcccgttcggagaccccaccaagtttgccacatttgttttcaacgtctttgatgaaaacaaggacgggcgaattgagttctccgagttcatccaggcgctgtcggtgacctcacggggaaccctggatgagaagctacggtgggccttcaagctctacgacttggacaatgatggctacatcaccaggaatgagatgctggacattgtggatgccatttaccagatggtggggaataccgtggagctcccagaggaggagaacactcctgagaagagggtggaccggatctttgccatgatggataagaatgccgacgggaagctgaccctgcaggagttccaggaggggtccaaggcagacccgtccattgtgcaggcgctgtccctctacgacgggctggtatagtcccaggctggagctggatgcctgggaaccactcacctccttctgtgccatgaggccacctcagccctgacaccaaccccgtgcgtccacccagccttcttccgcatccacacacagccggctgcccttgacccgggaggccccggctctcctctcccctgtcctgcacccatcccccgcctgaagccaccggctccaattgccagcaacctctgcttgtccggaaaacgacaacacgaaatggaaaaggctacagccctctgcataaaccaaggacttggctgcctcgcaggcagcctccgttcctcccgctctcttgcgcgtgtgcttttgttttttattttgaacagacgttttaaaagaaaaaaaaacaactaccttctgtcctagaagacacagactgacagatggggtgaaggcctggggacctcagagaactctgccttgccctcgtccctcgtccttcggcagccggagaggctgtgggtgggccgagggtgtctaggggttctgcctagtcaacgttatttgtcgtcccatcttttggcagcaaaaccacctgcgtggctaggatgattaattatgaggatgatgattttttttgtgataacagtattgtgctttttgtggggaaagtgaggttttttttttatatacatatataattgatatctttaatttattggttgttaactgttgctgctgcctggtgtgtcctcagctcccagggctgcgggcccaccgtttacatgtgcacgccctgacccacctgcccacgccgacttgggaggatggtggcctgcagcggccaagaagccaaaaaaaattttttttttttcagatactgtgcttgatttttggagaggggagaggtggaaattcctaaatggctaatgcactgttccctccagcccgaatgcctcctgccaaaccccttttccctgctgcctctgtccccgcatccttgttctcccctgggtccgtaacattttttccgaggatgaacaggggacatctttaggtttctcaactcttgctttggtgtttgccgcagcatggaaaacagggcgcctaaggctgggagctggaagaaggggcattgggtacccaggcagagtcaggagaggtggtctttgaagtaagttagcagaaatcaaggggacccccgcctccttgggctggggaggggatttcaagatagttcataactctctcccgctctgccttccctccttcctatctgctttttccagtaaactgcatggtgtccttccctggccttctcttggctcaaaggctgggagggagggaaggagagaagagttccaggcaatcccatcaatatagtccctacacctggggctgcggcccacatgtcttcacggaggcttccagcggtgcctgccactgaggcaggtgcggccccaggaccatcaccaggaatgcgaggccaccctggaccagaggtaggagcccaaggtccggcccttgctctttgattgtgggcagcctcctgccctctctgggtctcagttgccccatctgcagagcgaggaggcccgggctggttggtcttgaaggcccttttccatgccgacatcatgtcactctaggcctggggttcagtttcctgtggctggtgatgctgtggttaagtttgcttgaccccagcagcccgagggactgtctgagtcacagcacagcccctattgcgtggctgctggtgtgtggggtcagttccagcagatgaatgtgtcatgtggcacaccttgtcccttcccgcagcatttcctggttccccccagacccttgagcgctctttgggacccagaaggagtccttgcacagggaaggcttgaggtgagaagccgcttcccagactgtcagggccaggcctgggtctagaattcttgctgctgctttgcagagtcaacagcccatcagcccatgttttagaggggacactttggtcctcggttcccaccctcagcaagcaggcctccagcccgaggaaggcctctgccgtagtgacgttgccgtgtggggctgcgtggctgttccccttggctggagcattcagccaaccccagcgtcccccctgaggcgttcattggcagccccctaggactgcacgctggccccacggtaaccccccctcccccaccaacatcctgcagggatggggtcagtggttccaccttcacaggccactttgaagggtggattctttgaggcccctgccagtcggctccctgctcagctgctggcccgggcgacctgggactcagcaccaacggctgaagtttctcagctgggctctgacctggggtctggggcagggaacgaacatggtggctttgggctgagaggatgagggaggtctttcccaggtcaaattactttcctttggcctctgcctgaggctcgatttgcctctctggtccaatgggactgacactgttgtacaacctgacctgtggctgagggtgtctgggcttaagcatgtggaccccttcggtgtgtctggccttcctccatcgtcctgccctttggccttttggtttgaagccacaggtgtggcttctggccttagcagatggtatgcttgcggaccgcagcccagcatgccggtgggcccacagcccgagccagcccagagctgccggaagggccgcccttcccggccctggcggggtgctggacactggccattttcactagagtttgcctggcagggaccgatctctgccccctcctctccccaggcctctggctgcagtgatgccgcagaatcctgagccaggtgcctcctgagcagcccgtgcgcctctccacagcggcgtttgccacccaatgcggctcgcttcagatgctctgatgcagagggcacgcccatagtccctctgcagagcctcgcactggggccagggcaggcaccagccccaggcggccagtcggccacggcctgtcctcttcctcgtagcgtctgctcctcactttgtgttgatggtgacttaggagaatgttccgattttccatgatctaagcaggccacgtttaaaataacatcaaggcaagcgtacgtgtcaccctctgtactgacatctcctcccctgaaatgcttttcagtttgacagcccgtttcctagacaagtgcacctggggtttcaggaactttgtgttttttcggagggggttggtggggaggtcgggatgcctgggatcccttcctggagaggcaggctgtctctggaaaaagcctccattgcccacccgccaggcggaaagtcaccctgttcccagcgcggtttcagcatttaattttaagggagctaaggaagcgcggcgcgccccctggtggtggtaagccgccaacgcacctgggggctgcaaccccaccggacgggtggtccggagggaggctggagcggggaggcgaggagggggctgtgagtcctcagaggccctgggccaccacatttctggcagcgtttcccagacacccctctgctaggccatccctggatagcaagtgaattaacttaagggcactgtgatgggaagccttgcccccctctttttttttttttttttaatatctgcggaataaacccaatggttaatttttgaatgaataaaaggcttttgttgaataaaaaaaaaaaaaaaaaaaaaaaaaaaa

SEQ ID NO: 817 - DNA, 1432 bp, human
cccttacatcctcctaggacccggtcggtagtcgtcgccccagcccgccgggggcgcagcgcccgagccgcggccctcgagacgggaccgagagcatcatgggcagcactgtcccgcgctccgcctccgtgctgcttctgctgctgctcctgcgccgggccgagcagccctgcggggccgagctcaccttcgagctgccggacaacgccaagcagtgcttccacgaggaggtggagcagggcgtgaagttctccctggattaccaggtcatcactggaggccactacgatgttgactgctatgtagaggacccccaggggaacaccatctacagagaaacgaagaagcagtacgacagcttcacgtaccgggctgaagtcaagggcgtttatcagttttgcttcagtaatgagttttccaccttctctcacaagaccgtctactttgactttcaagtgggcgatgagcctcccattctcccagacatggggaacagggtcacagctctcacccagatggagtccgcctgcgtgaccatccatgaggctctgaaaacggtgattgactcccagacgcattaccggctgcgggaggcccaggaccgggcccgagcggaagaccttaatagccgagtctcttactggtctgttggcgagacgattgccctgttcgtggtcagcttcagtcaggtgctactgttgaaaagcttcttcacagaaaaacgacccatcagcagggcagtccactcctagccccggcatcctgctctagggcccctcatgccccaggctggagcagctctcctaggtcacagcctgctgggctgggtcgcgtagcccagggtggaggcagaacgatgctgctgtggtagccctttgcctttcatgcccatgcttgattcttgcacctcagcagctgaaggtctcagagaccagtaatcagaaggcatccgactgcattaagtgtgcagcgctgaaaagacatttacaactaggccagggattagccactgtgggagggtggacaggcaatggttcagtggcctggctgttggcaggaactccaagtgcccaggcctcttgggcagcttagggccctgcctctgtttcatgatgcatgggtcatttgtcttgggtgtcctatcccatatggagaagaaaggggctctaagttctggctcttctttctttggggttctctgtacctgaggaaaccaggccctgggtgactttgcagatctgctcaccctcggtgagcaacagtgtcagccatgcaagcaggacagaatggtgactgggtgcccttggtgagctgtgtatttcctaggaggtagaaaactgtgggaaactgtggctaataaaaactaagtgtgagcgtcaaaaaaaaaaaaaaaaaaaaaaaaaaaaaaaaaaaaaaaaaaaaaaaaaaaaaa

SEQ ID NO: 818 - DNA, 4237 bp, human
tcccgaaaccagagggatggggccggctgtgcagtagaacggggatcgaaaagaggaaaacaagggcacgaagaccagcgagaaagaagaggacacctgggaaaggcggaagcagaagacggggaagggaaaagaaacccatagcaggtggaaaccagatctagagcaacaccgtcaggttcacagtttgtttttctagaagagaagaaagtacctgaggattgctcttttttcctaccgttaatgaaaactacttttgtcttcatcataaaagaaaaaactaaggggaggtaaaggcagtctcctgttttattagggggagaggtgaagggaaatccaggctcactttctgaataagccactgcctggtgcacagagcagaaccatcctggtttctgaagacacatccctttcagcagaattccagccggagtcgctggcacagttctatttttatatttaaatgtatgtctcccctggcctttttttttttttttttttttagcaacacttttcttgtttgtaaacgcgagtgaccagaaagtgtgaatgcggagtaggaatatttttcgtgttctcttttatctgcttgccttttttagagagtagcagtggttcctatttcggaaaaggacgttctaattcaaagctctctcccaatatatttacacgaatacgcatttagaaagggaggcagcttttgaggttgcaatcctactgagaaggatggaagaaggagccaggcaccgaaacaacaccgaaaagaaacacccaggtgggggcgagtcggacgccagccccgaggctggttccggagggggcggagtagccctgaagaaagagatcggattggtcagtgcctgtggtatcatcgtagggaacatcatcggctctggaatctttgtctcgccaaagggagtgctggagaatgctggttctgtgggccttgctctcatcgtctggattgtgacgggcttcatcacagttgtgggagccctctgctatgctgaactcggggtcaccatccccaaatctggaggtgactactcctatgtcaaggacatcttcggaggactggctgggttcctgaggctgtggattgctgtgctggtgatctaccccaccaaccaggctgtcatcgccctcaccttctccaactacgtgctgcagccgctcttccccacctgcttccccccagagtctggccttcggctcctggctgccatctgcttattgctcctcacatgggtcaactgttccagtgtgcggtgggccacccgggttcaagacatcttcacagctgggaagctcctggccttggccctgattatcatcatggggattgtacagatatgcaaaggagagtacttctggctggagccaaagaatgcatttgagaatttccaggaacctgacatcggcctcgtcgcactggctttccttcagggctcctttgcctatggaggctggaactttctgaattacgtgactgaggagcttgttgatccctacaagaaccttcccagagccatcttcatctccatcccactggtcacatttgtgtatgtctttgccaatgtcgcttatgtcactgcaatgtccccccaggagctgctggcatccaacgccgtcgctgtgacttttggagagaagctcctaggagtcatggcctggatcatgcccatttctgttgccctgtccacatttggaggagttaatgggtctctcttcacctcctctcggctgttcttcgctggagcccgagagggccaccttcccagtgtgttggccatgatccacgtgaagcgctgcaccccaatcccagccctgctcttcacatgcatctccaccctgctgatgctggtcaccagcgacatgtacacactcatcaactatgtgggcttcatcaactacctcttctatggggtcacggttgctggacagatagtccttcgctggaagaagcctgatatcccccgccccatcaagatcaacctgctgttccccatcatctacttgctgttctgggccttcctgctggtcttcagcctgtggtcagagccggtggtgtgtggcattggcctggccatcatgctgacaggagtgcctgtctatttcctgggtgtttactggcaacacaagcccaagtgtttcagtgacttcattgagctgctaaccctggtgagccagaagatgtgtgtggtcgtgtaccccgaggtggagcggggctcagggacagaggaggctaatgaggacatggaggagcagcagcagcccatgtaccaacccactcccacgaaggacaaggacgtggcggggcagccccagccctgaggaccaccattccctggctactctctccttcctcccccttttatcctacctccctgccttggtcctgccaacacatgcgagtacacacacacccctctctctgcttttgtcaggcagtggtaggactttggtgtgggtggtgagaaattgtaaacaaaaactgacattcatacccaaagaaccagcctctcaccccagggtccatgtcccaggccccactccagtgctgcccacactcccagctgctggaggagaggggagatgccaaggtgccctgcaggacctccctccgggccacaccctcagctgcctcttcaggaaccggagctcattactgccttccctcccagggaggccccttcagagaggagaggccacaggagctgcattgtggggggacaggctcaagcaattctgtccccatcaaggggtcagctggagagacccaagaccctatctgttcaccagggacccaaaatccaaggggatgcttccctctgccctctttcctgcccctccccatcatacctgcacccaccccagccagggctccctgtccagaattcggttctcctcaggacgccaactcccagagctaaggaccaaggagaagaacagcctctccacccccaagccaggcggttgaggaacatattgagaaaggttcagattgcagaaacccagccctgcccctgcctcctgcatccagcccccaacatggtgccaaagcttccagaagccaaaaagcttctgatttttaaggtagtgggcatctctctcctaatgacgaagctgctcagcaactccacctgcccgccgcaggaaggagcagtcccctgctatccctgcagccactcccagcacacccgcacacagccagcaccaccgcccccaccgtgcacttctcctctctgggccttggcttgggaccaggtacgaaggatccccaagcccttcaggcctgagatcagagccagatcagccttaagtcacctcccatccaagaacttggcctaaaaatactcccctatttctaaccctcaggacggatctgatattaaatgccttccctgggaggaagggtgctttccccctccctagaggtgcccattccataccctgggagactgaggagagcattggctgaagcccagttcctttcccatccatccccaactccaataatcccccactcctcgcaggtctcagtgtcatgctgtcttggggcagggtgaaagggtagtggcagcagggcgcccactctggagatcctcaaaaaaggccctcctctgtggctggcagcctctgacctttccctgggcttcaaaggaaggctatggagtttgctgtgggccctgcaaccttcccagccactcctgctgcactaaggacttaggatccttttatcacaaatcgggattctctcccccaccccgaattctgtctgcttaaactggaatacacaggagcccttcctggcctggatggtgtctcccagcttccccgcccagcttgcccaccccatagttggtgagatgccaagtttggtctgagttgtgaccccttcagagtagatgcccggcaggctggggttggcccctggagggtcaggggaccatcttcttattccctcttttctcattcctccaacttcctcccctccttcaattatttttttgtaaagttgatgccttactttttggataaatatttttgaagctggtatttctatttcttttggattttttttaatgtaaggttgttttgggggatggagttagaaccttaatgataatttctttcgtttggtgtaggttttagagatttgttttgtggagaggtttttttcttttgatgtaataaaatttaaaatggaaatgaaaaaaaaaaaaaaaaaaaaaaa

SEQ ID NO: 819 - DNA, 1470 bp, human
gctcgggcgaggtaggagcgatgtggcctgggaacgcctggcgcgccgcactcttctgggtgccccgcggccgccgcgcacagtcagcgctggcccagctgcgtggcattctggagggggagctggaaggcatccgcggagctggcacttggaagagtgagcgggtcatcacgtcccgtcaggggccgcacatccgcgtggacggcgtctccggaggaatccttaacttctgtgccaacaactacctgggcctgagcagccaccctgaggtgatccaggcaggtctgcaggctctggaggagtttggagctggcctcagctcggtccgctttatctgtggaacccagagcatccacaagaatctagaagcaaaaatagcccgcttccaccagcgggaggatgccatcctctatcccagctgttatgacgccaacgccggcctctttgaggccctgctgaccccagaggacgcagtcctgtcggacgagctgaaccatgcctccatcatcgacggcatccggctgtgcaaggcccacaagtaccgctatcgccacctggacatggccgacctagaagccaagctgcaggaggcccagaagcatcggctgcgcctggtggccactgatggggccttttccatggatggcgacatcgcacccctgcaggagatctgctgcctcgcctctagatatggtgccctggtcttcatggatgaatgccatgccactggcttcctggggcccacaggacggggcacagatgagctgctgggtgtgatggaccaggtcaccatcatcaactccaccctggggaaggccctgggtggagcatcagggggctacacgacagggcctgggcccctggtgtccctgctgcggcagcgcgcccggccatacctcttctccaacagtctgccacctgctgtcgttggctgcgcctccaaggccctagatctgctgatggggagtaacaccattgtccagtctatggctgccaagacccagaggttccgtagtaagatggaagctgctggcttcactatctcgggagccagtcaccccatctgccctgtgatgctgggtgatgcccggctggcctctcgcatggcggatgacatgctgaagagaggcatctttgtcatcgggttcagctaccccgtggtccccaagggcaaggcccggatccgggtacagatctcagcagtgcatagcgaggaagacattgaccgctgcgtggaggccttcgtggaagtggggcgactgcacggggcactgccctgagctctgggtaaggacgagaagagccaaggtccgcctactgccacagggtcaaaggaggttttcgatcagcccagaccagaggctctgagccctgaaccaaagtcccagagctgggctgggacgtgacctgtgctgagggctgtgagaatgtgaaacaacagtgtgaaaattggctgtgaaaaaaaaaaaa

SEQ ID NO: 820 - DNA, 482 bp, human
tcgacccggattccggttccggtgggctccatcagcaagctccagtgctacgtgtccctggcattttaggtgtcggttgggtaggcagtcatggatcaggtaatgcagtttgttgagccaagtcggcagtttgtaaaggactccattcggctggttaaaagatgcactaaacctgatagaaaagaattccagaagattgccatggcaacagcaataggatttgctataatgggattcattggcttctttgtgaaattgatccatattcctattaataacatcattgttggtggctgaatacattttggaagagagtttttcatcttagagattggtgaacaagtgtgagggtgtgagaaactcacagaatacaaatttgcctgtatgttttgtgggtttttttttttcctttcaagatgttttctatttctaaattaaagtaatttcaaagtaaaaaaaaaaaaaaaaaaaaaaaaaaaaaa

SEQ ID NO: 821 - DNA, 2533 bp, human
tcggcgtccgagcttccggccgggctgtgccccgcgcggtcttcgccgggatgaagcgcccctgcgaggagacgacctccgagagcgacatggacgagaccatcgacgtggggagcgagaacaattactcggggcaaagtactagctctgtgattagattgaattctccaacaacaacatctcagattatggcaagaaagaaaaggagagggattatagagaaaaggcgtcgggatcggataaataacagtttatctgagttgagaagacttgtgccaactgcttttgaaaaacaaggatctgcaaagttagaaaaagctgaaatattgcaaatgacagtggatcatttgaagatgcttcaggcaacagggggtaaaggctactttgacgcacacgctcttgccatggacttcatgagcataggattccgagagtgcctaacagaagttgcgcggtacctgagctccgtggaaggcctggactcctcggatccgctgcgggtgcggcttgtgtctcatctcagcacttgcgccacccagcgggaggcggcggccatgacatcctccatggcccaccaccatcatccgctccacccgcatcactgggccgccgccttccaccacctgcccgcagccctgctccagcccaacggcctccatgcctcagagtcaaccccttgtcgcctctccacaacttcagaagtgcctcctgcccacggctctgctctcctcacggccacgtttgcccatgcggattcagccctccgaatgccatccacgggcagcgtcgccccctgcgtgccacctctctccacctctctcttgtccctctctgccaccgtccacgccgcagccgcagcagccaccgcggctgcacacagcttccctctgtccttcgcgggggcattccccatgcttcccccaaacgcagcagcagcagtggccgcggccacagccatcagcccgcccttgtcagtatcagccacgtccagtcctcagcagaccagcagtggaacaaacaataaaccttaccgaccctgggggacagaagttggagctttttaaatttttcttgaacttcttgcaatagtaactgaatgtcctccatttcagagtcagcttaaaacctctgcaccctgaaggtagccatacagatgccgacagatccacaaaggaacaataaagctatttgagacacaaacctcacgagtggaaatgtggtattctcttttttttctctcccttttttgtttggttcaaggcagctcggtaactgacatcagcaacttttgaaaacttcacacttgttaccatttagaagtttcctggaaaatatatggaccgtaccatccagcagtgcatcagtatgtctgaattggggaagtaaaatgccctgactgaattctcttgagactagatgggacatacatatatagagagagagtgagagagtcgtgtttcgtaagtgcctgagcttaggaagttttcttctggatatataacattgcacaagggaagacgagtgtggaggataggttaagaaaggaaagggacagaagtcttgcaataggctgcagacattttaataccatgccagagaagagtattctgctgaaaccaacaggttttactggtcaaaatgactgctgaaaataattttcaagttgaaagatctagttttatcttagtttgccttctttgtacagacatgccaagaggtgacatttagcagtgcattggtataagcaattatttcatcagttctcagattaacaagcatttctgctctgcctgcaggcccccaggcacttttttttttggatggctcaaaatatggtgctgctttatataaaccttacatttatatagtgcacctatgagcagttgcctaccatgtgtccaccagaggctatttaattcatgccaacttgaaaactctccagtttgtaggagtttggtttaatttattcagtttcattaggactatttttatatatttatcctcttcattttctcctaatgatgcaacatctattcttgtcaccctttgggagaagttacatttctggaggtgatgaagcaaggagggagcactaggaagagaaaagctacaatttttaaagctctttgtcaagttagtgattgcatttgatcccaaaacaagatgaatgtatgcaatgggatgtacataagttatttttgcccatgcctaaactagtgctatgtaatggggttgtggttttgtttttttcgatttcgtttaatgacaaaataatctcttaatatgctgaaatcaagcacgtgagagtttttgtttaaaagataagagacacagcatgtattatgcacttcatttctctactgtgtggagaaagcaataaacattatgagaatgttaaacgttatgcaaaattatacttttaaatatttgttttgaaattactgtacctagtcttttttgcattactttgtaacctttttctatgcaagagtctttacataccactaattaaatgaagtcctttttgactatt

SEQ ID NO: 822 - DNA, 1142 bp, human
cttttccaagcggctgccgaagatggcggaggtgcaggtcctggtgcttgatggtcgaggccatctcctgggccgcctggcggccatcgtggctaaacaggtactgctgggccggaaggtggtggtcgtacgctgtgaaggcatcaacatttctggcaatttctacagaaacaagttgaagtacctggctttcctccgcaagcggatgaacaccaacccttcccgaggcccctaccacttccgggcccccagccgcatcttctggcggaccgtgcgaggtatgctgccccacaaaaccaagcgaggccaggccgctctggaccgtctcaaggtgtttgacggcatcccaccgccctacgacaagaaaaagcggatggtggttcctgctgccctcaaggtcgtgcgtctgaagcctacaagaaagtttgcctatctggggcgcctggctcacgaggttggctggaagtaccaggcagtgacagccaccctggaggagaagaggaaagagaaagccaagatccactaccggaagaagaaacagctcatgaggctacggaaacaggccgagaagaacgtggagaagaaaattgacaaatacacagaggtcctcaagacccacggactcctggtctgagcccaataaagactgttaattcctcatgcgttgcctgcccttcctccattgttgccctggaatgtacgggacccaggggcagcagcagtccaggtgccacaggcagccctgggacataggaagctgggagcaaggaaagggtcttagtcactgcctcccgaagttgcttgaaagcactcggagaattgtgcaggtgtcatttatctatgaccaataggaagagcaaccagttactatgagtgaaagggagccagaagactgattggagggccctatcttgtgagtggggcatctgttggactttccacctggtcatatactctgcagctgttagaatgtgcaagcacttggggacagcatgagcttgctgttgtacacagggtatttctagaagcagaaatagactgggaagatgcacaaccaaggggttacaggcatcgcccatgctcctcacctgtattttgtaatcagaaataaattgcttttaaagaaaaaaaaaaaaaaaaaa

SEQ ID NO: 823 - DNA, 9027 bp, human
gcggcccaggcggggtgcgagtggcgcagtcggagcccgttgcggcccctgaggaagcgaggaggcgtcggcgtcggctgaggcgggcggaccggcgaggcgaggcggcggccccaggcccgagggactcgggagctcgagcagcggcggcggcaagacctctccccctcggaggcggcgggcggaggcggcgggagcggtggtgccccccccgggcacggggccatgtacaacgggatcgggctgccgacgccccggggcagcggcaccaacggctacgtccagcgcaacctgtccctggtgcggggccgccggggtgagcggcctgactacaagggagaggaggaactgcggcgcctggaggctgccctggtgaagcggcctaatcctgacatcctggaccacgagcgcaagcggcgcgtcgagctgcgatgcctcgagctggaggagatgatggaagagcaggggtacgaggaacagcaaattcaggaaaaagtggcgacctttcgactcatgttgctggagaaggatgtgaaccctgggggcaaggaggagaccccagggcagaggccagcggtcacggagactcaccagttggcagaattaaatgagaagaagaatgaaagactccgtgctgcctttggcatcagtgattcttacgtagatggcagctcttttgatcctcagcgtcgtgcccgagaagctaaacaaccagctcctgagcctcccaaaccttacagccttgttcgggagtctagcagttctcgctcaccaaccccaaagcagaagaagaagaaaaagaagaaagatagaggacgcaggtcagagagcagctctcctcgacgggagagaaagaaaagctcaaagaagaagaagcacaggtcagaatctgagtccaagaaacgtaagcataggtctcccactccaaagagcaaacgtaaatctaaggacaaaaagcgaaagcggtctcgaagtacaacaccagcccccaagagccgccgggcccaccgttcaacttctgctgactctgcttcctcctccgatacttcccgcagtcggtctcgaagtgctgcagctaaaactcatacaactgccttggctgggcgaagtccttcccctgcttcagggcgacgcggggagggagatgcgcctttcagtgaaccaggtactaccagcacacaacggcctagtagcccggagactgctacgaaacagcctagcagcccttatgaagacaaagataaagacaagaaggagaaatctgcaactcgacctagcccctctccggaaaggagcagcacaggcccagaaccacctgctcccactccgctccttgctgagcgacatggcggctccccacaaccccttgcaaccacccccttaagccaggagccagtgaaccccccatctgaggcctctccaactcgggaccgttcaccacctaagtctcccgagaaacttccccagtcttcttcctcagagagcagcccaccatcccctcaacctaccaaagtttctcggcatgccagctcttccccagaaagtcctaaacctgctccagctccagggtcccaccgagagatttcttcttctcccacatctaagaatcgctcacatggccgagcaaaacgggataaatcacattctcataccccctcccgtaggatggggaggtcccgtagccctgccaccgctaagagagggcgatctcggtctcgaacccctaccaagagaggtcattctcgatcccgatctccccagtggcgtaggtccaggtctgcacagaggtggggaagatctagaagcccccagcgacgtggccgctctaggtctcctcagcgaccaggctggtctaggagcagaaatacccagagaagaggcaggtctaggtcagcaaggcgagggaggtcccactctagatccccagccactaggggtagatctcgttctagaacaccagcccgccggggcaggtcccgctctagaacacctgccaggcggagatcacgatccagaactcccaccaggcgtaggtctcggtctagaacaccagcccggaggggcaggtctcggtctagaacacctgctaggcgcagatctaggacccgatcaccagtacgacgcaggtctcgtagtagatcaccagccaggagaagtggcaggtcacgctctagaaccccagctagacgtggccgctcacgctccagaaccccagccagacgtggccgctcacgctctagaaccccagctagacgcagtggtcgctcacgctccagaacaccagccaggagagggaggtctcggtctaggacaccaagacgaggaagatcccgcagtagaagcttagttagacgtggaagatctcactctagaacacctcaaagaagaggcagatctggctcatcttcagagcggaaaaacaaatccagaacatctcaaagaagaagcaggtccaattcaagcccagaaatgaagaaatctcgcatttcttcaaggcggagcaggtctctctcttcaccacggtccaaagcaaaatctcgcttgtctttgaggcgcagcctttcagggtcttccccatgccctaagcaaaagtcacagacaccacccaggcgcagtcgctctggatcctcccaacctaaagctaaatctagaacgccacccagacgcagtcgctccagttcttctccgccacctaaacagaaatctaagacaccatcaagacaaagtcattccagttcatctcctcatcctaaagtgaaatctggaacaccaccgaggcaagggtccataacaagtccccaggccaatgagcaatctgtaacgccacagagacggagctgttttgaatcatcacctgaccctgagttgaaatctaggaccccttctagacatagctgctcagggtcctctcctcctagagtgaaatctagcacacctcccagacagagcccatctaggtcatcatctccacaacccaaagtgaaggcaataatatcaccaagacaaagaagccattctggctcctcttctccaagtcctagtagggtgacgtcgagaacaactccacggcgaagcagatcagtatctccctgctccaatgtggaatccagattgttgccaagatacagtcattctgggtcctcctcaccagataccaaagtgaaacctgaaacaccgccaagacaaagtcactcagggtctatttcaccataccccaaagtaaaggcccaaactccaccggggccaagtctttctggatcaaagtcaccatgtccccaagagaagtctaaagactcactagttcaaagttgccctggatccctctctctctgtgcaggagtaaaatctagcacaccaccaggcgagagctattttggtgtctcatctctgcaactgaaaggacaatctcaaacttcaccagaccacagatctgatacttcaagtccagaagtgagacagagtcattcagaatcaccatctctgcagagcaaatctcaaacatcacctaagggaggtcggtccaggtcttcatctccagtcactgagctggcatccagatctccaataagacaagatagaggtgagttctcagcgagtcctatgttgaaatctggaatgtctcctgagcagagcaggttccagtctgactcttcttcatatcctacagtggactcgaattctctcttggggcagagtagattggagactgctgaatcaaaagagaaaatggccttaccccctcaggaggatgctactgcatcacctcctagacagaaagacaaatttagtccctttccagtacaggataggcctgagtcttcactggtattcaaagacacacttagaaccccgccaagagaaagaagtggtgctgggtcatctccagaaacaaaagagcaaaatagtgcattgcctacgtcaagccaagatgaagagttaatggaggtggtagagaagtctgaagaacccgcaggccaaatcctgtctcatttgtcttcagaacttaaagaaatgtccacaagtaactttgaatcatctcctgaagtagaagaaaggcctgctgtgtctttgactcttgatcagagccagtcacaggcttctttggaagcagtagaagtcccttcaatggcctcatcttggggtgggccacatttttctccagaacataaagaactgtctaactccccactcagggagaacagctttggatcacctttagaatttagaaactcaggcccacttggtacagaaatgaatactggattttcttctgaggttaaagaagatttgaatggaccgtttcttaatcagctggaaacagatccatctctagacatgaaagaacaatcgacaagatcctctggacacagcagttctgagttatccccagatgcagtggaaaaggcagggatgtcttcaaatcagagcatctcttcacctgtgcttgatgctgtacccagaacaccctcgagagaaagaagtagttctgcatcttctcctgaaatgaaagatggtttacccagaactccatcaaggagaagcaggtctgggtcttctccaggacttagagatgggtctgggactccctcgaggcacagcctgtctgggtcctctcctggaatgaaagatatacctagaacgccatttagagggagaagcgaatgtgattcttccccagaaccgaaagctttgcctcagactcctaggccgaggagtcgttctccatcatccccagagctcaacaacaagtgtcttaccccccagagagaaagaagcgggtcagaatcatcagttgatcagaaaactgtggctcggactcccctggggcagagaagtcgttcgggatcctctcaagaacttgatgtgaaacccagtgcatcccctcaggaaagaagtgagtcagactcttctccagattctaaagccaagacacgaaccccacttcggcagaggagtcggtctggatcatctccagaggttgacagcaaatctcgactatcccctcggcgcagtaggtctggttcctcccctgaagtgaaagataagccaagagcagcacccagggcacagagtggttctgattcctctcctgaacctaaagctccagcccctcgggcccttcccagacgaagcagatcaggttcatcaagcaaaggcagaggcccttctcctgaaggaagcagcagtaccgagtcctctcctgaacatccgcccaaatccagaactgctcgcagaggttccaggtcatcaccagagcccaagaccaagtctcgtacaccacctcgacgtcgcagctctcgatcatctccggagctaacaaggaaggccagactgtcccgtagaagccgctctgcctcatcctcaccagaaactcgctctagaactcccccaaggcaccggagaagtccctcagtgtcttccccggagccagccgaaaaatcgaggtcttcacgccgacggcgctcagcttcatctccacgcactaagacaacctcaaggagaggccgctctccttcgccaaagcctcgtggactccagaggtcccgttcccgctcaaggagagagaaaacaagaacaacccgacgtcgagataggtctggatcttctcagtcaacctctcggcgaagacagcggagccggtcaaggtcgcgggttactcggcggcggaggggaggctctggttatcactcaaggtcacctgcccggcaggaaagttcccggacctcctctcgacgccgaagaggccgctctcggacacccccaaccagtcggaagcgttctcgctcacgcacatcaccagccccgtggaaacgctctagatctcgagcctctccagccactcaccggcgatccaggtccagaacccccctgataagccgacgtaggtccagatctcgaacttcaccagtcagccggagacggtcaaggtccaggacttcagtgactcgacgaagatcccggtcaagagcatccccagtgagcagaaggcgatccagatccagaacgccaccagtaacccgccgtcgttcaaggtctagaacgccaacaacacgccgccgctcccgttctagaactccaccagtgactcgcagaaggtccagatccaggactccaccagtaaccaggaggcgatctcgaagcagaacttcgcctatcactcgcagaagatcaagatccagaacatctccggtcacccgaaggagatctcgatctcgcacatctccagtaactcgaagaaggtcccgctctcgaacctcaccagtgacacgccgccgctctaggtcccggacacctccagctattcggcgccgctctagatctcgaacgccactgttaccacgcaaacgttctcgaagtcgctcaccacttgctatccgccgccgctccagatcccgtactccacgaacagctcggggtaaacggtccttaacaagatctcctccagccatccgcaggcgttctgcatctggaagtagttctgatcgttcacgatctgctactcctccagcaacaagaaatcattctggttcacggacacctccagtagcactcaacagttccagaatgagctgcttcagtcgtcctagcatgtccccaacacctcttgatcgctgcagatcacctggaatgcttgaaccccttggcagctctagaacacccatgtctgtcctgcagcaagccggcggctccatgatggatggtccaggtccccgaatacctgaccaccagagaacatctgtgccagaaaatcatgctcagtccaggattgcacttgccctgacagctatcagtcttggcaccgctcggcctcctccgtccatgtctgctgctggccttgctgcaagaatgtcccaggttccagccccggtgcctctcatgagtctcagaaccgcaccagcagccaaccttgccagcaggattcctgcagcctctgcggcagccatgaacctagccagcgccaggacacctgccattccaacagcagtgaacctggctgactctcgaacgccagctgcagcagcggccatgaacttggccagccccagaacagcggtggcaccttcggctgtgaacctggctgaccctcgcactcccacagccccagctgtgaacctagcaggggccagaaccccagctgccttggcagctctgagtctcacaggctctggcacaccaccaactgctgcaaactatccctccagctccagaacaccacaggctccagcctctgcaaacctggtgggtcctcggtctgcacatgccacagctcctgtgaatattgccggctccagaaccgccgcagccttggcccccgcgagcctcaccagtgctaggatggctccagcattgtctggtgcaaacctcaccagccccagggtgcccctttctgcctacgagcgtgtcagtggcagaacctcaccaccgctccttgaccgagctaggtccagaacaccaccgtctgccccaagccaatctaggatgacctctgaacgggctccctccccttcctctagaatgggccaggctccttcacagtctcttctccctccagcacaggatcagccgaggtctcctgtgccttctgctttttcagaccaatcccgttgtttgattgcccagaccacccctgtagcagggtctcagtccctttcctctggggcagtggcaacgaccacgtcctctgctggtgatcacaatggcatgctctctgtccctgcccctggggtgccccactctgatgtgggggagccacctgcctctactggggcccagcagccttctgcattagccgccctgcagccagcaaaggagcggcggagttcctcctcgtcgtcgtcgtcctctagctcctcctcctcttcatcatcgtcgtcgtcgtcctcctcctcctctggctccagttctagtgactcagagggctctagccttcctgtgcaacctgaggtggcactgaagagggtccccagccccaccccagccccaaaggaggctgttcgagagggacgtcctccggagccaaccccagccaaacggaagaggcgctctagcagttccagttccagctcctcctcttcatcttcctcctcctcctcctcctcctcttcttcctcctcctcttcctcttcttcttcttcctcctcatcttcctcctcctcgtcgtcttcctccccttcccctgctaagcctggccctcaggccttgcccaaacctgcaagccccaagaagccaccccctggcgagcggaggtcccgcagcccccggaagccaatagactccctcagggactctcggtccctcagctactcgcctgtggagcgtcgccgtccctcgccccagccctcaccacgggaccagcagagcagcagcagtgagcggggttcccggagaggccagcgtggggacagccgctcccccagccacaagcgcaggagggagacacctagccctcggcccatgagacaccgctcctccaggtctccataaattgtctttgggggattccaccacacccaatgctctggagccacaaggagtgtcccttcttccccagcagagccgtgggagggtccttgtctgctctcctttgaaccttggcagcccttggatggagggctccctttccctccccttttttttttctttgttcctgtgaaatgttaatctccgtgagttcttcctggttcatgtgttctggggggtttggggtgggagggaatgcagatgggagttgggggaggggaggatacagttcaggataccccagcctggagtcagggccagggaggcatggccccacttgtatccagaagttcccaggggtgattgtgatggtggttgggactggaggttgtataaggtgttcttggaaggaaggggcaggagttggaattagttggtccctactgtcccccatgaggttgtgaacccctccccccaacttttcatgtttcttaaaggcattttggttttttaaaatctgtacagcaagagcaactttttctgtcaaataaaaatgagaaatgcagg

SEQ ID NO: 824 - DNA, 3669 bp, human
aaaggtatcggtgctgtcgcttccggtccgggtaaacgaaccttaggtacactggtgtgtggcctcccaagataggcttctgagggcaagtcagcgactgaagacgggagcgccagaatctgtggactcaagagtctagaatcaagtggaaaaaccggaaaaaaggccaggaacctgaatacgacctaatagctgtttccgagggggcaacttccacggagaaccttctgccctggtaacggccaaagaggaggagatggcgccagtcagggagcggccgtggcccagacagtgaggaagcgcgaaggcggagcaaccgaggaatcctccggagaagaatcagagccgtcgctaccgccactaccgccaccaccatggaaggagcaaagccgacattgcagctcgtgtaccaggcagtgcaggcgctttaccacgacccagatcccagcggaaaggagcgcgcctctttttggcttggggagctgcagcgttcggttcatgcatgggagatctcagaccagttgttacagatccggcaggatgtggagtcatgctattttgctgcacagaccatgaaaatgaagattcagacctcattttatgagctccccacagactctcatgcctctttacgggactcattgctaacccatatccagaacttgaaagacttgtcacctgttattgtaacgcagctggctttagcaatagcagatcttgccctacagatgccttcctggaagggatgtgtgcaaacactggtggaaaaatacagcaatgatgtgacttctttgccttttttgctggagatccttacagtgttacctgaagaagtacatagtcgttccttacgaattggagctaatcggcgcacagaaattatagaagatttggccttctactctagtacagtagtatctctattgatgacctgtgtagaaaaagcaggaacagatgagaaaatgcttatgaaggtttttcgctgtttgggaagttggtttaacttgggagttttggacagtaacttcatggctaacaataaattactagcactcctttttgaggttttgcaacaggataagacctcgtctaacctacatgaagctgcttcggactgtgtatgctcagctctctatgccattgagaatgtggagactaacttgccattagccatgcaactttttcagggagtgctgacattggagactgcctatcatatggccgtggcacgtgaagatttagacaaagttctgaattactgccgtattttcactgaactatgtgaaacttttcttgaaaaaattgtttgtactccaggccaaggtcttggggaccttcgaactctggagctgctgcttatctgtgcaggccatcctcaatatgaggtagtagaaatttcatttaacttttggtaccgactgggggaacatttgtacaaaactaacgatgaagttattcatggcatcttcaaagcttacattcagaggctgcttcacgccttggctcgacactgccagctggaaccagaccatgagggggttcctgaggagactgatgactttggggagtttcgcatgagggtatcagacctggtaaaggacttgattttcttgatagggtctatggagtgttttgctcagttatattctactctgaaagaaggcaacccaccctgggaggtgacagaagcggttctctttatcatggctgctatagcaaagagtgttgatccggaaaacaatccaacacttgtggaagtcctagaaggagttgtccgcctcccggagaccgtacatacggctgtgcgatacaccagcattgaattggttggagagatgagtgaagtcgttgatcgaaatcctcagttccttgaccctgtgttgggctatttgatgaaaggcctgtgtgaaaagcccctggcttctgctgcagccaaagccattcataacatttgctctgtctgccgagatcacatggctcagcactttaatggactcctggagattgcccgctccctcgattccttcctgttgtctccagaagctgctgtgggcttgctaaaagggacagcacttgtcctagcccgattacctttggataagattaccgaatgtcttagtgaactatgttctgttcaggttatggcattgaaaaagctgttgtctcaagagcccagcaatggcatatcctcagatcccacagtgttcttagatcgccttgcagtgatatttaggcataccaatcccattgtggaaaatggacagactcatccgtgtcagaaagtcatacaggaaatatggccagttttatccgagactctaaataagcaccgagctgataatcggattgtagagcgttgttgcaggtgcctgcgctttgctgttcgctgtgtaggcaaaggatctgcagcactgctgcagccactagtcacacagatggtgaatgtgtaccacgtacatcagcattcctgcttcctgtaccttggcagtatccttgtggatgaatatggcatggaagaaggctgtcggcagggactgctagacatgctccaggcactgtgcatccccacctttcagctcctagaacagcagaatggtctccagaatcaccctgacactgtagatgacctgttccggctagccaccaggtttattcagcgtagccctgtcaccttgctgcggagccaagtggtcatccctatcttacagtgggccattgcctctactaccctggaccaccgggatgccaattgtagtgtcatgaggtttctacgagacctcattcatacaggggtagccaatgatcatgaagaagactttgaattacggaaagaactgattggacaggtgatgaaccagcttggacagcagcttgtcagccagctgctgcacacctgctgcttttgcctccccccctataccctaccagatgtggctgaagtgctctgggagatcatgcaggttgacagaccgactttttgtcgatggttagaaaattccttaaaaggtttgccaaaggaaacaaccgtgggagccgtcacagtgacacacaaacaacttacagacttccacaagcaagtcactagtgctgaggaatgtaaacaagtttgctgggccttgcgagacttcaccaggttgtttcgatagctcacactcctgcactgtgcctgtcacccaggaatgtcttttttaattagaagacaggaagaaaacaaaaaccagactgtgtcccacaatcagaaacctccgttgtggcagaggggccttcaccgccaccagggtgtcccgccagacagggagagactccagccttctgaggccatcctgaggagttcctgtttgggggtgtgagggaaaatcagcgcggattttaaaaagatggctgtggcctgcccggcgtggtgggaggggagctggtttcctggtgaactttctaaaaggaaaaataattttaagtaaagaaaaaagaaaaaaaaggaagactaaacagaaaccagaactgaaacattcacctggtagcaaatgacacatgcacgcacacacacatacacgcacaagcgccagtgcgcacgtgtacacagaaaaacaaaaggacaagctttctgtgaaacaaaatatttacttagggataatgtggggattcacatgaattaaatagctgcaattggaa

SEQ ID NO: 825 - DNA, 2284 bp, human
gccgggtggatggtactgctgcatccgggtgtctggaggctgtggccgttttgttttcttggctaaaatcgggggagtgaggcgggccggcgcggcgcgacaccgggctccggaaccactgcacgacggggctggactgacctgaaaaaaatgtctggatttctagagggcttgagatgctcagaatgcattgactggggggaaaagcgcaatactattgcttccattgctgctggtgtactattttttacaggctggtggattatcatagatgcagctgttatttatcccaccatgaaagatttcaaccactcataccatgcctgtggtgttatagcaaccatagccttcctaatgattaatgcagtatcgaatggacaagtccgaggtgatagttacagtgaaggttgtctgggtcaaacaggtgctcgcatttggcttttcgttggtttcatgttggcctttggatctctgattgcatctatgtggattctttttggaggttatgttgctaaagaaaaagacatagtataccctggaattgctgtatttttccagaatgccttcatcttttttggagggctggtttttaagtttggccgcactgaagacttatggcagtgaacacatctgatttcccacagcacaacagccctgcatgggtttgtttgtttttttactgctcactcccaaccttttgtaatgccattttctaaacttatttctgagtgtagtctcagcttaaagttgtgtaatactaaaatcacgagaacacctaaacaacaaccaaaaatctattgtggtatgcacttgattaacttataaaatgttagaggaaactttcacatgaataatttttgtcaaattttatcatggtataatttgtaaaaataaaaagaaattacaaaagaaattatggatttgtcaatgtaagtatttgtcatatctgaggtccaaaaccacaatgaaagtgctctgaagatttaatgtgtttattcaaatgtggtctcttctgtgtcaaatgttaaatgaaatataaacattttttagtttttaaaatattccgtggtcaaaattcttcctcactataattggtatttacttttaccaaaaattctgtgaacatgtaatgtaactggcttttgagggtctcccaaggggtgagtggacgtgttggaagagagaagcaccatggtccagccaccaggctccctgtgtcccttccatgggaaggtcttccgctgtgcctctcattccaagggcaggaagatgtgactcagccatgacacgtggttctggtgggatgcacagtcactccacatccaccattgaaggaaaggaaaaaagggcagagacttgacactccagtcttagacaggggacaatttctttgtagttgttctgataataaactgggttccatgttgcatttcatctgtgtactgaaccactagcctaatagaccagcacggtcaactagaatgacaaacattagctactgggaactcttgttgtctcttcctcttcagaactcttgtccccccaggctccccacctctgcaagatgggatacactcttcaggaccacagtttgaaatgtctttcataaaatgtgctacaattagccttcggaatatttgctgggtgatttaaatgtgtgggtctcatttccatgctagccatggtcatctgacagtctctacgctgtgaatattgcctggtgatcaagactctcctcaaagaaatgacttgctgtcatcccacatgaactcctgatgttttttctacaaaagtccataaaatgtgaaaactggagaagatcttagaggttgaagcccaccttctcttttcacataggagggaacagaccatggaaatttaaacgacttcctcacggtcacagaactagttttttaatcctcaggcagtgcatccccccaccctacaactgagcacaacctctttccccacagtgcaattcagaatatgctcagggaatgccagccaccttgtaaaactgctgggagaaaagcatgattcccacaaggactaagtatcagtgatttgtaattttcctgttttgtattatctgctttgctgatgtagacaagagttaactgagtagcatgctttattaagcatgagaaagaatcttaagaattgtcaataaaattaacccaaaactttaataatgtgtctgtaaccaagaaaatattgatagcatcatcctaatgaaactaaacatttattttaaacttattaaattgactcttaaactaaaaaa

SEQ ID NO: 826 - DNA, 4785 bp, human
gagaaaatggcggcggcagcagcttcggcgcctcagcagctctcggatgaggagcttttctctcagctccgccgttacggcctgtctcccggaccagtgacggagagcacccgcccggtctacctcaagaagctgaagaagcttcgagaggaagagcagcaacagcaccggtcagggggccgcggcaacaagacgcggaacagtaataacaataacacggcagccgccacggtcgcagccgcgggaccagcggcggcggcggccgcggggatgggggtccggccggtctcgggcgacctctcctacttacggactcctgggggcctgtgccgaatctcggcctctggcccagagagcctcctgggagggcccgggggcgcctccgccgcccccgcggctggcagcaaagtgctgctgggcttcagctcggacgagtcggacgtggaggccagtccccgggaccaggccggcggcggcgggaggaaagaccgggcttcgctccagtaccgcgggctcaaagcgccgccggcgcccctggccgccagcgaggtgactaacagcaactctgcagagcgaaggaagccccactcgtggtggggggccaggaggccggcgggccccgagctgcagaccccgccggggaaagatggagcagtggaggacgaggaaggggagggagaggacggtgaggagagggacccggagaccgaggagccgctctgggcgagccggaccgtgaatggcagccggcttgtcccctacagctgccgggaaaactattcggactcagaggaagaggacgacgacgacgtggcctccagcagacaggtattaaaggacgactccctttcccggcatcggcccagacgaacccatagtaagcctctccccccgctgactgctaaatcggccggcggcaggctggagacttcagttcagggagggggaggactcgcgatgaatgacagggcggcggctgccgggagtctagacaggagccgaaacctcgaagaggcggcggccgcggagcagggaggagggtgtgatcaagtggactccagccccgttcctagataccgtgttaacgctaagaaactgacccctctcctgcccccgccacttactgacatggactcaaccttggattcgtcaacaggctcccttctgaaaaccaataatcatattggcggtggggccttcagtgtggactcccccaggatttattctaacagtctccctcccagtgcggcggtggccgcctctagttcactcaggatcaatcacgccaatcatacgggctccaatcatacctacctgaaaaacacatacaacaaaccgaagctttccgaacccgaagaggaacttctccagcaatttaaacgggaggaggtgtccccaacagggagtttcagtgcccactacttgtcgatgtttctcttaactgctgcctgcttatttttcctaatactgggactgacttacctaggaatgagagggacaggagtatctgaggatggagaactcagcatagaaaacccctttggtgaaacatttggaaaaatacaagaaagtgaaaaaactcttatgatgaacacattatataagcttcatgatcgattggcacagcttgcaggagatcatgaatgtggcagttctagtcaaagaacgctttctgttcaagaggcagctgcgtatttaaaagatttaggtcctgaatatgaaggtatatttaacacttcattgcagtggatcttagaaaatggaaaagatgttggaataaggtgtgttggttttggccctgaggaagaattgacaaatataactgatgtgcagtttttacagtccacaagaccactgatgtctttttggtgtcgttttcgacgtgcttttgttactgtaactcacagattattgttgttatgcttaggtgtagtgatggtttgtgtcgttctgcgttacatgaaatatcgatggacaaaagaagaggaggaaacaaggcagatgtatgatatggtggtaaagattatagatgttttacgaagtcataatgaagcctgccaggaaaacaaagatttacaaccttacatgcctattccacatgtacgcgattccttaatacagcctcatgacaggaaaaaaatgaagaaagtctgggatagagctgttgacttccttgctgctaatgagtctagagttcgcacggaaacacgaagaataggtggtgcagattttctggtttggcggtggatccagccttctgcatcctgtgacaaaatattagttataccttctaaagtatggcaaggtcaagcatttcatttagatagaagaaattcaccaccaaatagtttgacaccgtgtctaaagattcggaatatgtttgatcccgttatggaaataggggatcagtggcatttggcaattcaagaagcaattttagaaaaatgcagtgataatgatggcattgttcacattgcagtagacaaaaattcacgtgagggttgtgtatatgttaaatgtctgtctccagaatatgctggaaaggcttttaaagcattgcatggctcttggtttgatgggaaattggttacagtaaaatatttacgactagatagataccaccatcgctttccccaggctctcacttccaacactccattgaagccatcaaataaacatatgaactccatgtctcatcttcgtcttcggactggcctaaccaattctcaaggaagttcctgaaaagattttcttccatttctaagactgttatttacaataggaaaattcctgtttggctttttgtcttcctttttaaatgctttttgtatgtaatatttttattgatgaatacatctctgaacgttccagaagtcttaaggttccaaagggatttagcagtgaggcagcaatgctgagtaggtaggataattatttcattcagtttttggagctcagttaagccaatacatttaaagttttgcatgaggaacactgactttattaagcattttcagatgtggtggttgtatttttgccccaagaagtgtttggataaccacacaaaagcatgatgaaaaggcttcttgtagtcccataatttcttgtgaactaatgttgtgaatttttgtatacagtcacctgcatagttcctacaggctaatgtggtaaaactgttgatttcccaatttaaccttaggtttctgttgcttataagcgattcatttgctacggctggaatatgggaaaattaatttgggcttagtggttacaaatatgtgtaagtggatgtatatgtacttaaactggctttgtatatatgtataaatgctggtggtggtgaaagtagtcttgttttatgaggatgtctgcattaaagcagtaaaataagctttccattttattcataatctaatgtgtgtgtatatatgtatgtgtgtatgtgtgtgtatatatagatgtatatatatacacacacagagatatatacatatggctgtacttttgcatagatcaaacagccaaacacctggaagtattagatacaagtttaaaatatcttttataggttttatataaaaatgtctgagtatgattttgtgtgaaagttctgataccagttgtaatagagtcaaatttatgtgagcaataaagaagaaattggcagatattggaaaaatattttgtgaaaagctgtatttattataaatactagggccatgacatagtaccattggggttaagtcattttcccaatctatttataatttaatgatatgttagtgcctctgttatatgtcaagtttaaagcagggcacattgttgcagcaaaatgtgtatttgacaaattatacttgcaattttgggtcatgaaagtttgcaatatagtaaatgcacgattgactgttgctttgtgcctcagtatttaatttgtttcagtaaacttactttattactgtttatgatttcagataaaaatagttgctgagtaaattttacttgtaatctacaattggctttttaaaaataacctgttgatatataattgtcagtccaaatgaatatgtgaaacagctggaattgtacaaattttggttgtatttaaagctcagtttcctttttgttttattgtatgcgttgggtttgcagcatgaacttgcacagataatgcacgttttctggttaagtaaacatgatgcacactattctgtaacagaaagccctattgtgccttacctgtgtgcttttgtgggcaccttgtttatgaagaataaaaaatgatttgttatctgaagagaataaattttaaattctcagtttatgtctcagatgctaacgtgtgaaaatataaatatatataatatataaagtaaccagtcttcctgtattttatgtgcatcatagtgatttatctgagcttagtgacccccatcttgtaacctgttgcaagagtgaatgtaaaaaatagttgtggcattttaaaaggtcgcctttgatgcagatgcatctttttcttgcttctaaaacatatttcatgtaaacattgtacatttattattgtaatatatactattatgcagcttattttacctgaaactgttaagccgaccaagatccctccctgcaagacagatgggaatgtgtataataactaggtatttgagaagttctgaagtttgatgtaatctgttacttgtcctgttaaaaaaaggaaaaaattctaattaaaaatttattagtttttaaaaaaaaaaaaaaaaaaaaaaaaaaaaaaaaaaaaaaaaa

SEQ ID NO: 827 - DNA, 1954 bp, human
acaccctctgccgactccaagacgctgcctcttcctgcgggcgaggcgcgcggtctggtactcgtgcgtcttttatcgcctgagtttccctccgccgactagcgcgcggggcccggttctccatcgcgcgcacggcagcctagcgcaatgaggcgggcaccctgcgttcgagataagttgcgggagatagtaggagcatccacaaactggagagaccatgtgaaggcaatggaagaaaggaaattacttcatagtttcttggctaaatcacaggatggactgcctcctaggagaatgaaggacagttatattgaagttctcttgcctttgggcagtgagcctgaattacgagagaaatatttgactgttcaaaacaccgtaagatttggcaggattcttgaggatcttgacagcttgggagttcttatttgttacatgcacaacaaaatccactccgccaagatgtctcctttatcgatagttacagccctggtggataagattgatatgtgtaagaagagcttgagcccagaacaggacattaagttcagtggccatgttagctgggtcgggaagacatccatggaagtgaagatgcaaatgttccagttacatggtgatgaattttgtcctgttttggatgcaacatttgtaatggtggctcgtgattctgaaaataaagggccggcatttgtaaatccactcatccctgaaagcccagaggaagaggagctctttagacaaggggaattgaacaaggggagaagaattgccttcagctccacgtcgttactgaaaatggcccccagcgctgaggagaggaccaccatacatgagatgtttctcagcacactggatccaaagactataagttttcggagtcgagttttaccctctaatgcagtgtggatggagaattcaaaactgaagagtttggaaatttgccaccctcaggagcggaacattttcaatcggatctttggtggtttccttatgaggaaggcatatgaacttgcgtgggctactgcttgtagctttggtggttctcgaccgtttgtggtagcagtagatgacatcatgtttcagaaacctgttgaggttggctcattgctctttctttcttcacaggtatgctttactcagaataattatattcaagtcagagtacacagtgaagtggcctccctgcaggagaagcagcatacaaccaccaatgtctttcatttcacgttcatgtcggaaaaagaagtgccattggttttcccaaaaacatatggagagtccatgttgtacttagatgggcagcggcatttcaactccatgagtggcccagcgaccttgagaaaggactaccttgtggagccctaagaacaccacatttgttgaaaactagcactctacccacagtgacgtggtatctgatgaagacctgatcgagtgtattgattttagtattgcttcgtgtcctccacacaggaggaggatgtattcagcctttaggatgatcagaaaagcagaaagagagagtggccggatggggctgaggggagaaagaattattaaacaataaatactttcaagacaattttaattgtgaacctaccatgttgcctcccatcttctgaaaaaacaaaaaaattataggcatgagccactgcacccggccggtggaaagcatttttaacaaaaaatttttaggccaggcacagtggtggctcatgcctgtaatcccagcactttgggagactgagatgggaggatcgcttgagaccagcctggggaacatagtgagaccctttctctacaaaaagttaaaaaattatctgagcatggtggtgtgcacctgtagtcccagttaggaggctgaggtgagtggattgcttgagtccgggagtttgagtctgcagtgagctatgatcatgccactgcactccagtctgggtgacagcaagac

SEQ ID NO: 828 - DNA, 3984 bp, human
atattgtctactgaaagctgccgctgaagctgccgccgttgcctccgccgccaagagtgagcgagcggacccgcgatggagaccatggcgagcccagggaaagacaattatcgaatgaagagctataagaacaatgctctaaaccctgaagaaatgagacgaagaagagaggaagagggcattcagctccggaagcagaagcgagagcaacaactttttaaacggagaaatgtggagctgattaatgaagaagctgccatgttcgatagtcttctcatggactcttatgtgagctctaccactggggagagtgtgatcacaagagagatggtggagatgctcttttctgatgattctgacctgcagttagcaaccacacagaaattccggaaactgctctccaaagagcctagtcctccaatagatgaagttatcaacactccaagagtggtggatcggttcgtggagtttctgaagaggaatgagaattgtacattacagtttgaagctgcctgggctctaacgaatattgcctctggaacctctcagcagaccaaaattgtcattgaagcaggggctgtccccatttttatagagctgcttaattcagactttgaggatgttcaggaacaggcagtctgggcactgggaaacatagctggagatagctctgtttgccgagattacgtcttgaactgttccatccttaatcctttgttaacactccttaccaagtccacacgactgacgatgacacggaatgcagtctgggccctgtcaaatctctgccgagggaaaaacccacccccagagtttgcaaaggtctctccttgtttgcctgtactgtctcgcctactcttcagcagcgactcggacttgctggcagatgcttgctgggccctttcttatctgtctgatggccccaatgagaagatccaggcagtcatagactccggagtctgccggagattggtagagctgctgatgcacaatgattacaaagtggcttctcctgccctgagagccgtgggtaacatcgtcactggggatgacatccagacccaggtcattcttaactgttcagccctaccttgccttctccacttgttgagcagtcccaaggagtcaatccggaaggaagcttgctggactatttcaaatattactgctggcaacagggctcaaatacaggctgttatagatgcaaatatcttccctgtgttgatcgaaatccttcagaaagcagagtttcgtacaaggaaagaggcagcctgggccatcaccaatgccacatcaggaggaacccctgagcagatcaggtacctggtctcactgggctgcatcaaacccctatgtgacttgctgactgtaatggattcgaagattgtgcaagtggccctcaatggactggagaacatcctgcggcttggagagcaagagggcaagcgcagtggctcaggggtcaatccttattgtggcctcatagaggaagcctatggcttggataaaattgagtttctccagagccacgagaaccaggagatctaccagaaggccttcgacctcattgagcactactttggtgtagaagacgatgatagcagcctggctccccaagtcgatgaaacgcaacagcagttcatcttccagcagcctgaggcccccatggagggcttccagctataatatctgcctccagggaggggaggggatgggaagcaccaccagccagcggaagagcagccctctggtgggcgggaaaccagtgtccccaccatcagccaccacacacctctgctgccctggagactgtgctcttgacctgctccgcccccttccctggagggagcaccctctggacagacagaaccatctgaggctcacctttgggttttgtgacaagaaggggacgtgttgggtttttcttccttacactatattttggctgcacacatgtctttaacccaggagcccaggggtagacaaaggaggactaaggtaatcaatttgcacctttttttatttttattttttttctttttttcttcagtggtgacttccttccctttatcttttttcattcttcccggtcctctgccctgatctgtgtaactcttatcttgggtacttgagcagacggtatattccagaggtgggaggtgggaggggaagggagaaatccaaaacaaagtgttcttgctctgacagaatattaatcttgtacgcttggattgagttatttaatttttttttcttttgcacatttttcttgtattaagattgctcttcccaagagccacaagttcctggttttagtaaacccagctgcctgcattgcctgggactagaggctggggaggctaccatgaaacaaaggtccctccctccctctgactctttgcccagacctctttagtttgggggatcctcctcactctcctgaagtgtctcaagtataccagtgggagtgcaggggaggagcacaggccttcagatggggcttcccacgtgtagctactgatcccatatttcctactcaccttccaaatggtgcgacccaacttcatttgtttacttgaaaattccccctcgaggttgagagaacctctgaggtggctgtattttctcctaagcttgagatagggggctgtggtccttcctttctcctgaggagaaagtccttgctctggtgacctgtaagttgcagaggagggtggagtgagagtgtcatgtattgggatagtcagggatccctgcctttggcctttcttcttcttcttcttcctcttccatagttggatcatgtatattttacttctaaaggagagaatgtcaaaaagttctgtatttttttatattctatatattaggtaggtcaatcttaattggtctcaagaggaagaactgtctgtcatttcggtaagtaggatactgtgaggaagaccaaaaagagatatggatgcttcctcgctcaggaggcctgagcttggtccttttcctctctgcttggattctggaccaccacctgggaccaaccttcagctctggaaccttcataaagcaggtcagcgtggcctgattgtcccaggacctgaagggagcaaggatggcctcagggcctggtgaagtctgctactctgtccttactgctgaacatcctgcttgtatcaggaaactcagaagcagtttgccttgtcaaattcaatctcaatggccattgtccacataactgatcacccatggctgcctctcctattatctattatcactgaaacttagtagcctgctttttttttttttttttttagagctattgcgtatcttccctgtttgggatccttgtacctggtttgggttttcccttccttgtgacaattataatccagatgcctcttctttctgtttgaattacggtagtgcattgccttagtggcttgcctgtgcctctgggtggattacatatgatagtaaagcccacctgtttggatgggagtagaggaagttggtgtagaccagctgtggagctgaaggcacagtctgccccacccccacctccccactgtggttagtcagaggcatcctgctccaagctctgcttttccttcctctgaaacaatgccattcttgcttctattgctacacatctccttctggctcaggtgaaatccatgcccttctgcttatagacctaaagttcaggtacttattattggccattgatcttgaatttgccctctcctagtgctgcagtcccacttcaaagccattttctgaggaggatggtttaggtctggcaattgtccttgaaaaatcccacccatgttgtaccaccttggtgagtcatatgccactcatcagcttgggaatgatggctgccaactcccaatctcccaggaaggcagggggcagaatctttttttcacttggcctgctacctccattaaaaaaccattctcttacagtttaaaaaaaaaaaaaaaaaaa

SEQ ID NO: 829 - DNA, 3253 bp, human
actacttctgcgcctgcgcgaccgtgattccccgctcgcgactccccaccccccagggctccctaaagagggccacgagctgcgaaagggcgggaaaggcagttggagaagaggtaagcggttactcactccatggctgcagcaaggagaggcggcggcggcctcggctgaagaaagaagaaatcttcccaaggctgcagacaccgacggatttgctttgggagccagagtagctgccgccaccagagtccggagccatgagcgggtttaattttggaggcactggggcccctacaggcgggttcacgtttggcactgcaaagacggcaacaaccacacctgctacagggttttctttctccacctctggcactggagggtttaattttggggctcccttccaaccagccacaagtaccccttccaccggcctgttctcacttgccacccagactccggccacacagacgacaggcttcacttttggaacagcgactcttgcttcggggggaactggattttctttggggatcggtgcttcaaagctcaacttgagcaacacagctgccaccccagccatggcaaaccccagcggctttgggctgggcagcagcaacctcactaatgccatatcgagcaccgtcacctccagccagggcacagcacccaccggctttgtgtttggcccctccaccacctctgtggctccagctaccacatctggaggcttctcattcactggtggaagcacggcccaaccctccggtttcaacattggctcagcagggaattcagcccagcccacggcacctgccacgttgcccttcactccggccacgccagcagccaccacagcaggtgccacacagccagctgctcccacacccacagccaccatcaccagtactgggcccagcctctttgcgtcaatagcaactgctccaacctcatctgccaccactggactctccctctgtacccctgtgaccacagcgggcgcccccactgctgggacacagggcttcagcttaaaggcacctggagcagcttccggcacctccacaacaacatccaccgctgccaccgccaccgccaccaccaccagcagcagcagcaccaccggctttgccttgaatttaaaaccactggcgccagccgggatccccagcaatacagcagctgccgtgaccgctccacctggccctggcgcagctgcaggggcggctgccagctccgccatgacctacgcgcagctggagagcctgatcaacaaatggagcctggagctagaggaccaggagcggcacttcctccagcaggccacccaggtcaacgcctgggaccgcacgctgatcgagaatggagaaaagatcaccagcctgcaccgcgaggtggagaaggtgaagctggaccagaagaggctggaccaggagctcgacttcatcctgtcccagcagaaggagctggaagacctgctgagcccactggaggagttggtcaaggagcagagcgggaccatctacctgcagcacgcggatgaggagcgtgagaaaacctacaagctggctgagaacatcgacgcacagctcaagcgcatggcccaggatctcaaggacatcatcgagcacctgaacacgtccggggcccccgccgacaccagtgacccactgcagcagatctgcaagatcctcaatgcgcacatggactcactgcagtggatcgaccagaactcggccctgctgcagaggaaggtggaggaggtgaccaaggtgtgcgagggccggcgcaaggagcaggagcgcagcttccggatcacctttgactgagcgacagcagccctggggcccgcaggtccctagggagttcatgaggggaatgcgccctgttgtctgtagtttggggttgtggcaagatacttgtttgtttctttctttctttcacatgactgcccttgacatgatcgctgtgtgctttgcgtttttccatttaggagggtattctgggccttctgcccaggcagcagcctcatgggtgtggcttctgtggctttcatttgagtatctttggccccttttcacctactgcgaccacccacctcatcctggctcagcctggtgatggagaagtgctgatggtcttggtcccagccagggtcgtgggggcagccactctctccaaagcatagtcataggtgtcatgaaaaaataccaaatgtaagagaacctccaagtcagggcgcagtggctcacccctgtaatctcagcactttgggtggccaaggcgggcagatgacttgaggtcaggagttcgagaccagcctggccaacatggtgaaaccccgtctctactaaaaatacaaaaattagtcaggtgtggtggacgcctgtgatctcaatctcagctactcgggaggctgaggcaggagaatcacttgaacccaggaggtgttgcagtgaaccaagatcacaccactgcactccagcctaggcaacagagactctgtctcaaaaaaaaaaaaaaaaaaaaagaaactcccaggagacagcagcctagttttcgagtgtgagcttgtgcttgtgaaagctaaccatgctaaccaccaaggcaaagcagcacagtgtgaatagaacagagcgggatcaagaatttcacagaagacaggtcagctgaggggcctgcacacacagggtgttgaggaaccacagatgggcgccgagaggcctgccttttgcctggcccaggctcacccccaccttgggcctcacctcctccaggaagccttcccagctacccgaagctcaggtggccttcttgcaggtccccgtagcaccctgagcctgtaccttgggtggcacttgttatgctatcctgtgctagccgtttgtgcctcgtctcgctgttagattgtgagttcccatgggcagagacccactgtcgttccccgtgtgtccccagcccggtccctgtcacatttgttaaatgaaagaacaatgaagcccagtgtaacgtcagtccacagaaatagccacagcttccagtggtggccgtagacttggctcggaacttagtggcaccagagtaactctagtcagttacagtaaaatccactgtgtgtggaaggcagaagctagcggttgtatcccaagcatcttttgtatttgtctttatactttgctgaattctctgaaatacctattactgtatgttgcttttctaaataaatgtattgtgaaaccaaaaaaaaaaaaaaaaa

SEQ ID NO: 830 - DNA, 2131 bp, human
ctctttataatttagtttccatagaagttatatgtgcatttaaaaaaattcaatgctggagcgaccgtgtctggggagccgagccccgcttctcgctgcggtgagcccggactggggcacgcactgcgcagactccccgctgcagtgggcggagtcccacaggccccgcccctcctcccaccctcgttcagcctgtccagacagaagctggggcccagcggaggtagcagcagacgcctgagagcgaggccgaggccctcagggtttggagaccctgacacacccaccttctcacctgggctctgcgtatcccccagccttgagggaagatgaagcctaaactgatgtaccaggagctgaaggtgcctgcagaggagcccgccaatgagctgcccatgaatgagattgaggcgtggaaggctgcggaaaagaaagcccgctgggtcctgctggtcctcattctggcggttgtgggcttcggagcctgatgactcagctgtttctatgggaatacggcgacttgcatctctttgggcccaaccagcgcccagccccctgctatgacccttgcgaagcagtgctggtggaaagcattcctgagggcctggacttccccaatgcctccacggggaacccttccaccagccaggcctggctgggcctgctcgccggtgcgcacagcagcctggacatcgcctccttctactggaccctcaccaacaatgacacccacacgcaggagccctctgcccagcagggtgaggaggtcctccggcagctgcagaccctggcaccaaagggcgtgaacgtccgcatcgctgtgagcaagcccagcgggccccagccacaggcggacctgcaggctctgctgcagagcggtgcccaggtccgcatggtggacatgcagaagctgacccatggcgtcctgcataccaagttctgggtggtggaccagacccacttctacctgggcagtgccaacatggactggcgttcactgacccaggtcaaggagctgggcgtggtcatgtacaactgcagctgcctggctcgagacctgaccaagatctttgaggcctactggttcctgggccaggcaggcagctccatcccatcaacttggccccggttctatgacacccgctacaaccaagagacaccaatggagatctgcctcaatggaacccctgctctggcctacctggcgagtgcgcccccacccctgtgtccaagtggccgcactccagacctgaaggctctactcaacgtggtggacaatgcccggagtttcatctacgtcgctgtcatgaactacctgcccactctggagttctcccaccctcacaggttctggcctgccattgacgatgggctgcggcgggccacctacgagcgtggcgtcaaggtgcgcctgctcatcagctgctggggacactcggagccatccatgcgggccttcctgctctctctggctgccctgcgtgacaaccatacccactctgacatccaggtgaaactctttgtggtccccgcggatgaggcccaggctcgaatcccatatgcccgtgtcaaccacaacaagtacatggtgactgaacgcgccacctacatcggaacctccaactggtctggcaactacttcacggagacggcgggcacctcgctgctggtgacgcagaatgggaggggcggcctgcggagccagctggaggccattttcctgagggactgggactccccttacattcatgaccttgacacctcagctgacagcgtgggcaacgcctgccgcctgctctgaggcccgatccagtgggcaggccaaggcctgctgggcccccgcggacccaggtgctctgggtcacggtccctgtccccgcacccccgcttctgtctgccccattgtggctcctcaggctctctcccctgctctcccacctctacctccacccccaccggcctgacgctgtggccccgggacccagcagagctgggggagggatcagcccccaaagaaatgggggtgcatgctggcctgccccctggcccacccccactttccagggcaaaaagggcccagggttataataagtaaataacttgtctgtaaaaaaaaaaaaaaaaaaaaaaa

SEQ ID NO: 831 - DNA, 749 bp, human
atggcggctaacgctactaccaacccgtcgcagctgctgccgttagagcttgtggacaaatgtataggatcaagaattcacatcgtgatgaagagtgataaggaaattgttggtactcttctaggatttgatgactttgtcaatatggtactggaagatgtcactgagtttgaaatcacaccagaaggaagaaggattactaaattagatcagattttgctaaatggaaataatataacaatgctggttcctggaggagaaggacctgaagtgtgaatgagtttccttgacttacactagattttgttttggcttataatgacaagaaaatggaattttttttcccactttctaatgtttaaatcccataaagctaagtttcccgttaaagggaagtgctttgaagatgtgtacccatttttgtaagttaatcatgattatcctggaaaaagaagaaaagaacttcttcttttgcagatgaaaataaaggtgtttttggttaactgtcattttgtttattctactgcagtagccagtggaacaaagtttgtagttattttgccacttacttttctgtcattatatgcttatttgttttgtcatttacgtgaccatttgattctcaaacaaaagttgttccaaacaaaatgatgaactttgatttgaacaggtgcatttaaacaaccggaaatgatcacttagaaaattcaattaaaatgctgttgttttgtaaaaaaaaaaaaaaaaaa

SEQ ID NO: 832 - DNA, 2693 bp, human
ggaagctggagccacctgcggctctgagagggacagacggtgctcagcctgtgtcctggggcaaagctggattcattttcctccctggcgatcttctggggcccacagctggtgatatggaggcactgacaccctggtctcggcgcttgttttagaagaggcagaacagtgataaagacaaggatctaaatgggcaaggacgccctgccctcactgggctcactggcagccctgaccctctattctgcaccctgtgagccaccgagactgaaccaaacccaggaagcggcgccaccaaccagcctcgcagaggcagaggccctggagcagtgacagcacaggagatctgctggctcgggggaaggggaggaaagaggaaaacaaagggagtgatcgagtgagcctcgccccgccctccctgcgccggcccatgatgtgtcagtcagaggcgcggcaaggaccagagctccgcgcggcgaaatggttgcacttcccccagctggccctgaggcggaggctggggcagctgagctgcatgtccagacccgctctgaaactgcgctcctggcccttgaccgtcctctactacctcctgcccttcggcgccctcagaccgctcagccgggtgggatggaggcccgtaagcagggtggctttgtacaagtcagtgccaacgcgcttgctgtcacgggcctggggtcgcctcaatcaggtggagctgccacactggctgcgcaggcccgtctacagcctgtacatctggacgtttggggtgaacatgaaagaggccgctgtggaggacctgcatcactaccgcaacctcagcgagttcttccggcgcaagctgaagccgcaggcccggcctgtctgtggcctgcacagcgtgattagcccatcggatggaaggatcctcaactttgggcaggtgaagaactgtgaggtggagcaggtaaagggggtcacctactccctggagtcgttcctgggcccgcgtatgtgcacagaggacctgcccttcccaccagccgcgtcgtgtgactccttcaagaaccagctggtcacccgggaagggaatgagctctatcactgtgtcatctacctggcccctggggactaccactgcttccactcccccaccgactggactgtgtcccaccggcgccacttcccaggctccctgatgtcagtgaaccctggcatggctcgctggatcaaagagctcttctgccataacgagcgggtggtcctgacgggggactggaaacatggcttcttctcactgacagctgtgggggccaccaacgtgggctccattcgcatctactttgaccgggacctgcacacaaacagcccaaggcacagcaagggctcctacaatgacttcagcttcgtgacgcacaccaatagagagggcgtccccatgcgtaagggcgagcacctgggcgagttcaacctgggctccaccatcgtgctcatcttcgaggcccccaaggacttcaatttccagctgaaaacaggacagaaaatccgctttggggaagccctgggctcgctctagagtctctttcctgattatggctgctaagggatcttttccaaacagagtgagggtcttttcaagagggaggcccatgaggccatccaggtaagggcctgcctcagcgtggttgggagtctgaccaggtaggacttgaatgattcggctaccacctgttccagaggtgcagacaagaggtggcgagagcccccatcatgcccctcaacctatcccgttccttctgcctacaaataaaaagtgcaggctggaatgatctcagtcacatttggatctttttaaacactgtatagacggaagagcctgcattcctgaccgaaccttcagttggtctcggttgtcgttttttcttgctgctcctccccccatcacctgagctgttttctgttggccccttttgttttttggccttaacgctcctgctgcacagggtgaggtgcctccttggcacagactgtggatgcctctcccccagcagagccacacagccttcgtgacaactgctttccgttcccacattcacctcatcctgctctttagaaaaagcagtctttgtgcttgtggctgaacgcatcaccctggactctgctagtgtcttctgaggacactgatgacactgattaatgatacagacctttgcaggacctgatgagtgacccttctggagctggccaggtcctctgcagcaggcaagaccaatcaatcactgaacctgcctcatggcaccagagtgaacagggcaggcaggtagtaggcccagctggggaaatgggagagttcctgtccccctccacatatccctacatgaaatatgggaaagttgctgctattgattcagggtctgtcttggaggcagaggacccttggtggatagttggtcagtgcctggaaaacctgtcccagtttatcaggaacgcaggcctggggagcccccagtggcggggacagggccagatttcatgttgaccctggggatgctgtgaatttctcctgcaggagagacatcattgaattttttcaactgtatcagtagcacagtatttttgtatgaaaagtgggagacttctgaacagtaattcatttaattgcaaagcattttgaaataaaaaaaatcaaacttaaaaaaaaaaaaaaaaaa

SEQ ID NO: 833 - DNA, 2886 bp, human
gcccccgcctcgcgccgcgcgcacgtgactgcgcccccggccccgcccccggcctgccccccgcccccactggccgctcggccgcgcgcgggtcggccggctctatggggaaagcggcggctccgagccgaggcggcggctgtggcggccgctcccgcgggctctcgtcgctgttcacggttgtcccctgcctgtcgtgccacacggcggcgccgggcatgagcgcttccacgtccggctccgggccggagcccaagccccagccccagcccgtgcccgaaccggagcggggaccgctgtcagaacaggtgtcggaggcagtttcggaggcagtgccaagatcggaacctgtgtccgagacgacgtctgagccggagccaggggctgggcagccatcggaactgctgcaggggtcgcggccggggtcagagtcaagctcaggtgtaggggctgggcccttcactaaggccgcatcggagccgctctcccgggcggtggggagcgcgacctttctcagacccgagtcaggatcgctgccagcgttaaagcccctgcctcttctgcgaccaggacaggcgaagactcctcttggggttccaatgtcggggactggcacgacctccagtgccccactggccttactgcctctggacagcttcgagggctggcttctcaagtggaccaactatctgaagggctaccagcgccgctggttcgtgctgggcaatggtttgctctcttactacagaaatcagggtgaaatggcccacacgtgccgtggaaccatcaacctgtccaccgcgcacattgacacggaggactcttgtggtatcttgctgaccagtggggccaggagctaccacctcaaggccagctcagaggtggaccggcagcagtggatcaccgccctggagctggccaaggccaaggctgtccgcgtgatgaacactcattcagatgactctggggacgacgacgaggctaccaccccagccgacaagagcgagctgcaccacaccctgaagaatctttccctgaagttagatgacctcagcacgtgcaatgacctcatcgccaagcacggcgctgcactccagcgctccctgacagagctggacggcctcaagatcccatctgagagtggggagaagctgaaggtggtgaatgagcgggccaccctcttccgcatcacatccaatgctatgatcaacgcctgcagggacttcttggaactagcagagatacacagtcggaaatggcagcgggcactgcagtatgagcaggagcagcgcgtgcacttggaggaaaccattgagcagctggcgaagcagcacaacagcctcgagcgggccttccacagtgcccctggccggccggccaacccctccaagagcttcattgagggaagcctcttgactcccaaaggagaggacagtgaggaagatgaagataccgagtactttgatgccatggaagactccacatccttcatcaccgtgatcaccgaggccaaggaagacagcagaaaagctgaaggtagcaccgggacaagttccgtggactggagctcagcagacaatgtactagatggtgcctcgctcgtgcccaagggttcatccaaagtcaagaggcgagtccgcattcccaacaagcccaactacagccttaacctctggagcatcatgaagaactgcatcggccgggagctctccaggatccccatgccggtgaacttcaatgagcccctgtccatgctccagcggctgacagaggacctggagtaccaccacctgctggacaaggcagtgcactgcaccagctcagtggagcagatgtgcctggtggccgccttctctgtgtcctcctactccaccacagtgcaccgcatcgccaagcccttcaaccccatgctgggggagaccttcgagctggaccgcctcgacgacatgggcctgcgctccctctgtgagcaggtgagccaccaccccccctcagctgcgcactacgtgttctccaagcatggctggagcctctggcaggagatcaccatctccagcaagttccggggaaaatacatctccatcatgccgctaggtgccatccacttagaattccaggccagtgggaatcactacgtgtggaggaagagcacctcaactgttcacaacatcatcgtgggcaagctctggatcgaccagtcaggggacatcgagattgtgaaccataagaccaatgaccggtgccagctgaagttcctgccctacagctacttctccaaagaggcagcccggaaggtgacaggagtggtgagtgacagccagggcaaggcccattacgtgctgtccggctcgtgggatgaacaaatggagtgctccaaggtcatgcatagcagtcccagcagccccagctctgacgggaagcagaagacagtgtaccagaccctgtcagccaagctgctgtggaagaagtacccgctgccggagaacgcggagaacatgtactacttctcagagctggccctgaccctcaacgagcacgaggagggcgtagcgccaaccgacagccgcctgcggcccgaccagcggctgatggagaagggccgttgggacgaggccaataccgagaagcagcggctggaggagaagcagcgcctgtcgcggcgccggcggctggaggcctgcgggccgggcagcagctgcagctcggaggaagagaaggaggcggatgcctacacgccactgtggtttgagaagaggctggatccgctgaccggggagatggcctgtgtgtacaagggcggctactgggaggccaaggagaagcaagactggcatatgtgccccaacatcttctgagcgccacccttgcaacaaatacaggcgcctg

SEQ ID NO: 834 - DNA, 4348 bp, human
gggaggcccagggagaacggggaagggacatttagtttgagacggtgctgagataggatcatgaaggaagaggtgaagggaattcctgtaagagtggcgctgcgttgtcgccctctggtccccaaagagattagcgagggctgccagatgtgcctttccttcgtgcccggagagcctcaggtggtggttggtacagataaatccttcacctacgattttgtatttgatccctctactgaacaggaagaagtcttcaatacagcagtagcgccactcataaaaggtgtatttaaaggatataatgcaacggtcctggcctatgggcagactggctctggaaaaacctattcaatgggaggtgcatatactgcagagcaagagaatgaaccaacagttggggttattcctagggtaatacaactgctcttcaaagaaattgataaaaagagtgactttgaatttactctgaaagtgtcttacttagagatttacaatgaagaaattttggatcttctatgtccatctcgtgagaaagctcaaataaatatacgagaggatcctaaggaaggcataaagattgtgggactcactgagaagactgttttggttgccttggatactgtttcctgtttggaacagggcaacaactctaggactgtggcctccacggctatgaactcccagtcgtcccgatctcatgccatctttacaatctccttagagcaaggaaagaaaagtgacaagaatagcagctttcgctccaagctgcatcttgtagacctcgctggatcagaaagacagaagaaaaccaaggctgaaggggatcgtctaaaagagggtattaatattaaccgaggcctcctatgcttgggaaatgtaatcagtgctcttggagatgacaaaaagggtggctttgcgccctacagagattccaagttgactcgactgcttcaagattctctaggaggtaatagccatactcttatgatagcctgtgtgagtcctgctgactccaatctagaggaaacattaaatacccttcgctatgctgacagagcaagaaaaatcaagaacaaacctattgttaatattgatccccagacagctgaacttaatcatctaaagcaacaggtacaacagctacaagtcttgttgctacaggcccatggaggtaccctgcctggatctataactgtggaaccatcagagaatctacaatccctgatggagaagaatcagtccctggtagaggagaatgaaaaattaagtcgtggtctgagcgaggcagctggtcagacagcccagatgttggagaggatcatttggacagagcaagcgaatgaaaaaatgaacgccaagctagaagagctcaggcagcatgcggcctgcaaactggatcttcaaaagctagtggagactttggaagaccaggaattgaaagaaaatgtagagataatttgtaacctgcagcaattgattacccagttatcggatgaaactgttgcttgcatggctgcagccattgatactgcggtggagcaagaagcccaagtagaaaccagtccagagacgagcaggtcttctgacgcttttaccactcagcatgctctccgtcaagcgcagatgtctaaggagctggttgagttgaataaagcgcttgcactgaaagaggccctggctaggaagatgactcagaatgacagccaactgcagcctattcagtaccaataccaggataacataaaagagccagaattagaagtcatcaatctgcaaaaggaaaaggaagaattggttcttgaacttcagacagcaaagaaggatgccaaccaagccaagttgagtgagcgccgccgcaaacgtctccaggagctggagggtcaaattgctgatctgaagaagaaactgaatgagcagtccaaacttctgaaactaaaggaatccacagagcgtactgtctccaaactgaaccaggagatacggatgatgaaaaaccagcgggtacagttaatgcgtcaaatgaaagaagatgctgagaagtttagacagtggaagcagaaaagagacaaagaagtaatacagttaaaagaacgagaccgtaagaggcaatatgagctgctgaaacttgaaagaaacttccagaaacaatccaatgtgctcagacgtaaaacggaggaggcagcagctgccaacaagcgtctcaaggatgctctccagaaacaacgggaggttgcagataagcggaaagagactcagagccgtggaatggaaggcactgcagctcgagtgaagaattggcttggaaacgaaattgaggttatggtcagtactgaggaagccaaacgccatctgaatgacctccttgaagatagaaagatcctggctcaagatgtggctcaactcaaagaaaaaaaggaatctggggagaatccacctcctaaactccggaggcgtacattctcccttactgaagtgcgtggtcaagtttcggagtcagaagattctattacaaagcagattgaaagcctagagactgaaatggaattcaggagtgctcagattgctgacctacagcagaagctgctggatgcagaaagtgaagacagaccaaaacaacgctgggagaatattgccaccattctggaagccaagtgtgccctgaaatatttgattggagagctggtctcctccaaaatacaggtcagcaaacttgaaagcagcctgaaacagagcaagaccagctgtgctgacatgcagaagatgctgtttgaggaacgaaatcattttgccgagatagagacagagttacaagctgagctggtcagaatggagcaacagcaccaagagaaggtgctgtaccttctcagccagctgcagcaaagccaaatggcagagaagcagttagaggaatcagtcagtgaaaaggaacagcagctgctgagcacactgaagtgtcaggatgaagaacttgagaaaatgcgagaagtgtgtgagcaaaatcagcagcttctccgagagaatgaaatcatcaagcagaaactgaccctcctccaggtagccagcagacagaaacatcttcctaaggatacccttctatctccagactcttcttttgaatatgtccagcctaagccaaaaccttctcgtgttaaagaaaagttcctggagcaaagcatggacatcgaggatctaaaatattgttcagagcattctgtgaatgagcatgaggatggtgatggtgatgatgatgagggggatgacgaggaatggaagccaacaaaattagttaatgtgtccaggaagaacatccaagggtgttcctgcaagggctggtgtggaaacaagcaatgtgggtgcaggaagcaaaagtcagactgtggtgtggactgttgctgtgaccccacaaagtgtcggaaccgccagcaaggcaaggatagcttgggcactgttgaacggacccaggattcagaaagctccttcaaactggaggatcctaccgaggtgaccccaggattgagcttctttaatcccgtctgtgccacccccaatagcaagatcctgaaagagatgtgcgatgtggagcaggtgctgtcaaagaagactcccccagctccctccccttttgacctcccagagttgaaacatgtagcaacagaataccaagaaaacaaggctccagggaagaaaaagaaacgggctctggccagcaacaccagcttcttctctggctgctcccctatcgaagaagaggcccactgaagttggagtcatcatctctacccccagtctggcttgggagatgctttcaggttgcagccagaaggggttttttaaatgacttctctggatttcaggtttcttgctgttgaaaaaaggaacaaagcgttactgaaaagaaggtaacctttgttggatgtgggccttagcctccaggtccagactactactctatgttctccagaagggtgctaagtcacctactgaagagagaaccaactgactttcctattgactcatcaggaaccagtcctcagtctggtcaagttgtttcttatttgtgagcagttcaggctatctcctgatggggatgaggccaaggctttcttatcttttggttgtctctgcttaatggaggagcctggcctaggatggaggcctggcttagatctttcattccacctcaggaatgaggttgtgatctttcctgtcctgaccctctctgaattatgtttcaatagtactcttgattgtctgccatgttgttgaagcaaatgaattatttttaaatgttaagtaagtaaataaaccttagcccgtctttttttttttttttttttttttttttttt

SEQ ID NO: 835 - DNA, 3698 bp, human
ggctcggggcggtcccacagcgccccctgcggcccgggccgtggccgatggggcggggaggccgctggggatagctgggaccccggggagggcgagggaggccaagggtgagggaagagagcccgggaggggggatgggggcggggactgggggcgaaggggcgggggaggccatgatggagcctggccgggggcgaaaggtgcgagagtggcgggactgggtgaagagtgggattgggagaggtgggggtgggttcgcggagaaagatcgggaaagaagagagagggcggagatgaggggactgaggggaccaggggacaggtggggaccagtttcccctcctgggatatttggtgtgcgacatgcccttcccccagccccagcgcccgttccctttggaagcctgggtgctcctcagaccacttggggactccctgcttcaccttcctgcatttgcaagagcttgtctcctgaggtggagagggggcctctgaagaaaggggctcccagcccaggccatcaacaaactaacgactctgtgtgaccttggatgccccctccagggatccccccaccctttcctccgatggggctaccccccatgagtcagagaccaccagctatcccccccatgccacctggcatcctgcccccaatgcttccaccaatgggggcgccaccaccactcacacagataccaggaatggtacctccgatgatgccaggaatgctgatgccagcggtgcctgtcaccgcagcgacggctccgggtgcggacaccgccagctctgctgtggctgggacaggccctccgagggccctatggagtgagcatgtggccccagatgggcgcatctactactacaatgctgacgacaagcagtccgtgtgggagaagcccagcgtgctcaagtccaaggcagagctgctcctgtcccaatgtccctggaaagagtacaagtcggacacaggcaaaccttattactataacaaccagagtaaagagtcccgctggacccggcccaaggatctggatgacctagaggttctagtcaaacaagaggctgcagggaaacagcagcagcagctgccacagacacttcagccacagccacctcagccacagcctgaccccccacctgtgcctcctggccccaccccagtgcccacaggcctcctggaacctgagccaggtgggagtgaagattgtgatgtgttggaggccacccagcccctggaacaggggttcctgcagcagctggaggagggccccagcagttctggacagcatcagccacagcaggaggaggaggaatcaaagccagaaccagagaggtctggcctcagttggagcaaccgggagaaggcaaagcaggcattcaaggaactgctgagggacaaggctgtcccctccaatgcctcatgggaacaggccatgaagatggtggtcaccgacccccgttacagtgccttgcctaaactgagtgagaaaaagcaggcattcaatgcctacaaggcgcagcgggagaaggaggagaaggaggaggcccggctaagggccaaagaggccaagcagaccctgcagcatttcctggagcagcatgaacgcatgacctccaccacccgctaccggcgggcagaacagacctttggggagctggaggtctgggctgtggtccctgagagggatcgaaaagaggtttatgatgatgtcctcttcttcctggccaagaaggagaaggaacaggccaagcagctccggcgccgcaatatccaggccctaaagagcatcctggatgggatgagtagtgtcaacttccaaaccacgtggtcccaggcccagcagtacctcatggataaccccagctttgctcaggaccatcagctgcagaacatggacaaggaagatgcactgatctgttttgaggagcacatccgagctttggagagggaagaggaggaggaacgggagcgggcccggcttcgggagcgacgccaacaacgcaagaatcgggaggccttccagaccttcctggacgagctgcatgagacagggcagctgcactctatgtccacctggatggagctatatccagcagtcagcactgatgtccgctttgccaacatgctgggccagccgggctccacccctctggacttattcaagttctatgtggaggagttgaaggcacgattccatgatgaaaagaagatcattaaggacatccttaaggtgaacacggcctttgaggacttcgcccacgtcataagctttgacaagagggctgccgcactggacgcaggcaacatcaagctgaccttcaatagtctgctggagaaagcagaggcacgggagagggagcgggagaaggaggaggcacgcaggatgcggcgcagggaagctgcctttcgaagcatgctgaggcaggctgtgcctgctctggagctaggcactgcctgggaagaggtccgtgagcgttttgtgtgtgactcagcctttgagcagatcaccctggagtcggagcggatccggctcttccgggagttcctacaggtgctggagcagactgaatgccagcacctccacaccaaaggccgaaagcatggcaggaaaggcaagaagcaccatcacaagcgttcccactcaccttcaggctctgagtcagaagaagaggagctgcccccaccatctctccggccccccaagcggaggaggcggaacccctcagagtcaggctctgagccctcttcctcacttgattcagttgaaagtgggggtgctgcccttggaggacggggctccccttcctcccatcttcttggagcagatcatggccttcggaaagccaagaaaccaaaaaagaaaactaagaagagaagacacaagtcgaatagtcctgagagtgagacagaccctgaggagaaagctggcaaggagagcgatgagaaagaacaagaacaggacaaggacagggagctccaacaggcagagctccctaaccgttccccaggctttggaatcaagaaggagaagacaggctgggacacgtcagaaagtgagctgagtgagggtgagctggagaggcggcggcggacactcctacagcagctggatgatcaccagtgacccaatgagctgttctctgcctcgggtctgtgtgaggccatggctcctgggccaccctcaccgtctgcctcagacttcttctttagtctggtctgtgtccactttttctaaagtaaccccacccccagcacaccattgttggcacctctcaaggttgctcttggtgttcaagggtcccctactccctggactagtgcagtccttgccctcagccccagaccagagatgggtggtatatgccatgtggggtgggtgatgccagtagataaaagtgtgagagaaggggtctccagggaagagtcacaggctgttggacgcagcctgggtggcagagggcagggtcatcaccctctagcatcagtgcctgctcctgcctgccctggccctgaggctccaccacttcttcctccacccaggacctaatgtacgtgtgttttgttttttgttttttaaataacaatatttataacatggaaaaaaaaaaaaaaaaaaaaaaaaaaaaaaaaaaaaaaaaaaaaaaaaaaaaaaaaaaaaaaaaaaaaaaaaaaaaaaaaaaaaaaaaaaaaaaaa

SEQ ID NO: 836 - DNA, 2221 bp, human
tgaaagaaccatctggttgagtctaaagttggaagatcaccatatccaccagaagacccaggatggatctgcaacaaagcaccaccatcacttccctagagaaatggtgtttggatgagtcactgtctggctgcagaagacattatagtgtcaagaaaaaactgaagttaattcgagtcttaggccttttcatgggtctggtagccattagcactgtctcattttcaatcagtgccttttctgagacagatacacagagcacaggagaggccagtgttgtaagtggccctagggtagcacagggttaccatcagagaactctcttagatttaaatgacaagattctggattatactccacagccacctctttctaaggaaggcgagtctgagaatagtacagatcacgcccaaggagactacccgaaagacatcttttcccttgaggagagaagaaaaggtgcgatcattctgcatgtcattggaatgatctacatgttcatagccttagccattgtctgtgatgagttctttgttccttctttgactgtcatcactgaaaaactgggcatctctgatgatgtggctggagccaccttcatggctgcaggagggtcagccccagaacttttcacatctctcataggggtatttatcgctcacagcaacgttggcataggcacaattgtaggttcagcagtattcaacatcctctttgttattggcatgtgtgctctgttttctagagaaatcttaaacctgacatggtggccgctctttcgagatgtgtctttctacattgttgacttgatcatgctgatcatatttttcctggataatgtcatcatgtggtgggaaagcttgcttctcttaacagcttatttttgctatgtggttttcatgaaattcaacgtccaagtagaaaaatgggtgaagcaaatgataaaccgcaataaggtcgtcaaggtgacagcaccagaagcccaagcaaagccatctgcagccagggacaaggatgaaccgactctaccggctaagccgcgtctccagcgaggtggaagctctgcctccctccacaacagtctcatgaggaatagcatcttccaactcatgatacacacccttgacccactcgccgaagaacttggatcatatggaaaactaaaatattatgacacaatgactgaagaagggaggttcagagaaaaggcttcaattctccacaagatcgccaagaagaaatgtcatgtggatgagaacgagcggcagaatggggctgccaaccacgtggaaaaaattgagcttccaaacagcaccagcacagatgttgaaatgacaccatccagtgatgcttcagaacctgtacaaaatggaaatctctcccacaacattgaaggtgcagaagcccagaccgctgatgaggaggaggaccagcctctcagccttgcctggccttctgaaacccgcaagcaagtcacgtttctgattgttttccccatagtgtttcctctctggattacgttacctgacgttcgcaaaccttcatcgaggaagttttttcccatcacgttctttggctccattacctggattgcagtattctcttacttgatggtctggtgggcgcaccaggttggagagacaattggcatcagtgaagagattatgggcctgaccatcttggctgctgggacctccatccctgatcttatcaccagtgtcatagtggcccggaaggggttaggggacatggctgtgtccagctctgttggaagcaacatttttgacatcactgtagggctcccactgccctggctcctgtacaccgtcattcacagattccagccagtggctgtcagcagcaatggccttttctgtgccatcgtccttctcttcatcatgctgctcttcgtcatcctctctatcgccctctgcaagtggcgaatgaacaaaatcctgggcttcatcatgtttggcctctactttgtgttcctggtggtgagcgttctcctagaagacagaattcttacatgccccgtctccatctagcaggaaaagccatatcttgcaccagcagcatgaatggtccctccacactctgggctctgggctccttgacctcttgagaagaggcagctggcacacagccctgggtgccaagtgtccctccttggtgaatttgaggagagatggattcacactgggcccattcacttcacagg

SEQ ID NO: 837 - DNA, 1043 bp, human
ctagcgacggccgtagggagcgcttcctcctccccgccgccgccctcgccatggccgcgccggccccgggcctcatctcggtgttctcgagttcccaggagctgggtgcggcgctagcgcagctggtggcccagcgcgcagcatgctgcctggcaggggcccgcgcccgtttcgcgctcggcctgtcgggcgggagcctcgtctcgatgctagcccgcgagctacccgccgccgtcgcccctgccgggccagctagcttagcgcgctggacgctgggcttctgcgacgagcgcctcgtgcccttcgatcacgccgagagcacgtacggcctctaccggacgcatcttctctccagactgccgatcccagaaagccaggtgatcaccattaaccccgagctgcctgtggaggaggcggctgaggactacgccaagaagctgagacaggcattccaaggggactccatcccggttttcgacctgctgatcctgggggtgggccccgatggtcacacctgctcactcttcccagaccaccccctcctacaggagcgggagaagattgtggctcccatcagtgactccccgaagccaccgccacagcgtgtgaccctcacactacctgtcctgaatgcagcacgaactgtcatctttgtggcaactggagaaggcaaggcagctgttctgaagcgcattttggaggaccaggaggaaaacccgctgcccgccgccctggtccagccccacaccgggaaactgtgctggttcttggacgaggcggccgcccgcctcctgaccgtgcccttcgagaagcattccactttgtagctggccagagggacgccgcagctgggaccaggcacgcggcccatggggctgggcccctgctggccgccactctccgggctctcctttcaaaaagccacgtcgtgctgctgctggaagccaacagcctccggccagcagccctacccggggctcaacacacaggctgtggctctggacatccggatattaaaaggagcgttgctggaaaaaaaaaaa

SEQ ID NO: 838 - DNA, 1648 bp, human
gcggggcgggccggtgcgcctggcagtcggctgcgtcctcctgcgagcgccggagaggggctggaggcggggcgagggcgcggctcgaggcatccctgcagggcgctcctccgagtccctcggcgctctgagcccacagggaagaaggaggggccggcgtcagtgacgtcagcgagaccgaggtgagcgtgggcgttgccagtggtgctctgtcagtgcctatggattatggcagggaaagtaaaatgggtcactgatatcgagaagtcagtgctgatcaataactttgaaaagagaggatgggtccaagtgacagaaaacgaggactggaatttttactggatgagtgtgcaaaccatccgaaatgtgttcagcgttgaagctggatatcggctctcagatgaccaaatagtcaaccattttccaaaccactatgaactgacccggaaggacctgatggtgaagaacatcaaaagatacaggaaggagctggagaaagaagggagtcctctggcagaaaaagatgaaaatggaaaatacctctatctggactttgttccagtcacctatatgctgcccgctgactacaacctgtttgtagaggagttccggaagagcccgtccagcacctggatcatgaagccttgtggcaaggcccagggaaagggcatcttccttatcaacaagctctcacagatcaaaaagtggtcccgggacagcaagacatcttcgtttgtgtctcaatctaataaggaagcctacgtgatctctctctatattaacaacccgttactaattggcgggaggaagttcgacctgcgcttgtacgttctggtgtccacgtaccgtccactgcgctgttacatgtacaagcttgggttttgccggttctgcacagtgaaatacaccccgagtaccagtgagctggacaacatgttcgttcatctcaccaacgtcgccatccagaaacacggggaggactacaaccacatccatgggggcaagtggacagtgagtaacctgcggctctacctggagagcacccgcggcaaggaggtgaccagcaagctgttcgacgagatccactggatcatcgtgcagtccctgaaggctgtggcgccggtgatgaacaatgacaagcactgctttgaatgctatggctacgacatcatcatcgacgacaagctgaagccctggctgatcgaggtgaatgcgtccccgtctctcacgtccagcactgccaatgaccgaatcctcaagtacaacctgattaatgacaccctcaacatcgccgtcccgaatggtgaaatcccagactgcaaatggaacaagtcgccacctaaggaagtcctcggcaattacgagattctgtatgatgaagaattggcccagggtgacggggctgaccgggagctgagaagccgtcagggtcagtctctggggcccagagcaggccgatcgagagactcggggagagcggtcctcaccacctggaagtgagtcccacctggaccttatcaaaactactcactccacctgggcccctgctgaagccctattttgaaatttcccttttgtagagcttttttcctttcctaagccctgtaaataaatgaaggcacttctttggaaaaaaaaaaaaaaaaaa

SEQ ID NO: 839 - DNA, 1971 bp, human
ccgacgcagcggtgttgcacctccctctccggctctgctgcccgggatttccccagaacctgcgccgcgcgagaaggagcctgggagcatccgcccacactgcccggacagtcggctcgactcggtgccctcggccccagccgggctccgctcctcgggcgcgcgaggggccgtggtggcggcggcgcccggcatgtttcatagtccgcggcggctctgctcggccctgctgcagagggacgcgcccggcctgcgccgcctgcccgccccagggctgcgccgcccgttgtccccgccggctgctgttcccaggcccgcatccccccggctgctggcggcggcctcggcggcctcgggcgccgcgaggtcgtgttcccgaacagtgtgttccatgggaaccggtacaagcagactctatagtgctctcgccaagacactgaacagcagcgctgcctcccagcacccagagtatttggtgtcacctgacccagagcatctggagcccattgatcctaaagagcttcttgaggaatgcagggccgtcctgcacacccgacctccccggttccagagggattttgtggatctgaggacagattgccctagtacccacccacctatcagggttatgcaatggaacatcctcgcccaagctcttggagaaggcaaagacaactttgtacagtgccctgttgaagcactcaaatgggaagaaaggaaatgtctcatcctggaagaaatcctggcctaccagcctgatatattgtgcctccaagaggtggaccactattttgacaccttccagccactcctcagtagactaggctatcaaggcacgtttttccccaaaccctggtcaccttgtctagatgtagaacacaacaatggaccagatggttgtgccttattttttcttcaaaaccgattcaagctagtcaacagtgccaatattaggctgacagccatgacattgaaaaccaaccaggtggccattgcacagaccctggagtgcaaggagtcaggccgacagttctgcatcgctgttacccatctaaaagcacgcactggctgggagcggtttcgatcagctcaaggctgtgacctccttcagaacctgcaaaacatcacccaaggagccaagattccccttattgtgtgtggggacttcaatgcagagccaacagaagaggtctacaaacactttgcttcctccagcctcaacctgaacagcgcctacaagctgctgagtgctgatgggcagtcagaacccccatacactacctggaagatccggacctcaggggagtgcaggcacaccctggattacatctggtattctaaacatgctctaaatgtaaggtcagctctcgatctgctcactgaagaacagattggacccaacaggttaccttccttcaattatccttcagaccacctgtctctagtgtgtgacttcagctttactgaggaatctgatggactttcataaatacttgcttttgtctttttaatcacaggagtctatttttttttttttttttttttttttgagacagagtctcgctctgttgcctaggctggagtacagtggcctgatctcggctcactgcaagatccgcctcccgggttcatggcattctcctgcctcagcctccagagcaactgggacaacaggcgcccgtcaccacgcccagctaattttttgtatttttagtagagacggggtttcaccgtgttagccaggatggtctcgatctcctgaccttgaatcacaagagtcttaacagggaatgtttcaggaaacaaataggataagacaatgccagaggaaggatagaaacatgggaagtttctatcatttcattttctgcgtttccagcatgcccttggaaaagactccctttagtccctttttcaattaaaacctatggtgaaaaaggcgtttgcactccaaaaaaaaaaaaaaaaaaa

SEQ ID NO: 840 - DNA, 2466 bp, human
  misc_feature 13: n = A,T,C or G
tggtgcggctgtntcacggaccacggcggcgcccgcagctcctcaccgcagcacccccactgcaggctcgaggagctttccggagcttcccacactcctggggagaagacttcttagccagcttgatgtttaaaattcagctggagcccttaaaacttcgagcgtggacgctgaatgggtttgtaaagtttcgaaacaaggagaccagtgctggtccagtggctgtgatgggaaaagattattacaagattcttgggatcccatcgggggccaacgaggatgagatcaagaaagcctaccggaagatggccttgaagtaccacccagacaagaataaagaacccaacgctgaggagaagtttaaggagattgcagaggcctatgatgtgctaagtgaccccaagaaacggggcctgtatgaccagtatggggaggaaggcctgaagaccggcggtggcacatcaggtggctccagtggctcctttcactacacctttcatggggacccccatgccacctttgcctccttctttggtggctccaaccccttcgatatcttctttgccagcagccgctccactcggcccttcagtggctttgacccagatgacatggatgtggatgaagatgaggacccatttggcgctttcggccgttttggcttcaatgggctgagtaggggtccaaggcgagccccagaaccactgtaccctcggcgcaaggtgcaggaccccccagtggtgcacgagcttcgggtgtccctggaggagatctaccatggctccaccaagcgcattgaagatcacaaggcgtcgctcaaccctgatgggcgaactgtgcgcaccgaggacaagatcctgcacatagtcatcaagcgtggctggaaggaaggcaccaagatcaccttccccaaagaaggcgacgcacaccttgacaacatccctgctgacatcgtctttgtgctcaaagacaagccccatgcacacttccgccgagatggcaccaacgtgctctacagtgccctgatcagcctcaaggaggcgctgtgtggctgcactgtgaacattcccactatcgacggccgagtgatccctttgccctgcaatgatgtcatcaagccaggcaccgtgaagagactccgtggggagggccttcccttccccaaagtgccaactcagcgaggagacctcattgttgagttcaaagttcgcttcccagacagattaacaccacagacaagacagatccttaagcagcacctaccctgttcctaggctctgccccagccagtccagagcctaccacagcaatacccccaacactcactccactcaatgtgcacccagcttgatgtccactggacactggcaactttttctaaaatgcaaaaaaaagccactggttttcaggaaaatgttcctgtccctgaccccttttagagctgggctgcctggggggagtgggagggaggtggggagagctagcccaggccaggggtcaatgttcatgtcactagctttcaatccagtttccactgcagtggctggagagtgacctgagtgctacttgaagatatgtagagattccttatccatgcctgtacatagcatgtcctcctcccctcagctttgctaataccagtcccctcccttccctttggcttcctgctgttgggggtggaaaagactagaaaggacattgctttctcagccccacccccaggtccacagtgtccaaggtaatggcacacatattcatgcacaagaagcactcacctagagctgtctgtgcctctctgggagaaaggagagaggataagaagggaaagttcacaacctgtgaacagggacttgagcacgagacacttttcatctggagcaggggggtgagctcctcagcagcctccgtaacagctgccctgcctacacctgcagagctggaggttctgtcctccctgctgctctcaggagtgttcaagggtggagggcagggaatggggcctgaggtattaaggctaagaagtgggggacagggcccatctaccagccttcatcaggaagggaaagggctttggggtcaggtggcagctattccccaccaagagattcagggtcacaggtttttccccacacctctgaactcagggcctagccacccccaaacttccaaatcccacttttgtgatatgtgaagctactcatttcttacccttggaggctgtgtggggaatttccagcccttttatgcctgtgtgatcccaccccacccccatagttgtataaaggtcatagtgaagaagctgggggaagactgcttcagccagatcctggggtggggtctttaggttttctcactttgacaacccccgaatgtttttatagtagtttttttgtatttttttgtaatgacagtattatgtaaaaaataaagtattttaaaaatatggaaaaaaaaaaaaaaaaaaaa

SEQ ID NO: 841 - DNA, 1342 bp, human
gaggaagtgacgacaggcgtgcccttgacaggcagggagggctaggctgtgcatccctccgctcgcattgcagggagatggctcagcgacttcttctgaggaggttcctggcctctgtcatctccaggaagccctctcagggtcagtggccacccctcacttccagagccctgcagaccccacaatgcagtcctggtggcctgactgtaacacccaacccagcccggacaatatacaccacgaggatctccttgacaacctttaatatccaggatggacctgactttcaagaccgagtggtcaacagtgagacaccagtggttgtggatttccacgcacagtggtgtggaccctgcaagatcctggggccgaggttagagaagatggtggccaagcagcacgggaaggtggtgatggccaaggtggatattgatgaccacacagacctcgccattgagtatgaggtgtcagcggtgcccactgtgctggccatgaagaatggggacgtggtggacaagtttgtgggcatcaaggatgaggatcagttggaggccttcctgaagaagctgattggctgacaagcagggatgagtcctggttcccttgcccgcgtgggaccccaatagaactcagcccttccatgccagcccttcctgctgcctccctcctgtctggctcctggggcccatgcttagagcccaggctccagccctgagtgcttccgagctggcggactgcccaggggccatcagaggatggtggtgctgctgctgatccggggaccgctgtcttccctcccatacgcctttcatccctccttctagggcctatggcagttctcccaggatgtgtggcgagagcctgggccagcccacagcgttcctagtcaggcagccacaccttggtcctcatcttggtcccttccaatctgaaacctcgtgcctggctcgtctgccacctacatttctctttccagctgctgttttgtaaaaagaaaaagaaaaaagaagcccaaactagtgagagtaatatctaattatctcattttttgtaggtctgtgataaagaacttagtcatcccttccacctcctactgtgaagaacagaccctgggtcccacactgaaatcccctctagtcacccattcccaccccccagggagctgcctcccaggcagggggtgcagaaaatgattgatgggctggggaaccctggagagcctcgactccggaagtctcaaggtgcctcctcctctccttagctggcccgttggttttctgagcagggggctgaactgtgaacaagtcagacaaataaagcaagggtctgcaccatcaaaaaa

SEQ ID NO: 842 - DNA, 2797 bp, human
aagatggcggaccttgattcgcctccgaagctgtcaggggtgcagcagccgtctgagggggtgggaggtggccgctgctccgaaatctccgctgagctcattcgctccctgacagagctgcaggagctggaggctgtatacgaacggctctgcggcgaggagaaagtggtggagagagagctggatgctcttttggaacagcaaaacaccattgaaagtaagatggtcactctccaccgaatgggtcctaatctgcagctgattgagggagatgcaaagcagctggctggaatgatcacctttacctgcaacctggctgagaatgtgtccagcaaagttcgtcagcttgacctggccaagaaccgcctctatcaggccattcagagagctgatgacatcttggacctgaagttctgcatggatggagttcagactgctttgaggagtgaagattatgagcaggctgcagcacatattcatcgctacttgtgcctggacaagtcggtcattgagctcagccgacagggcaaaggggggagcatgattgatgccaacctgaaattgctgcaggaagctgagcaacgtctcaaagccattgtggcagagaagtttgccattgccaccaaggaaggtgatttgccccaggtggagcgcttcttcaagatcttcccactgctgggtttgcatgaggagggattaagaaggttctcggagtacctttgcaagcaggtggccagtaaagctgaggagaatctgctcatggtgctggggacagacatgagtgatcggagagctgcagtcatctttgcagatacacttactcttctgtttgaagggattgcccgcattgtggaggcccaccagccaatagtggagacctattatgggccagggagactctataccctgatcaaatatctgcaggtggaatgtgacagacaggtggagaaggtggtagacaagttcatcaagcaaagggactaccaccagcagttccggcatgttcagaacaacctgatgagaaattctacaacagaaaaaatcgaaccaagagaactggaccccatcctgactgaggtcaccctgatgaacgcccgcagtgagctatacttacgcttcctcaagaagaggattagctctgattttgaggtgggagactccatggcctcagaggaagtaaagcaagagcaccagaagtgtctggacaaactcctcaataactgccttttgagctgtaccatgcaggagctaattggcttatatgttaccatggaggagtacttcatgagggagactgtcaataaggctgtggctctggacacctatgagaagggccagctgacatccagcatggtggatgatgtcttctacattgttaagaagtgcattgggcgggctctgtccagctccagcattgactgtctctgtgccatgatcaacctcgccaccacagagctggagtctgacttcagggatgttctgtgtaataagctgcggatgggctttcctgccaccaccttccaggacatccagcgcggggtgacaagtgccgtgaacatcatgcacagcagcctccagcaaggcaaatttgacacaaaaggcatcgagagtactgacgaggcgaagatgtccttcctggtgactctgaacaacgtggaagtctgcagtgaaaacatctccactctgaagaagacactggagagtgactgcaccaagctcttcagccagggcattggaggggagcaggcccaggccaagtttgacggctgcctttctgacttggccgccgtgtccaacaaattccgagacctcttgcaggaagggctgacggagctcaacagcacagccatcaagccacaggtgcagccttggatcaacagctttttctccgtctcccacaacatcgaggaggaagaattcaatgactatgaggccaacgacccttgggtacaacagttcatccttaacctggagcagcaaatggcagagttcaaggccagcctgtccccggtcatctacgacagcctaaccggcctcatgactagccttgttgccgtcgagttggagaaagtggtgctgaaatccacctttaaccggctgggtggtctgcagtttgacaaggagctgaggtcgctcattgcctaccttaccacggtgaccacctggaccatccgagacaagtttgcccggctctcccagatggccaccatcctcaatctggagcgggtgaccgagatcctcgattactggggacccaattccggcccattgacgtggcgcctcacccctgctgaagtgcgccaggtgctggccctgcggatagacttccgcagtgaagatatcaagaggctgcgcctgtagctgcctggatgagcacacctggctcatcacacttgcaggcctgttccctaaggggccccagccaaggagctgagcgaggctgtctggcttgggggagatctgacagcccagacctttctacggctggcagcagagaaacaaagtctggacccactccatgctctgccctcagacctggccaggtgatgctctgggggcagcatctccccaccgagagaagcgggctcctaatgaggtgggaaagccacggcaggcagcgagcagcccaggccagctttctgcatggatggtcagtctcttgccctcaaacactacagcaaacaagctacccctgccagtcctagacaacttgggtacatctggggacctagcagttaggcttgactttgaggagaggctgtgatgtttatgatccctgaataaagctactccttgg

SEQ ID NO: 843 - DNA, 545 bp, human
cgccgccatccggactcccgggtcctctgtgcaggttggaggatggttggttgtggcgagcgaggctgaaggagccgggacgcggggctctgggcctcgggaactgagccggtactcacctccgccccttctccccgtcgctgtccgcagccatggccctacgctaccctatggccgtgggcctcaacaagggccacaaagtgaccaagaacgtgagcaagcccaggcacagccgacgccgcgggcgtctgaccaaacacaccaagttcgtgcgggacatgattcgggaggtgtgtggctttgccccgtacgagcggcgcgccatggagttactgaaggtctccaaggacaaacgggccctcaaatttatcaagaaaagggtggggacgcacatccgcgccaagaggaagcgggaggagctgagcaacgtactggccgccatgaggaaagctgctgccaagaaagactgagcccctcccctgccctctccctgaaataaagaacagcttgacaggaaaaaaaaaaaaaaaaaaaaaaaaaaaaaa

SEQ ID NO: 844 - DNA, 1504 bp, human
ggcggagtagcttccggaaagggtactgcatttcccgtttctacctccactgcacccgcttattgcgtcttgctcctgggtcacagagcctaaaacgacacacccaacacgcccgccggagttacagctaaaggaaggacaggggaagcaatgaaatgccgagggcggagccaagagcgacactgggggagcaggaaaaggcggggcttccgcttggggcatggaggctgtacctcttacgtcacttccgtaaacaaacggagctgcggaggagcgggtcccgggatgtgaccggggctctgcttgtggctgcggcggtggcttctgaggctgtcgggtctttgcgggttgcggaagggggccccaatacccttcttcttcaggtcttaagaagctggccgtggtgcaataaggaacttaaaacaatggaagagcggaaagtgaagaggaggagtcctaagtcttttagtgcccactgtactcaggttgtcaatgccaaaaaaaatgccattccagtgagtaaaagcacagggttttcaaatcctgcatcacagtcaacttcacagcgaccaaagttaaaaagagtgatgaaagaaaagaccaaacctcagggtggagagggcaaaggcgctcagtcaactccgatccagcactccttcctcactgatgtctcagatgttcaggagatggagagagggctgctcagtcttttgaatgatttccactctggaaaacttcaagcatttggaaatgaatgttccattgaacagatggaacatgttcggggaatgcaggagaaattagctcgcttgaatttggagctctatggggagttagaggaacttcctgaggataagagaaaaacagccagtgactccaatctggataggcttctgtcagatttagaagaattgaattcttccatacaaaaactccatttggcagatgcacaagatgttccaaatacttctgctagctaaaatgaaatgtagtttgctttcttgtgatttgaagagaagcagcagtctttacttttccagccaaatccagtagcagaatcatcttccacaacaaggaattaaagtaattaaagtgcaagttcaatgatcgttttcacttactgcttttagtaaatgtgactcgctgtaattcaccataactggaggcctaggccttgttgaaggcttcatcaggaaatgtgacgcagagattgtgctgctgtgcttcatattgttgccttatgggattatacttgaaatgcattgtgctgatgttcttgacagggcggagggatttctctttcctgagctcaccaaacttattccagtgttgatcgcaagctgttgatgcacaggcgtcttgtggcaagcccagcttcagtttatgttagacaatcagtacacatgctggtgtgttttccaatggccagtgataagaaattaaataagtatttgtgagatttgctattttttaataaagtaattgttttaaattaaaaaaaaaa

SEQ ID NO: 845 - DNA, 1636 bp, human
gtcagcggggaagctggaaggcgtcgttctcctttcccagctctcctgcctgtccgccatgttttcaggccgggtctggcttggtcttcccccgtaaggaaatggccggggagctccaggggacccaggcgccgtcgcttcggcggagctgggctgaccagccaggacagcggggtaaacccgaacaattctgcgcgaggtagggaggccatggcgtccggcagtaactggctctccggggtgaatgtcgtgctggtgatggcctacgggagcctggacttgaaagaggagattgatattcgactctccagggttcaggatatcaagtatgagccccagctccttgcagatgatgatgctagactactacaactggaaacccagggaaatcaaagttgctacaactatctgtataggatgaaagctctggatgccattcgtacctctgagatcccatttcattctgaaggccggcatccccgttccttaatgggcaagaatttccgctcctacctgctggatctgcgaaacactagtacgcctttcaagggtgtacgcaaagcactcattgatacccttttggatggctatgaaacagcccgctatgggacaggggtctttggccagaatgagtacctacgctatcaggaggccctgagtgagctggccactgcggttaaagcacgaattgggagctctcagcgacatcaccagtcagcagccaaagacctaactcagtcccctgaggtctccccaacaaccatccaggtgacatacctcccctccagtcagaagagtaaacgtgccaagcacttccttgaattgaagagctttaaggataactataacacattggagagtactctgtgacggagctgaaggactcttgccgtagattaagccagtcagttgcaatgtgcaagacaggctgcttgccgggccgccctcggaacatctggcccagcaggcccagactgtatccatccaagttcccgttgtatccagagttcttagagcttgtgtctaaagggtaattccccaacccttccttatgagcatttttagaacattggctaagactattttcccccagtagcgcttttttctggatttgcattcgggtgttattcttaatgtttctgtcaaagcttcttaaaaatcttcacttggtttcagccatagttcaccttccctgttccaggtttatttaattccaaaggtgagagttggagtgagatgtcttccatatctatacctttgtgcacagttgaatgggaactgtttgggtttagggcatcttagagttgattgatggaaaaagcagacaggaactggtgggaggtcaagtggggaagttggtgaatgtggaataacttacctttgtgctccacttaaaccagatgtgttgcagctttcctgacatgcaaggatctactttaattccacactctcattaataaattgaataaaagggaatgttttggcacctgatataatctgccaggctatgtgacagtaggaaggaatggtttcccctaacaagcccaatgcactggtctgactttataaattatttaataaaatgaactattatcaaataaaacgtatgaatcagtaaaaaaaaaaaaaaaaaaaa

SEQ ID NO: 846 - DNA, 2410 bp, human
gtccttttcctcctgtcctttgccagcgttgggccggaccgggccgagccgggccgcccgggcgcagtctttaaccatggcgtccctcttcaagaagaaaaccgtggatgatgtaataaaggaacagaatcgagagttacgaggtacacagagggctataatcagagatcgagcagctttagagaaacaagaaaaacagctggaattagaaattaagaaaatggccaagattggtaataaggaagcttgcaaagttttagccaaacaacttgtgcatctacggaaacagaagacgagaacttttgctgtaagttcaaaagttacttctatgtctacacaaacaaaagtgatgaattcccaaatgaagatggctggagcaatgtctaccacagcaaaaacaatgcaggcagttaacaagaagatggatccacaaaagacattacaaacaatgcagaatttccagaaggaaaacatgaaaatggaaatgactgaagaaatgatcaatgatacacttgatgacatctttgacggttctgatgacgaagaagaaagccaggatattgtgaatcaagttcttgatgaaattggaattgaaatttctggaaagatggccaaagctccatcagctgctcgaagcttaccatctgcctctacttcaaaggctacaatctcagatgaagagattgaacggcaactcaaggctttaggagtagattagtcaaaagaagtcatactattttgcttacttataattatgtagtataaaccaagcacagtgcagatttcttttacaaaacacatgtattttgcaaaaaaaaaaaaaatgaagaccatgagtgaacagttgtttcctaacccatggctatttagaatcttttgccaaagaatgacaatgatgcaaaaatgggaacagtttggattttaattagaactgtttaggagtgatgatgtgtaaaaagttgacttctcttttgcatggcacagagaaattatattccttacttcatgtcagtttatgttctaaatctttttcactgaatataaaaatcttgttaaatgccattaggcaccaacttaaagagggttgtaaaaatattaaaagtatatcgttaattctgtatctgttgcttgtcttttgtaagtgattatgtgttatgaccataggtggttacagctgccaaattatttttaaatggtcaaaaagaagagtgctatttaaacatctgtcttaaacaaaaactgtcataacttttcttttttctttttccattaggagaacattctagttggtaaatttcaaaatgtgcttgacacctgccttaaatagcacagacctattgtgcacatctttaaattatttcagctggcagaaaagaattacatttaaaactgaaatcaaggcctcaatacaaagattatcctggctcttttctatctctgtgggcctaattgaaatatgtactcttattttagacacgcctctgttaaaacagaccaggttttcctggtctcagacctatgatgacttgtccctttgatgtcactactgtgaattgaatataattagtaaaaatagacgatgaataaataacactttatagtaagaaaacaatatattttggccatctaaaaatgagaattataattatatgaattataatttaaactgtttaattttgtttaatgtgtatattgaatcttccaaattgaagccattattctcaattaagtactacaactatgacaatgcttgacctacatttctaaaataaaaattcacattttttgataaataaactacagttttaccagaaattactatctaaatgtgtattagcagtattttttaaggtgaaattgccttggtatctaatgaatgtgtagacagggagataaaatgaaggattgccagactagttagaatagaatttaggattaggttagttttgaaaaatgatgttgtaatatatgggttctaacacatcctaccataaaaactggaggagatatgtgtaacctggttaatttgggatggtggacattttgggctaatactgacaaaatacatcttaggactagtatacatgtgacacggattgctaggaggaatgaaaaactaaactgtatagtttatattccgtaaaccattttataatgttcaaagattaggttttgttattgatagtattaaatacacagtttctcttaacagtgatgggtgaaaacattttaccggattatggaatgtttaccagaacatgttttgattcttgaatgtacataataatgccatctaacttatttacattcttgtttacatgtgggagcttttgttttcaaaaattattttgttaaaaaatctcaataaagatttattattgttgttcttttcttaaaaaaaaaaaaaaaa

SEQ ID NO: 847 - DNA, 1362 bp, human
gggggggaggactgggtgcgcctgcagggatcggaagccggttggggtgtgagaggttttctcgctctagggagattcttcaagcaatcactatgtcaacagacacaggtgtttcccttccttcatatgaggaagatcagggatcaaaactcattcgaaaagctaaagaggcaccattcgtacccgttggaatagcgggttttgcagcaattgttgcatatggattatataaactgaagagcaggggaaatactaaaatgtccattcatctgatccacatgcgtgtggcagcccaaggctttgttgtaggagcaatgactgttggtatgggctattccatgtatcgggaattctgggcaaaacctgagccttagaagaagagatgctgtcttggtcttgttggaggagcttgctttagttagatgtcttattattaaagttacctattattgttggaaataaactaatttgtatgggtttagatggtaacatggcattttgaatattggcttcctttcttgcaggcttgatttgcttggtgaccgaattactagtgactagtttactaactaggtcattcaaggaagtcaagttaacttaaacatgtcacctaaatgcacttgatggtgttgaaatgtccaccttcttaaatttttaagatgaacttagttctaaagaagataacaggccaatcctgaaggtactccctgtttgctgcagaatgtcagatattttggatgttgcataagagtcctatttgccccagttaattcaactttcgtctgcctgttttgtggactggctggctctgttagaactctgtccaaaaagtgcatggaatataacttgtaaagcttcccacaattgacaatatatatgcatgtgtttaaaccaaatccagaaagcttaaacaatagagctgcataatagtatttattaaagaatcaccaactgtaaacatgagaataacttaaggttctagtttagttttttgtaattgcaaattatatttttgctgctgatatattagaataattttaaaatgtcatcttgaaatagaaatatgtattttaagcactcacgcaaaggtaaatgaacacgttttaaatgtgtgtgttgctaattttttccataagaattgtaaacattgaactgaacaaattacctataatggatttggttaatgacttatgagcaagctggtttggccagacagtatacccaaacttttatataatatacagaaggctatcacacttgtgaaattctcttgtctaatctgaatttgcattccatggtgttaacatggtatatgtattgttattaaagtaagtgacccatgaaaaaaaaaaaaaaaaaaaa

SEQ ID NO: 848 - DNA, 8107 bp, human
tgagggaagaagaggaagcgggaggagcttggcttcctcgcgtatttgaggacagcccatctcccttcaagaaccctacggagagtcggactgcatctccgcagcgagctcttggagcgccgccggccgggaggcgaaggatgcaggcggctccgcgcgccggctgcggggcagcgctcctgctgtggattgtcagcagctgcctctgcagagcctggacggctccctccacgtcccaaaaatgtgatgagccacttgtctctggactcccccatgtggctttcagcagctcctcctccatctctggtagctattctcccggctatgccaagataaacaagagaggaggtgctgggggatggtctccatcagacagcgaccattatcaatggcttcaggttgactttggcaatcggaagcagatcagtgccattgcaacccaaggaaggtatagcagctcagattgggtgacccaataccggatgctctacagcgacacagggagaaactggaaaccctatcatcaagatgggaatatctgggcatttcccggaaacattaactctgacggtgtggtccggcacgaattacagcatccgattattgcccgctatgtgcgcatagtgcctctggattggaatggagaaggtcgcattggactcagaattgaagtttatggctgttcttactgggctgatgttatcaactttgatggccatgttgtattaccatatagattcagaaacaagaagatgaaaacactgaaagatgtcattgccttgaactttaagacgtctgaaagtgaaggagtaatcctgcacggagaaggacagcaaggagattacattaccttggaactgaaaaaagccaagctggtcctcagtttaaacttaggaagcaaccagcttggccccatatatggccacacatcagtgatgacaggaagtttgctggatgaccaccactggcactctgtggtcattgagcgccaggggcggagcattaacctcactctggacaggagcatgcagcacttccgtaccaatggagagtttgactacctggacttggactatgagataacctttggaggcatccctttctctggcaagcccagctccagcagtagaaagaatttcaaaggctgcatggaaagcatcaactacaatggcgtcaacattactgatcttgccagaaggaagaaattagagccctcaaatgtgggaaatttgagcttttcttgtgtggaaccctatacggtgcctgtctttttcaacgctacaagttacctggaggtgcccggacggcttaaccaggacctgttctcagtcagtttccagtttaggacatggaaccccaatggtctcctggtcttcagtcactttgcggataatttgggcaatgtggagattgacctcactgaaagcaaagtgggtgttcacatcaacatcacacagaccaagatgagccaaatcgatatttcctcaggttctgggttgaatgatggacagtggcacgaggttcgcttcctagccaaggaaaattttgctattctcaccatcgatggagatgaagcatcagcagttcgaactaatagtccccttcaagttaaaactggcgagaagtacttttttggaggttttctgaaccagatgaataactcaagtcactctgtccttcagccttcattccaaggatgcatgcagctcattcaagtggacgatcaacttgtaaatttatacgaagtggcacaaaggaagccgggaagtttcgcgaatgtcagcattgacatgtgtgcgatcatagacagatgtgtgcccaatcactgtgagcatggtggaaagtgctcgcaaacatgggacagcttcaaatgcacttgtgatgagacaggatacagtggggccacctgccacaactctatctacgagccttcctgtgaagcctacaaacacctaggacagacatcaaattattactggatagatcctgatggcagcggacctctggggcctctgaaagtttactgcaacatgacagaggacaaagtgtggaccatagtgtctcatgacttgcagatgcagacgcctgtggtcggctacaacccagaaaaatactcagtgacacagctcgtttacagcgcctccatggaccagataagtgccatcactgacagtgccgagtactgcgagcagtatgtctcctatttctgcaagatgtcaagattgttgaacaccccagatggaagcccttacacttggtgggttggcaaagccaacgagaagcactactactggggaggctctgggcctggaatccagaaatgtgcctgcggcatcgaacgcaactgcacagatcccaagtactactgtaactgcgacgcggactacaagcaatggaggaaggatgctggtttcttatcatacaaagatcacctgccagtgagccaagtggtggttggagatactgaccgtcaaggctcagaagccaaattgagcgtaggtcctctgcgctgccaaggagacaggaattattggaatgccgcctctttcccaaacccatcctcctacctgcacttctctactttccaaggggaaactagcgctgacatttctttctacttcaaaacattaaccccctggggagtgtttcttgaaaatatgggaaaggaagatttcatcaagctggagctgaagtctgccacagaagtgtccttttcatttgatgtgggaaatgggccagtagagattgtagtgaggtcaccaacccctctcaacgatgaccagtggcaccgggtcactgcagagaggaatgtcaagcaggccagcctacaggtggaccggctaccgcagcagatccgcaaggccccaacagaaggccacacccgcctggagctctacagccagttatttgtgggtggtgctgggggccagcagggcttcctgggctgcatccgctccttgaggatgaatggggtgacacttgacctggaggaaagagcaaaggtcacatctgggttcatatccggatgctcgggccattgcaccagctatggaacaaactgtgaaaatggaggcaaatgcctagagagataccacggttactcctgcgattgctctaatactgcatatgatggaacattttgcaacaaagatgttggtgcattttttgaagaagggatgtggctacgatataactttcaggcaccagcaacaaatgccagagactccagcagcagagtagacaacgctcccgaccagcagaactcccacccggacctggcacaggaggagatccgcttcagcttcagcaccaccaaggcgccctgcattctcctctacatcagctccttcaccacagacttcttggcagtcctcgtcaaacccactggaagcttacagattcgatacaacctgggtggcacccgagagccatacaatattgacgtagaccacaggaacatggccaatggacagccccacagtgtcaacatcacccgccacgagaagaccatctttctcaagctcgatcattatccttctgtgagttaccatctgccaagttcatccgacaccctcttcaattctcccaagtcgctctttctgggaaaagttatagaaacagggaaaattgaccaagagattcacaaatacaacaccccaggattcactggttgcctctccagagtccagttcaaccagatcgcccctctcaaggccgccttgaggcagacaaacgcctcggctcacgtccacatccagggcgagctggtggagtccaactgcggggcctcgccgctgaccctctcccccatgtcgtccgccaccgacccctggcacctggatcacctggattcagccagtgcggattttccatataatccaggacaaggccaagctataagaaatggagtcaacagaaactcggctatcattggaggcgtcattgctgtggtgattttcaccatcctgtgcaccctggtcttcctgatccggtacatgttccgccacaagggcacctaccataccaacgaagcaaagggggcggagtcggcagagagcgcggacgccgccatcatgaacaacgaccccaacttcacagagaccattgatgaaagcaaaaaggaatggctcatttgaggggtggctacttggctatgggatagggaggagggaattactagggaggagagaaagggacaaaagcaccctgcttcatactcttgagcacatccttaaaatatcagcacaagttgggggaggcaggcaatggaatataatggaatattcttgagactgatcacaaaaaaaaaaaaaacctttttaatatttctttatagctgagttttcccttctgtatcaaaacaaaataatacaaaaaatgcttttagagtttaagcaatggttgaaatttgtaggtactatctgtcttattttgtgtgtgtttagaggtgttctaaagacccgtggtaacagggcaagttttctacgtttttaagagcccttagaacgtgggtattttttttcttgagaaaagctaatgcacctacagatggcccccaacattctcttccttttgcttctagtcaaccttaatgggctgttacagaaactagttcgtgtttatatactatttcctttgatgtcctataagtcggaaaagaaaggggcaaagagaacctattatttgccagtttttaagcagagctcaatctatgccagctctctggcatctggggttcctgactgataccagcagttgaaggaagagagtgcatggcacctggtgtgtaacgacacaatcagcacaactggagagaggcattaaagaaccagggaaggtagtttgatttttcattgaattctacaagctaatattgttccacgtatgtagtcttagaccaatagctgtaactatcagctgcaataccatggtgaccagctgttacaaaagattttttcctgttttatctgaaacatactggatttatatatgtataagcgcctcaatggggaattagagccagatgttatgatttgtttgctctttttcttttatagttatagcaaaaatatggataatttctagtgaatgcataaattaggttgcgtttcttattttgctttaaatctctggtagtttttccacccctgtgacacaatcctaatagacagtgtcctgtaaatggacacaacacaataaagtcaagttattattgctgttactctggatgatatggaaaacactgccatattttaaatcaactactccacgtgtttttccatccaatcacactgctgtgattcagggatctttcttctaaaacggacacatttgaacctcaggttcatcacaaacctggtacctgttgcttcccagaggatggagaagtgtagttaatcacacctcttagtttaatctgaaatcttgacccagttatttaacaaataaatacctcattgattatatttaaaagtaatacacttcctgtaaacaaatggggacaatgcatccaaaaaatctttttaaacagattacacaaaaattatttccagaaaggctaccatttatcatcattatatttcaagcctcttatacttaataagcactttctaaaaagtcttgagatcccaccattctgaggaattcaatatgatcactttttccttctttgcctgggagaggttaagaggcggtttcgaaggtatagatgctattgttctgatggcccggctgaataaaatggaaattctagtttgttagaattatgcattctttttcaagattctcagtgtgcctaacttattggagcacatcagtttcttgggtaatggaaaacattacctagagttgccagtggcacattacaccagtacagagcacattccaaaggagacattggaccagttaattcccatacaagtcaaggtaacagaacaaaagggaatcctgatgcccttttaccattgctggttgagctcaggcactgtcatggacacccttaattttaaaaggttttaatcattcttctataaaatacatttaaaatggaaaaatacttaatatcactaaatatcagaacaatgtaacatttacaaatgacatattgaaagcaaaggctgttttatttagccaagatgattaccattaggagttactttatgtattgttgaaagcaaattttaaacatgatgttttagaagtgtttctgatttttaaacctggtttacaggtattacttctgcacttaccaaataatgccagatggaaatttattatttcttgcaattcccgtgatagctctgttctttatgcattgtctcaacactttcccttttttcccaaaatgagtagagaattaaagccacccaaaacagcttctgctactaaaatgttctcatcctttctcctccctctccttttcctgccacaaaaggtgaaaaatgagatccaatcctctcaccaaaatttcaaacctaggacactggaatgactgcagggatcagtggttctcccatatcaccatcaattaagacatataggacactgtcttccttcaagagggttacaatgtggccatcagacaggaaaccaaacggtggataaagtattaagtaactaagtgccaaataaatgctggaaatcttgacctctccttgggattatgggtgtaacaaaaatccctacatctgtttatgaaggccatattcagtacattttaaatggtaaataatctgtttatgtgaagaaaaagaattaagtctttcttccaactctctccttggatagcctagcacagtgcagcctccataaccatgacattcccgcccaagctctcagtgcctaatcctgctttgtcattcacatctcacaaaatcttgacatcttacattccaatacattatcaagcaagcacaagtatgctggtagtagcctctttaaataatatgtatagacaacaacaacgacaaaaaatagactgttttaaagtttcagggaaagttggtggctgatttaaagttgtgcaggaaacatcttctgtgtatgaagcaaatgtcgatgttttgaaaagctaggagatgactttgaatgaatgcaaggttagtgagatcctaagctctcaaaatagcatattccctagagctcaagaaagctggtccaggaggttgaaaaagctattttgttgttaaattattttctggcccttcttaatatttaaaaatgtatttccccttgtggctttcaaccacctgctcaaaaaaagagacttgttacatgaaagttttcattaaagagctgaaaacaagaatttagagagccattcctagaaaatgtcctactgccctgcatttgacaaacaagcatcctttactaacaagagcaggaattcagaggcacaagaaaaagcattggcatgagccaaagagtctgtcttaatgttacttttgaaaatctgctgagcggccaccatatgcaggctgagagctgggcacaggcgaagccattggaagcacttcaggaacaagcacacagctgtgggacttgaacatgcaagtgttcaggttgtgtcaagaagcttttctttccttctatgatggaatctgttcttttctatcctacttttttctctcttcctctcctcaccacattataccctgctcttacgcagtaaacgttttaatggcccgtttatgtctcatgcctccaaacaacactgaatttgaaaccccccattttttcttttcaccaccctgttgagcaattttcccaaaaaaagggcagcaattattaaattgaattcaagtttctagattttactaagttttattttgtcaggttttttaaattttttcagtgagcgtggtgactgcagaggttagtgctgtgaaaagctgggctaaatattctttctgtaaagtcaaacaggattccatcccctgtgaaataacacaaaatttcactctctaaaagcaacagcatgtaaactagaatgaaagaaggaaattatgtacgtatgcctaatattctttgtgaatgtctttcatttaactaaaattatattagaaaccagattgataaataaaaaattcaaagtagttttaattatcct

SEQ ID NO: 849 - DNA, 3389 bp, human
agcgggcgtgcggagcgggcgacagtggcgtgggatctgcctctctgcgagcagctgggagcggcggcggcggcgccatgagcgggggcaccccttacatcggcagcaagatcagcctcatctccaaggcggagatccgctacgagggcatcctctacaccatcgacaccgaaaactccaccgtagcccttgccaaagttcgatcctttggtacagaagacagaccgacagatcgtccaataccacctcgagatgaagtctttgaatacattatattccgtgggagtgacattaaagaccttactgtttgtgagccaccaaaaccacagtgttctttgcctcaagacccagctattgttcagtcctcactaggctcatcgacttcttcattccagtccatgggttcttatggacctttcggcaggatgcccacatacagtcagttcagtccgagttccttagttgggcagcagtttggtgctgttggtgttgctggaagctctttgacatcctttggaacagaaacatcaaacagtggtaccttaccccaaagtagtgcggttggttctgcctttacacaggatacaagatctctaaaaacacagttatctcaaggtcgctcaagccctcagttagaccctttgagaaaaagcccaaccatggaacaagcagtgcagaccgcctcagcccacttacctgctccagcagctgttgggagaaggagtcctgtatcaaccaggcctttgccatctgccagccaaaaggcaggagagaatcaggagcacaggcaagctgaagtacacaaagtttcaaggccagaaaatgagcaactcagaaatgataacaagagacaagtagctccaggtgctccttcagctccaaggagagggcgtgggggtcatcggggtggcaggggaagatttggtattcggcgagatgggccaatgaaatttgagaaagactttgactttgaaagtgcaaatgcacaattcaacaaggaagagattgacagagagtttcataataaacttaaattaaaagaagataaacttgagaaacaggagaagcctgtaaatggtgaagataaaggagactcaggagttgatacccaaaacagtgaaggaaatgccgatgaagaagatccacttggacctaattgctattatgacaaaactaaatccttctttgataatatttcttgtgatgacaatagagaacggagaccaacctgggctgaagaaagaagattaaatgctgaaacatttggaatcccacttcgtccaaaccgtggccgtgggggatacagaggcagaggaggtcttggtttccgtggtggcagagggcgtggtggtggcagaggtggtaccttcactgcccctcgaggatttcgcggtggattcagaggaggtcgtgggggccgggagtttgcggattttgaatataggaaagacaacaaagttgctgcatagtctacaaacaagtctctgaaaataggtgaatttctagctcttcatggtcctgaacattgatttcagtctttgcaaagaatgaagaagtgaattcgctgtacatttgtcaccagcactgggtttttgttttttgtttgtttttccgcttaatttcaaagataaaatgcagttacttttgggggtggaaggctcatcttaaaacatgagcattaaatatatttggaatagcagaaggttaagtaatttcttatgtatagttaaactaaagcagtacttcagtgggacttaacaagtattttttcatcactgaaaggtttttttttttttatcactaaattgtatttggcaattgcaagttgcctgcagatagggccgtgatactgtgttttgagccacagaaggttgtgtgtgtgtgtgtgtgtgtgtgtgtgtgtgtgtgtgtgtgtatgtgtgtgtctttttcctcctttcttttggggaatcctgtaatatgaggtagcttatttcgtcaattaattagggtgctggatggtagagaattttgtcagtcaactatgtacacacagtaaatactgtttcttaggcaaaggtaacttttttatatagttgtaaaattccattatattccattgccaaagaaacattaagaactttgtatagctgtataaaaagcaactaattttttaaagaataaacattttaaagtcagcaaacatactgtgtccttgcagaagttgatgtgctgagcagcagccttatgggtgggtctttttttcttagttttccaggcttaacatttttgattttgttttttaatgtttggaacataaatgaagatttgatacattatttcattatctaaaaaggattaattattcatgctcattgtaagaacttcattttgtagcaaatggcatatcacaggatctgtccagataatcgatattttcagtatacaaatgtaaataatcacagatgagaatgtacttagctgtattttcaaataagtaatcttccccccttttgtaggactttaaaactaggcatcaatgaacctgtttttcctattatgcctggaatttagtcatgataccttgactcattccatcatatttcaagaggattcagagtgctagaaattattttggtagcctgtaacacacggcaacactggtccttgggcctatgatgacccacagatgactcagtatagagttcattgctaattataaattactagtgaatctttttgatattttaagctctagtgggaaaaatctggccacttttgtgtttttatgaaggccatggaataaaagggtccaaagatttaaatatttttatctaatattttgattgttttcttaactttctccttaaaacattcagtagtgataaagatatagaaactgcactgtaggagaattggaatatttaaggctggttgacattttttattttcattttatatcttttgtatagctctacaaggcagtgttttgtaatttggtttcattatgaagatccagtacttggcagccatagtttagacaatattgttcagtgctgtttgcttgcatgttaacaacaaaaccttttagaggacccacaaatcatgatattgaacacagttccgaggcattcagagcatcagagcaagtaccatggcaatacatgtgtagactgttggagatgtcccgggccaatttcaagaaagaaaactgtaaatactagttctacttgctctgaaattatgagtttatgcgttttcccagccctccgaatcactgactggggcgttttgtgccccagcaataactggcagcatggcatacctgcagtaccccttacaatattaaagcaaagtttttattctaaaacagaataaaactgttcaataaaaaatgctcgtcaaagttc

SEQ ID NO: 850 - DNA, 1258 bp, human
tcaggccccgcccgccctgccctcccctcccgatcccggagccatgtggcccctggccctagtgatcgcctccctgaccttggccttgtcaggaggtgtctcccaggagtcttccaaggttctcaacaccaatgggaccagtgggtttctcccaggtggctacacctgcttcccccactctcagccctggcaggctgccctactagtgcaagggcggctactctgtgggggagtcctggtccaccccaaatgggtcctcactgccgcacactgtctaaaggaggggctcaaagtttacctaggcaagcacgccctagggcgtgtggaagctggtgagcaggtgagggaagttgtccactctatcccccaccctgaataccggagaagccccacccacctgaaccacgaccatgacatcatgcttctggagctgcagtccccggtccagctcacaggctacatccaaaccctgcccctttcccacaacaaccgcctaacccctggcaccacctgtcgggtgtctggctggggcaccaccaccagcccccaggtgaattaccccaaaactctacaatgtgccaacatccaacttcgctcagatgaggagtgtcgtcaagtctacccaggaaagatcactgacaacatgttgtgtgccggcacaaaagagggtggcaaagactcctgtgagggtgactctgggggccccctggtctgtaacagaacactgtatggcatcgtctcctggggagacttcccatgtgggcaacctgaccggcctggtgtctacacccgtgtctcaagatacgtcctgtggatccgtgaaacaatccgaaaatatgaaacccagcagcaaaaatggttgaagggcccacaataaaagttgagaaatgtaccggcttccatcctgtcaccatgacttcctcacatggtctgcttagcccttctctgctccttattcccagtgttccatttgaaccagtgatccatgtcctgaaaaatgctcaatctcagctaacattccatgtttcagaagcattcaggcactgccaggcttgcagtctcccagatgttgcatccctgaaacatctcaacaacctgaatgtcccaacccagacaatggcccaggtctctcaacttcatcagtgtggcttctatgagcccagatcaccacctgaacgttctgtctgtggcacattcttaaatatttccatcagcccatctcaacaatatatgtcctataaatggaccatccttgaca

SEQ ID NO: 851 - DNA, 1596 bp, human
gatgtgaggagcggcgggttccgggctccgggctctgggtggcggcggctgtgagcggcggcactgcggcgcaggcggcggaggccagcgggcgccgtcggcggctggccctgtcggccgcgggatgaggaagcggaccgagcccgtcgccttggagcatgagcgctgcgccgccgcgggctcgtcctcctccggctcggccgccgcggcgctggacgccgactgccgcctgaagcagaacctacgcctgacgggcccggcggcggctgagccgcgctgcgcagccgacgcgggaatgaagcgggcgctgggcaggcgaaagggcgtgtggttgcgcctgaggaagatacttttctgtgttttggggttgtacattgccattccatttctcatcaaactatgtcctggaatacaggccaaactgattttcttgaatttcgtaagagttccctatttcattgatttgaaaaaaccacaggatcaaggtttgaatcacacgtgtaactactacctgcagccagaggaagacgtgaccattggagtctggcacaccgtccctgcagtctggtggaagaacgcccaaggcaaagaccagatgtggtatgaggatgccttggcttccagccaccctatcattctgtacctgcatgggaacgcaggtaccagaggaggcgaccaccgcgtggagctttacaaggtgctgagttcccttggttaccatgtggtcacctttgactacagaggttggggtgactcagtgggaacgccatctgagcggggcatgacctatgacgcactccacgtttttgactggatcaaagcaagaagtggtgacaaccccgtgtacatctggggccactctctgggcactggcgtggcgacaaatctggtgcggcgcctctgtgagcgagagacgcctccagatgcccttatattggaatctccattcactaatatccgtgaagaagctaagagccatccattttcagtgatatatcgatacttccctgggtttgactggttcttccttgatcctattacaagtagtggaattaaatttgcaaatgatgaaaacgtgaagcacatctcctgtcccctgctcatcctgcacgctgaggacgacccggtggtgcccttccagcttggcagaaagctctatagcatcgccgcaccagctcgaagcttccgagatttcaaagttcagtttgtgccctttcattcagaccttggctacaggcacaaatacatttacaagagccctgagctgccacggatactgagacctcagcagggcccaggttccagcccagatcccagcatgtggtcagagctggtgtgactgaagccaacaggtgacacggtcatcgaagagcagcagacaaaactaaaactaacccaaaggcagctgaaagtggagggcaggtgaattcccagccctcgccggattcaacttttgccaacggtgaagaactgccctgagctgcaaaccttacaaagtctgtaactctagataaaccataccatgtgctaactgcactgaaataaaacactaactacattataatgtcaaaaaaaaaaaaaaaaaaaaaaaaaaaa

SEQ ID NO: 852 - DNA, 2383 bp, human
ggtgcgtcgcgggggcggggccgcgcaggcgtaccgggtgccccggctctggagcataaacaagagcggggacgggatgaggcggcggttgatcccagggtggcgagtggcggcgaccgaggcggcgagcggggcccggcgccgaccctgagtgcagcctgacccgccctcgcgcgcgcgccctccccggccgggcccactcgccgcgcgcccagccatgaacctggcgagccagagcggggaggccggcgccggccagctgctcttcgccaacttcaaccaggacaacacagaagtgaaaggggcatcaagagcagctggtcttggccgtcgcgctgttgtctggtccctagctgttggtagtaagtccggttataaatttttctccctttcttctgtggataagctggaacagatctatgaatgcaccgatacggaagatgtgtgcattgtagagagattgttctccagcagcctagtggccatcgtgagccttaaagcaccaaggaagctaaaggtttgccactttaagaagggaactgagatctgcaactacagctactccaacacgattctggctgtgaagctcaacaggcagaggctgatagtatgcctggaggagtccctgtacatccacaacattcgggacatgaaggtgctgcatacgatcagggagacgcctccaaaccctgcaggcctgtgtgcgctgtcaatcaacaacgacaactgctacttggcgtacccagggagcgcgaccatcggagaggtgcaggtcttcgataccattaatttgagagctgcaaacatgattccggctcacgacagtcctttagcggcactggcctttgacgcaagtggaactaaacttgccacggcttcggagaaggggaccgtgattagggtattttccattccagaaggacaaaaactctttgagtttcggagaggagtaaagaggtgcgtgagcatctgctccctggccttcagcatggacggcatgttcctctccgcctccagcaacactgagaccgtgcacatcttcaaactcgagactgtgaaagaaaaacccccagaggagcccaccacctggaccgggtacttcgggaaagtgctcatggcctccaccagctacctgccttcccaagtgacagaaatgttcaaccagggcagagccttcgccacggtccgcctgccattctgcggccacaaaaacatctgctcgctagccacaattcagaagatcccgcggttgttggtgggtgccgccgacgggtacctgtacatgtacaacctggacccccaggagggcggcgagtgtgccctgatgaagcagcaccggctggacggcagtctggaaacgaccaatgagatcttggactctgcctctcacgactgccccttagtcactcagacatacggcgcagctgcaggaaaaggtacttacgtgccttcatccccaacgagacttgcctacacagacgacctgggtgctgtgggtggcgcctgcctggaggacgaggccagcgccctgcgcctggatgaggacagcgagcacccgcccatgattcttcggactgactgaacttgacctgtgacctctgacccggggagcagagaacactggcttcacagaggactttgtgcattgctgctatgaactttgacctgagtcgggggagaggatggcagagactttattaaaaaaaaaaaaagattgtagtggtagtctaactccataacgctgaggaaatacatcattttcacttcagtggcttttaaatcctgcttatgaattttagctttttgtttgtttgttttctctttttgccaaaattaactgtttggtgaagcccgcaaaacctcctcgctttgcatgcatgaacgtgccaagccagcataggggagctagaagccactttccagccacctgccgttgggttttttcatatctgtacataatgccgagtgcgtaaggaaaccgtggcgtcgcgcacagtgggtctgcttgtcaaggccagttctgcagtgacaggcccaggggctgcccaccaggtgtgctgggcagacttcagctgggacagaagtccgatctccctagggccccacctggaccattttccctccgttttattttgttaattaaattctttccaaattggatcgctctgggatttcttccatggtggacttttgtttctgatcttgttttccctgtggatattggaggacagcgaggttctttctgatactaaaaacctttctttcaggcagcaaatgaacttgaaaggttgcctggactcgctggagcaaaggaaagcgattttgtttgtataattaaatgatctgttcttctacttcactcttaaaaaaaaaaaaaaaaaaa

SEQ ID NO: 853 - DNA, 2306 bp, human
agggccccgccctgccttctggggcaaagcggagagtggtcggttctgccccacagtaacgcgaggaaagaaatctcgcgaggctggagttctccgggagcgccggtcggaggcggtcggcggaggtgtctaccccgccggtgatggcgttgaacgccactggcttcccggccttccgtccgctgcctccgtccgattctgcgtctgcttgctgaggaggcggattaggggggcgcggagtctcttcccttgagtgcataggtcccggttggtagagggtttgagtccgcatcgccacagctgaaggctgcgagggactaagagcagaatatatctttagaaatgagttgcacaattgagaaggcacttgccgacgctaaagctcttgttgaaagattaagagatcatgacgatgcagcagaatctctgattgagcaaaccacagctctcaacaagcgagtagaagccatgaaacagtatcaggaagaaattcaagaacttaatgaagtcgcgagacatcggccacggtccacgttagttatgggaatccagcaagaaaacagacaaatcagagagttgcaacaagaaaacaaagaattacgtacatctctggaagaacatcagtcggccttggaacttataatgagcaagtaccgagaacaaatgtttagattgctaatggctagcaaaaaagatgatccgggtataataatgaagttaaaagagcagcactccaagattgacatggtacatcgtaacaagtccgaaggattcttccttgatgcatctcgacacatccttgaagcacctcaacatggactggagagaaggcacttggaagcaaatcagaatgaactgcaagcacatgttgaccagataactgaaatggcagcagtaatgaggaaagccattgaaattgacgagcaacagggttgcaaggaacaagaacgaatatttcaacttgaacaagaaaacaaaggcttgagagagatccttcaaataactcgagaatcatttttgaacctaaggaaagatgatgcgtcggaaagtacttctttgtcagcattagtgaccaacagtgatttgagtctgaggaagagctgaagagtttctgagtctgtgagcttcttacatggctccaaatggtcaaataagtgaatgaatgaatggacagaaaattcaatcctttatttttttctctgtaaatatgtacagtgcacgggctatgagatagcaacaaaaaatgcatagttaatggtcatagactttattccaaaacataattggaaaatagaaactgagccattgccaaatggtaaagaaatgaaaagttttcacagtgactactgaatataccaagagcttttggcagtactgctggctttctgggtgattaattaggtaaacttgaatattcccagtaaatgtttgagaatgcataaaattataccaatttaaaaatataaatttttgccactgttttgtgaacggaggatttgtacgctaaatttcatccttatttggcgtcaaagttgatgcaaagtttatgtaccatgagacttctagtgattgcctactttcacatttatttaaatttttgtgaaagaaaatacagttttaaaggctataggaatgtgttatatgtaccttaaacagataatttaattttagcaatttatcataactgatacttagctaacaattgtccataacttgtttaagtgtaagaaataccatttcaggaatgaaaaagaaggaatactactttctaagaaagaagatcttataatagacatatttagtaggttaaactactcctttgaaagaataagttttggttcaaagtcaataatgaagacgagatttgtttttctcttctctggctgatttttaaggatattatgtagttcatttagttaacagaattgaaatgtttgatatggcaagataggtatggtaatttcaaagtgaattgggaattcctctggctcatagaacccttttttttttcctttaagtattcttgagatacaaaaaaaaaaagtaaataaaatttcaaaaaaaaagttccggatctgtttttaagctccatctggtcctcataacctgcaagatttttcttaaaacctttcagctgaaagtgggggtaaaggtggagtaatctgtggatttgtttctgttgtcttttaaaatgtcaaatatataatatgtaatttttttaaaaaccaccagatacagaaatgtgctttaacatcagttgaaacctaaattttcttatgttgtggtgattgtattaaaaaaaaaat

SEQ ID NO: 854 - DNA, 1968 bp, human
gaggaggaggaggagatgactggggagcgggagctcgagaatactgcccagttactctagcgcgccaggccgaaccgcagcttcttggcttaggtacttctactcacagcggccgattccgaggccaactccagcaatggcttttgcaaatctgcggaaagtgctcatcagtgacagcctggacccttgctgccggaagatcttgcaagatggagggctgcaggtggtggaaaagcagaaccttagcaaagaggagctgatagcggagctgcaggactgtgaaggccttattgttcgctctgccaccaaggtgaccgctgatgtcatcaacgcagctgagaaactccaggtggtgggcagggctggcacaggtgtggacaatgtggatctggaggccgcaacaaggaagggcatcttggttatgaacacccccaatgggaacagcctcagtgccgcagaactcacttgtggaatgatcatgtgcctggccaggcagattccccaggcgacggcttcgatgaaggacggcaaatgggagcggaagaagttcatgggaacagagctgaatggaaagaccctgggaattcttggcctgggcaggattgggagagaggtagctacccggatgcagtcctttgggatgaagactatagggtatgaccccatcatttccccagaggtctcggcctcctttggtgttcagcagctgcccctggaggagatctggcctctctgtgatttcatcactgtgcacactcctctcctgccctccacgacaggcttgctgaatgacaacacctttgcccagtgcaagaagggggtgcgtgtggtgaactgtgcccgtggagggatcgtggacgaaggcgccctgctccgggccctgcagtctggccagtgtgccggggctgcactggacgtgtttacggaagagccgccacgggaccgggccttggtggaccatgagaatgtcatcagctgtccccacctgggtgccagcaccaaggaggctcagagccgctgtggggaggaaattgctgttcagttcgtggacatggtgaaggggaaatctctcacgggggttgtgaatgcccaggcccttaccagtgccttctctccacacaccaagccttggattggtctggcagaagctctggggacactgatgcgagcctgggctgggtcccccaaagggaccatccaggtgataacacagggaacatccctgaagaatgctgggaactgcctaagccccgcagtcattgtcggcctcctgaaagaggcttccaagcaggcggatgtgaacttggtgaacgctaagctgctggtgaaagaggctggcctcaatgtcaccacctcccacagccctgctgcaccaggggagcaaggcttcggggaatgcctcctggccgtggccctggcaggcgccccttaccaggctgtgggcttggtccaaggcactacacctgtactgcaggggctcaatggagctgtcttcaggccagaagtgcctctccgcagggacctgcccctgctcctattccggactcagacctctgaccctgcaatgctgcctaccatgattggcctcctggcagaggcaggcgtgcggctgctgtcctaccagacttcactggtgtcagatggggagacctggcacgtcatgggcatctcctccttgctgcccagcctggaagcgtggaagcagcatgtgactgaagccttccagttccacttctaaccttggagctcactggtccctgcctctggggcttttctgaagaaacccacccactgtgatcaatagggagagaaaatccacattcttgggctgaacgcgggcctctgacactgcttacactgcactctgaccctgtagtacagcaataaccgtctaataaagagcctacccccaaaaaaaaaaaaaaaaaaaaaaaaaaaaaaaaaaaaaaaaaaaaaaaaaaaaaaaaa

SEQ ID NO: 855 - DNA, 2777 bp, human
cgccgctcctcgcggcctccgcgtcttccttccgggtcgcgctaggccgggcttgcggcggttgtgccgcatctagagagtcggggagccgcccccgcacccaggccttctcgcgctgcctggtcgctggtgaagcccgcggcgcgcgcctctcccggaccctgcagggtaaaagaatgtcacatgtcagcatttgtacctgaagtcagcatgcaaagttcagggtacctggatgaatgccaacttttgcatttcccatgtgtatcctgtgaccattctatctgggaacatccttcaaagagttcatgcatcttactgaggacacctgaccttttgaagcttcataattcacatctagatgtcaccggtctttcccatgttaacagttctgaccatgttttattatatatgccttcggcgccgagccaggacagctacaagaggagaaatgatgaacacccatagagctatagaatcaaacagccagacttcccctctcaatgcagaggtagtccagtatgccaaagaagtagtggatttcagttcccattatggaagtgagaatagtatgtcctatactatgtggaatttggctggtgtaccaaatgtattcccaagttctggtgactttactcagacagctgtgtttcgaacttatgggacatggtgggatcagtgtcctagtgcttccttgccattcaagaggacgccacctaattttcagagccaggactatgtggaacttacttttgaacaacaggtgtatcctacagctgtacatgttctagaaacctatcatcccggagcagtcattagaattctcgcttgttctgcaaatccttattccccaaatccaccagctgaagtaagatgggagattctttggtcagagagacctacgaaggtgaatgcttcccaagctcgccagtttaaaccttgtattaagcagataaatttccccacaaatcttatacgactggaagtaaatagttctcttctggaatattacactgaattagatgcagttgtgctacatggtgtgaaggacaagccagtgctttctctcaagacttcacttattgacatgaatgatatagaagatgatgcctatgcagaaaaggatggttgtggaatggacagtcttaacaaaaagtttagcagtgctgtcctcggggaagggccaaataatgggtattttgataaactaccttatgagcttattcagctgattctgaatcatcttacactaccagacctgtgtagattagcacagacttgcaaactactgagccagcattgctgtgatcctctgcaatacatccacctcaatctgcaaccatactgggcaaaactagatgacacttctctggaatttctacagtctcgctgcactcttgtccagtggcttaatttatcttggactggcaatagaggcttcatctctgttgcaggatttagcaggtttctgaaggtttgtggatccgaattagtacgccttgaattgtcttgcagccactttcttaatgaaacttgcttagaagttatttctgagatgtgtccaaatctacaggccttaaatctctcctcctgtgataagctaccacctcaagctttcaaccacattgccaagttatgcagccttaaacgacttgttctctatcgaacaaaagtagagcaaacagcactgctcagcattttgaacttctgttcagagcttcagcacctcagtttaggcagttgtgtcatgattgaagactatgatgtgatagctagcatgataggagccaagtgtaaaaaactccggaccctggatctgtggagatgtaagaatattactgagaatggaatagcagaactggcttctgggtgtccactactggaggagcttgaccttggctggtgcccaactctgcagagcagcaccgggtgcttcaccagactggcacaccagctcccaaacttgcaaaaactctttcttacagctaatagatctgtgtgtgacacagacattgatgaattggcatgtaattgtaccaggttacagcagctggacatattaggaacaagaatggtaagtccggcatccttaagaaaactcctggaatcttgtaaagatctttctttacttgatgtgtccttctgttcgcagattgataacagagctgtgctagaactgaatgcaagctttccaaaagtgttcataaaaaagagctttactcagtgacttaatatatgttctgtattaaaattaatgtgctttgttggggtttaattttgggattggttttgggttttgtttttagttgttttaatggtaagaattaagacatttgtagattttaaagaaaaatatgaaattgtccattaaatcaagtaaaaatgtgcacaaatgttttcataaaatactgcaagcacttctcttcaagaatatgagtggatattatttttaccttatgttaatcagtgatatgctttagtcaataatatgattgataaaagaataacatggaatcatgctaacttattttcaaaggaacactgagcaataaagtatcgtggcatttatgcaaaaaaaaaagttaattttttacaccttcatgtaaggatgtcttattaagcctgtgacctggcaagtgttttgtttggtatgtacaaaatggtcagagctagttggagaatgagacatgcttttccagctgtttggttatttctctggattaactgttcaactggaaaatttttagtttttctagccaggtgtggtggcacacacttgt

SEQ ID NO: 856 - DNA, 6485 bp, human
tgcagccatgctgaatcactgttgctgatcagatttcccactggtctgctgggagaatcaagaacagaactaggatccccgagtgcatacacagttcagcagctaccaccctggctgggcctcacacaatggagggtgaaagtgtcaagctgagctcccagactctgatacaggctggggatgatgagaagaaccagaggacgatcactgtcaaccctgcccacatggggaaagcattcaaggttatgaatgaactgcggagtaaacagctgttgtgtgacgtgatgattgtggcagaagatgtcgagatagaagcccaccgtgtggtcctggcagcctgcagcccctacttctgtgcgatgttcacaggtgacatgtctgagagtaaagccaaaaagatagaaatcaaggacgtggatgggcagacgctgagtaagctgattgactacatctatactgctgaaatcgaggtgactgaagagaatgtccaggtgctgctcccggcagccagcttgctgcagctcatggatgttcggcagaactgctgtgacttcctgcagtctcagttgcatcccaccaattgcctgggcatccgtgcgtttgcagatgtacacacctgcactgaccttctgcagcaggccaatgcctacgcagagcagcactttccagaggtgatgctaggagaagaatttcttagcctgagtctggaccaggtgtgcagcttgatatccagcgacaagctgaccgtttcttcagaagagaaggtgtttgaagctgtgatctcatggatcaattatgagaaagaaaaccgtttagagcacatggcaaagctgatggaacatgtccgacttcctctcttacctagggactacctagtccaaacggttgaagaagaagctttgataaagaataacaacacctgtaaagacttcctcattgaggccatgaaataccatctcctccctctggatcagagactattgattaagaacccaaggaccaagcccaggactccagtcagccttcccaaggtcatgattgtggttggcggccaggcacccaaggcaatccgcagtgtggagtgctatgatttcgaggaggaccggtgggatcagattgctgagcttccttccagaagatgcagagcaggtgtggtgttcatggctggccacgtgtatgccgtgggagggtttaatggctcactgcgggtgcggacagtggatgtgtatgacggcgtgaaggaccagtggacgtccattgccagcatgcaggagcgccggagcacactgggcgcagcggtgctcaatgacttgctctacgcagtgggaggctttgatggcagtactggcctagcatcggtggaagcctacagctacaagaccaacgagtggttctttgtggccccgatgaacacgcggcagagcagtgtgggtgtgggcgttgtggaggggaagctatatgctgttgggggttatgatggagcttcccgccagtgtctgagcactgtggaacagtacaacccagcgaccaatgaatggatatacgtggcggacatgagcacccgccgcagtggcgcaggggttggagtgcttagcggacagctgtacgccacaggtgggcatgatgggcctttggtgaggaagagcgttgaggtttacgatcctggaacaaatacctggaagcaagtggcagacatgaacatgtgccggcgcaacgcaggggtctgtgcagtaaatgggctcctgtatgtggttggaggggatgatggatcctgcaacttggcttcggtggagtactacaatcctgtcactgacaaatggacgctgcttccaacgaacatgagcacggggcggagctatgcaggtgttgccgtgattcacaagtccttgtgacccaaactcctactgccaggaggtggaggaaggagcaggtgctgcctgtgactctgaacagcaggaccttggtgactggattcaacttgcttgggagggtctgtgctgctgtgagaaccgctctcctctgacttggcagactggtgttgttcatcgcagtgtggacaccattacccacccccgttcccctgaggtgctctggcctatgccctgagcaaggggggtcttgacatccccaggcagcacctttgggctttgttttggtgtttctacagggacaatacagaccctggagtgtgtgtgtgtgtgtgtgtagaccatggtgtttctctatgtttctctaagttggggggtgagcgtgtgtgacagtctactggatttctttactactgatcctttcgctgtgttaaaaatcaagtcacagagacctctcttctggatttgtcccatggggaccctgagactactaaagctgctttcttctgaaggtccagttggacagtctgggaatgtccagaaataaccagtgagaggggcagttctctggccacacccacttatgtactttaactactgtgactttgtctgcagaagagctggaaaattctcgaagctgcaccgtgtcctctgtgtgctagaataagggacaaatgggttccctgtgcttctcagctcactgtttttccttgagttctcctacaggaagcagatgagaactgcccagtcttcaggtttaggccattggtctttgatgtcatagattccaggcctgggaggtgttatgtctcttcagctgggaaaactagctcttcagagaagcctcgggtaacactgaaaaacaaaacaaaacaaaacaaaaacaggaaaaaaacaaaaaaccaaagtggtaaggattcagttcctgcctataatggtctcagagagggtcctacttttaggttttcccaggacaggacagtccccatttatacttattatcccagtttaattattcacagcaccccattttactcagaagtgttctggtctggaggataaataagaggtcaccctcctccagacccaaagatagatttgtgcctgtgttggatggggtcgtgtgtgattcagatggacattggatggcttcaaaggaatataccactagagctggcccttggcactttgtgacagtggtcaagtctgtctaatgtccttgtcttctttttcttgtgctttccccctattccagggtgtgcaccctctccccaacccccaagaaccccactactgctttccctgtgaggtaggagatatcagtgggtcttggatttgaggcttcctaagatgtgcttgcattttaaaaagggagcttggtgagagctttgctaattcacaggtaaaaattattaacaatagaacttcaagcatcttgaggagcgggcatttgagggggcatggagtaatttgtatttaaaaaaccttaaagttgtgctgttcctaaactagcaaattgctcatgctgaaatttctggcataagcaggggaagtcttgtgtctggagaatagtctcataccttgcagtctgggacaccctccctactttgagaatccacctacaggaagccaaggaactttataaatcctgatgttggacttctgatacgactgggctacttccaagcaggtgctgcaggagattggcatcccccagcccctgcagttagaaaccccgaagtcttcccagccagtgagccactttgtgtatttactgtatatttattgtgccctaaatgtgcaactctcctaaagacaaaacttctctttctgatgttaagcacatgttacttcaacaagatgcttggagaacaacaaggtacccagaatttttagaagccttcagaagaggctaaaatatccagctttgggggacctggaagaaatgtctccaaaggaagcaaggcatgttttagttgagtgctctggtctcactatgaagtggggatgactgtggcttcataactctacctggctgtgggttggaagctgatggaatgagaaatgtcctttctccttctctgaggaaattttgagacttgtttcggtgtgtctgtgtgatggggatgaggctggggttgggatctgatgtatgccattcacagaagctctcaatttcagatgataggtgaattccctgcccctcccccaccactgagaagctagactttcatgcgggagaggctacttttatgtgtcgtcttccggggaagggtccctccactgaaagctagccagtcatgttttctgtttttggatttttgcaattggtttcacctcatgtctccctccctacaaagcactgcctctactgggcgtgctgccaaggccatgtgcactccatcctcatgtatcctttttcacggggaccagaacactggtacgtcatcaccaaagccaatctgctctagctgcccacagatgccaccaaaacctgctatctcttcatcaccaggtacgattctctttccacagtggacacagcaggctattttctagtttgtgctggtcacgtggtagatgaagcctcttactgccccacttagggtggccacggctgcttgtgaatgcagctttgccagtggcatatctgtcatctgattgcggtggtgaaatggaattgaggcccaaggttagaagcagccgagacgccacttggatactgatttgaacaatgtagaagtcagattctgaattccaaagttatttctcataagtacccaatggcatctctccatctacaaagttgcagtattatgcaaataaaactgacctcattttctgctatgcaataagaatacttaattctagttcccgacaagccagttgcaatatcccctaagatgctttttgagctgtcttactttgatatctgttgtgtaacgtttgtatatttctgagccagatcctttcaaagattgcctttttataaaattgaagctatagcttttaggctaaaattttaacgtagatatttttataagatatttttttcaagagtttgaatcgctttttattgtccatggtaatgaaatgttgtgttctttgcatcattcactctcaaacgtagttcatgcctgtagctctcttccttttgtttctcacccttcagaaacatatttttcagtagctccaggtagatgagcctttttttttttttttttaaataccatattcaagggagtctgctgaattttaaaacgcagtcactggtgtttcttgaattgctagggactgatgttatgttcgactcagcacttgcccgtctgtattgattgtgtctttttttttttttttggagtctgctttctgtgggggtgaggccgggctgtctcgtggtggctcccactgacgggcactgagcctggtaccctgtggcatggagaagcctcagggaaaggcctgcccccccagcacatactcccatagtgtcctaggtccagccgaccattccttattctcttctatctccttgttgatctgaagcttccaatagcttgaggcctttgctgctggatgatgccctttttgggagcatcttgtctctaacctttaaaagaggggtcaatcctcatgatccctgtgtgttaagcatatgctttgcaggtgctcacactacacttacaacttgcttcttgagctatgtctctactccaggctctgttttgtgtatttatctgccatttgcatcatggtttttaaaatttattattattattattattgttgggacaggtgccatttaaattgcctccatgctccccatttgcacctagctggatcaagttgggaggctgagcaaactcatattccagttagttggagtttttaaaggctctgtttgcctggagaagcaaggaggttagaatgtaatttttttaagcgtttgcactatttagagtcctaagcccctcatgttcagctgtgctgtgtttctactgaccaagcaggagagccagcagcacttccagcatttgggaatggaagagatttcttctgtagtggataattacagcctcatagcccctgtgcagccttcgtcatgggactcagtgactcatggatatagcatcagccatggcaggaatgcacaggactgtggcatttgcagcatcaaatcaccctagtgccatgtttggttatgagattgtaaattattcgctcccccgtcctcccctcccctcattttcagtggcaatagaggacccttgttgtacttcttgtttaatttgcatattatgtgtaaaatgctttcgttgaaagaaaactgaagacactgaatgtgtatgtctgtgtgggtgctctgtccctgtggttgtcatagccagtcagacttgatcactgacaccccgtacaacatattgcataggtaagatcctcgatctggtgttctctgcgtggctgttagggactgtatatcttgtaaaagaacacttgtcacatgcttgatcagttacagcaatagctgaagaaacatttcctcaaatgtattattttaacaggaatcatgttctaatttcccatcctttaattttaataaaagctgaactgtgtgaa

SEQ ID NO: 857 - DNA, 1215 bp, human
gtgacattgagctcaccagcgccaccgtccccggcgaagttctgcgctggtcggcggagagcaagtggccatggggagcctcagcggtctgcgcctggcagcaggaagctgttttaggttatgtgaaagagatgtttcctcatctctaaggcttaccagaagctctgatttgaagagaataaatggattttgcacaaaaccacaggaaagtcccggagctccattcccgcacttacaacagagtgcctttacacaaacctacggattggcagaaaaagatcctcatatggtcaggtcgcttcaaaaggaagatgaaatcccagagactgtctcgttggagatgcttgatgctgcaaagaacaagatgcgagtgaagatcagctatctaatgattgccctgacggtggtaggatgcatctttcattggttattgagggcaagaagcttgcccaaagaccgagactttaaccagcttggacctttagaaaagaaagctcgtctgaaagaaggaagcagctatgaaggccaaaacagattaccaaaggtatccgtgttggttgggattttgaaaatccaggaattatgttttaacgtgcctgtattaaaaaggatgtggtatgaggatccatttcataaagtatgatttgcccaaacctgtaccatttccgtatttctgctgtagaagtagaaataaattttcttaaataatgactgtgttttattgttttgatccaagtcaagtgtagcctctcagccttttggagaaaaatgaaacaatttatttcaacttgaataccaactcttcagagaagcaggtaccatatcttacttctcttcccattatcaaagtaacctctccacaggcgaactcattttgaggagataaggaaggccagttgagtatatggcccaggtgcagcttggagggccagccttctcaaatgtcctggtgtactggtggggaggctgccccctaatagagcgagcgctgagaagcagccagaccacattctataatctttgaacatgctggcagatggaggcttttaggagaatagttttttaaacattctgacaaggtccagccaggaatttctaaggacttagaaatcccagtgtcatggagttgcttgggggtcaacacaagtcacctcttagcttcatgccttagaattctcaactgggctgtttttcttaccacctgagaaactaaat

SEQ ID NO: 858 - DNA, 3292 bp, human
ccggccgctcggcccgggggcttcgggctgtcgggccggcgctcccttctctgccaggtggcgagtacacctgctcacgtaggcgtcatgaggtctccggttcgagacctggcccggaacgatggcgaggagagcacggaccgcacgcctcttctaccgggcgccccacgggccgaagccgctccagtgtgctgctctgctcgttacaacttagcaattttggccttttttggtttcttcattgtgtatgcattacgtgtgaatctgagtgttgcgttagtggatatggtagattcaaatacaactttagaagataatagaacttccaaggcatgtccagagcattctgctcccataaaagttcatcataatcaaacgggtaagaagtaccaatgggatgcagaaactcaaggatggattctcggttcctttttttatggctacatcatcacacagattcctggaggatatgttgccagcaaaataggggggaaaatgctgctaggatttgggatccttggcactgctgtcctcaccctgttcactcccattgctgcagatttaggagttggaccactcattgtactcagagcactagaaggactaggagagggtgttacatttccagccatgcatgccatgtggtcttcttgggctccccctcttgaaagaagcaaacttcttagcatttcatatgcaggagcacagcttgggacagtaatttctcttcctctttctggaataatttgctactatatgaattggacttatgtcttctacttttttggtactattggaatattttggtttcttttgtggatctggttagttagtgacacaccacaaaaacacaagagaatttcccattatgaaaaggaatacattctttcatcattaagaaatcagctttcttcacagaagtcagtgccgtgggtacccattttaaaatccctgccactttgggctatcgtagttgcacacttttcttacaactggactttttatactttattgacattattgcctacttatatgaaggagatcctaaggttcaatgttcaagagaatgggtttttatcttcattgccttatttaggctcttggttatgtatgatcctgtctggtcaagctgctgacaatttaagggcaaaatggaatttttcaactttatgtgttcgcagaatttttagccttataggaatgattggacctgcagtattcctggtagctgctggcttcattggctgtgattattctttggccgttgctttcctaactatatcaacaacactgggaggcttttgctcttctggatttagcatcaaccatctggatattgctccttcgtatgctggtatcctcctgggcatcacaaatacatttgccactattccaggaatggttgggcccgtcattgctaaaagtctgacccctgataacactgttggagaatggcaaaccgtgttctatattgctgctgctattaatgtttttggtgccattttctttacactattcgccaaaggtgaagtacaaaactgggctctcaatgatcaccatggacacagacactgaaggaaccaataaataatcctgcctctattaatgtatttttatttatcatgtaacctcaaagtgccttctgtattgtgtaagcattctatgtctttttttaattgtacttgtattagatttttaaggcctataatcatgaaatatcactagttgccagaataataaaatgaactgtgtttaattatgaataatatgtaagctaggacttctactttaggttcacatacctgcctgctagtcgggcaacatgaagtaggacagttctgttgattttttagggccatactaaagggaatgagctgaaacagacctcctgatacctttgcttaattaaactagatgataattctcaggtactgataaacacctgttgttgttcactttcctcataaaaattgtcagctctctctgacacttagacctcaaactttagcatctctgtggagctgccatccactgtataatttcgcctggcaactggactgaggggagtgtgcccaggcagctgccaagcactccctccctggcttcagggtcagagtgcccagcgtttatcagaggcagcatccaagcccagagccagtgtcgactcttcggctggtgcctttcctctgaggggctatcaatgtgtagataaagccctgagtaggcaagagcagtgagatccactgctatggtcttgatacatcctcaaactttcccttcccagcacagaggaatattggctggcatgcaacctgcaaaagaaaaatgcgaagcggccgggcacggtggctcatgcctgtagtcccagcactttggggggctgaggtgggcgaatcatgagatcaggagttcgagaccagcctggccagcatggtgaaaccccatctctactaaaaatacaaaaaattagctgggcgtggtgacgggcgcctgtaatcccagatactcaggaggctgaggtaggagaatcacttgaacctgggagatggaagttgcagtgaaccaagatcacgccactgcactccagcctgggcgatggagcgagactccaactcaaaaaaaaaaaaagaataaagaaagaaaagtgcgatgcccagtcaatcacaaataagatcatcctggtttaaatctactctcacatggatcacagtataaatttctatgtgctgtgttttgttcgtttgtattttgtagagatggggtctcgttttgtcgcccaggctggttttgaactcctggcttcaagcgatcctcctgtctcggcctcacaaagtgttgagactacaggcatgagccactgtgcccagcctgttctatgtttttaagctacacgagaattttttttttaattaattctcactgtttgttcagtctgtcttcatctaagtttgtgttgcagtttaaagttaaagtgacttttaaaggccacatcacctgagactagggtaatcatctttacttctggttcctgaaatcatatttttccagtggaccatcctccagtggctgtggttgttgagcatgctttcagaacacctatgtggcttaaaacttagtttatgttttgtgttcaacactacgtgtaatattttaaaactgtttaatgtgatgtgaatacatttatgtacatttatttttaaatttgtaaatagctttaaattgctatggcaatgtttcttttataaatcatcaaaataaacctttgtgaattgaaaaaaaaaaaaaaaaaaaa

SEQ ID NO: 859 - DNA, 423 bp, human
ctgaggcgaacaatggcggagctgggcgaagccgatgaagcggagttgcagcgcctggtggccgccgagcagcagaaggcgcagtttactgcacaggtgcatcacttcatggagttatgttgggataaatgtgtggagaagccagggaatcgcctagactctcgcactgaaaattgtctctccagctgtgtagaccgcttcattgacaccactcttgccatcaccagtcggtttgcccagattgtacagaaaggagggcagtaggccatcccccaggagaatgacagaagcaaaggacttgttactaagcagatttaagggtcagtgggggaaggctatcaacccattgtcagatcagcatcaggctgttatcaagtctgttggtgctaaaaagtaaaagatgaaatgttcaaaaaaaaaaaa

SEQ ID NO: 860 - DNA, 2185 bp, human
cgcgcggtgaccgttggcgccgaggggaggaggcagccgccgccgccgccgccgccgccgccgccgccgccgccgccgttgcgcagatccgggccgcggctgtggggagggcgacggagcgggtgaccttccggaggcgggagcgagcgaggaggcccgggagcgccgagcgtcgccgccgccgccgccatgaacaactcgggcgccgacgagatcgggaagctcttcgtgggcggtcttgactggagcacgacccaagagactctgcgcagctacttttcccaatatggagaagtcgtagattgtgttatcatgaaagataaaaccaccaaccagtctcgaggctttgggtttgtcaaatttaaagacccaaactgtgtggggacggtgctggccagcagaccgcacacgctagatggccgaaacatcgaccccaagccatgcacaccccgggggatgcagccggagagaacacggccgaaggaaggatggcagaaaggacccaggagcgataacagtaaatcaaataagatatttgtcggtggaattcctcacaattgtggtgagacagagctcagggaatacttcaagaagttcggagtggtcacggaggtagtcatgatctatgacgccgagaagcagaggccccgaggttttggatttattactttcgaggacgaacaatcagtggaccaggctgtcaacatgcattttcacgacatcatgggcaaaaaagtggaagttaaacgagctgagcctcgggacagcaagagccaagcgccgggacagccaggtgccagccagtgggggagccgggttgtgcccaacgctgccaatggctgggcaggccagcccccgcccacgtggcagcaaggatatggcccgcaaggaatgtgggtgccggcaggacaggcgattggtggctatggaccgccccctgcaggaagaggagcccccccgccacccccaccgttcacctcctacatcgtgtccacccctcctggaggctttccccctccccagggcttccctcagggctacggtgccccgccacagttcagttttggctacgggcctccacctccaccgccagatcagtttgcccctccgggggttcctcctccaccagccactcccggggcagcacctctggctttcccaccgcctccgtctcaggctgccccggacatgagcaagcccccgacagctcagccagacttcccctatggtcagtatgcaggttacgggcaggacttgagtggcttcggacagggcttctcagaccccagccagcagcctccttcctacgggggtccctccgtgccagggtcggggggcccccccgccggcggcagcggctttggacgagggcagaaccacaacgtgcaagggttccacccctaccgacgctagcccgcggcgccgcgacgtctgcacggcccagacccaggattccaaacttgtgaactcgtgacaatcacaaacttggcggcaaagtggcgactcaaccttgggggggggggcggggggagggcgcgaggcttttggagcggctgtgggtgtcgtctggactgaggtttttaaatatttctttctctaacccatcagcacaataaaaaaaagtcactggttcaacaacagggtttaaaaaaaatgtcttcagctttaattcaaaacttcaggtttctttttcttccttttttttggaaattattttcctgagccttttgttttacggtatattgtaaacttttatgttaaagaaaaaatatacatttacaaattgtgagatttttaagagaaattttctacgatgtatactggcttattttttaatttaaaacggggtttccgtcggcactggtggagggggtgcgctgttagtcccctcgctcctggctttgggggttgggacttggtggtccagaaactctgggagcttctagaagaaatctactgagtgtatttctgttttttgtttaattccttgcttttgtcgactgacctgcttggtagtgtctgaggtgaactgtgggggttgcgcacagccagccgcgtggatcccacgcagcgctgaaccgaaccgagtaggaagcctttctccccaggcacgtggcttcagggcgtttcccattgaccagtttgaccctggtttgaataaagagaagtgcgtttggattagaaa

SEQ ID NO: 861 - DNA, 1673 bp, human
ctctcctcgcccgctgggtgctgaagttgggcggatggcagcaaaccggctccgctagaggaccgagccgcccagccccgctcccccggacccatcggcgcgctgcccacacctccaggcgaccggccaactgggtcctgaagtagctgaaatgcgaaaaaggcagcagtcccaaaatgaaggaacacctgccgtgtctcaagctcctggaaaccagaggcccaacaacacctgttgcttttgttggtgctgttgttgcagctgctcctgcctcactgtgaggaatgaagaaagaggggaaaatgcgggaagacccacacacactacaaaaatggagagtatccaggtcctagaggaatgccaaaaccccactgcagaggaagtcttgtcctggtctcaaaattttgacaagatgatgaaggccccagcaggaagaaaccttttcagagagttcctccgaacagaatacagtgaagagaacctacttttctggcttgcttgtgaagacttaaagaaggagcagaacaaaaaagtaattgaagaaaaggctaggatgatatatgaagattacatttctatactatcaccaaaagaggtcagtcttgattctcgagttagagaggtgatcaatagaaatctgttggatcccaatcctcacatgtatgaagatgcccaacttcagatatatactttaatgcacagagattcttttccaaggtttttgaactctcaaatttataagtcatttgttgaaagtactgctggctcttcttctgaatcttaatgttcatttaaaaacaatcattttggagggctgagatgggaaataaaagtagttaaataacatcagaaactgagttcctggagaactacagtttagcattcctcaggctactgtgaaaacacaaccgttatggtctttgtctccatttttatcaaggttttccatggttaagtttggagaaaataccacacaaaacaatgaattgccaaattgtttgttttattcaagactcattctacttgcaagcaaagtgtatttgtagtcctatgaacagtctcctcgtgtatctccagagactgcatgtgcaaagtaaaatgcttcatttgccacatagttgttgtaatatttaatccagtagcataacttatatctgtatttaaggacttttgtgcaatatggtcttaagaaataattgccaaaaaaatcggccatggttctgcatttttaacataatctaagacagaaaaaaagcaatttttactatgtaacaatggtattcaacattctatatactgtgtttagtacactaattttgaagccaatatttctgtacatgaaaaagagctatttatctctgtttgttggaaaatcctaatggggattcctctggttgttcactgccaaaactgtggcattttcattacaggagagtttactatgctaaaagcaaaaaacaaaaaaaaaaaaaaagggaagaaggaaaaaagcaaaaaacaatttgaagatatcctatctcaatgacaaatcaaaagagtgatattgcttttaactgtaatagaagaaaatgaatttatgtatatatcagatgtccaatactgtaattaatttattaaagactggctctccagttttaaaaaaaaaaaaaaaaaaaaaaaaaaaaaaaaaaaaa

SEQ ID NO: 862 - DNA, 1664 bp, human
ctgaatcttcgtttctctcccagggaccctccattttccatatccaggaaaatgtgatgcgccacaggtatcagcgtctggatcgccacttcacgttttagccacaagtgactcagtggaagatccagagtcaacagaggctcgtcaggaagatgtctacagaaaaggtagaccaaaaggaggaagctggggaaaaagaggtgtgcggagaccagatcaaaggaccggacaaagaggaggaaccaccagctgctgcatcccatggccaggggtggcgtccaggtggcagagcagctaggaacgcaaggcctgaacctggggccagacaccctgctctcccggccatggtcaacgaccctccagtacctgccttactgtgggcccaggaggtgggccaagtcttggcaggccgtgcccgcaggctgctgctgcagtttggggtgctcttctgcaccatcctccttttgctctgggtgtctgtcttcctctatggctccttctactattcctatatgccgacagtcagccacctcagccctgtgcatttctactacaggaccgactgtgattcctccaccacctcactctgctccttccctgttgccaatgtctcgctgactaagggtggacgtgatcgggtgctgatgtatggacagccgtatcgtgttaccttagagcttgagctgccagagtcccctgtgaatcaagatttgggcatgttcttggtcaccatttcctgctacaccagaggtggccgaatcatctccacttcttcgcgttcggtgatgctgcattaccgctcagacctgctccagatgctggacacactggtcttctctagcctcctgctatttggctttgcagagcagaagcagctgctggaggtggaactctacgcagactatagagagaactcgtacgtgccgaccactggagcgatcattgagatccacagcaagcgcatccagctgtatggagcctacctccgcatccacgcgcacttcactgggctcagatacctgctatacaacttcccgatgacctgcgccttcataggtgttgccagcaacttcaccttcctcagcgtcatcgtgctcttcagctacatgcagtgggtgtgggggggcatctggccccgacaccgcttctctttgcaggttaacatccgaaaaagagacaattcccggaaggaagtccaacgaaggatctctgctcatcagccagggcctgaaggccaggaggagtcaactccgcaatcagatgttacagaggatggtgagagccctgaagatccctcagggacagagggtcagctgtccgaggaggagaaaccagatcagcagcccctgagcggagaagaggagctagagcctgaggccagtgatggttcaggctcctgggaagatgcagctttgctgacggaggccaacctgcctgctcctgctcctgcttctgcttctgcccctgtcctagagactctgggcagctctgaacctgctgggggtgctctccgacagcgccccacctgctctagttcctgaagaaaaggggcagactcctcacattccagcactttcccacctgactcctctcccctcgtttttccttcaataaactattttgtgtcagcttcaaaaaaaaaaaaaaaaaaaaaaaaaaaaaaa

SEQ ID NO: 863 - DNA, 10812 bp, human
gcggcgtcggggcttcacaacaacagtggtggccgtagcagcggccgggccgggctgaggcgcaggcggggagcgggcccggcgccgcggcgctggtggatgctggggctccgaggcgacggccggggggcgggggccgaggcaggtataacggtaccggcggcggcagcgccgctgctcttcccttctcctcaggaggggggccaatggctagcgagaagccgggcccgggcccggggctcgagcctcagcccgtggggctcattgccgtcggggccgctggcggaggcggcgggggcagcggtggtggcggcaccgggggcagcgggatgggggagctaaggggggcgtccggctccggctcggtgatgctccccgcggggatgattaacccttcggtgccgatccgcaacatccggatgaaattcgcagtgttgattggactcatacaggtcggagaggtcagcaacagggacatcgtggagacggtgctcaacctgctggttggtggagaatttgacttggagatgaactttattatccaggatgctgagagtataacatgtatgacagagcttttggagcactgtgatgtaacatgtcaagcagaaatatggagcatgtttacagccattctacgaaaaagtgttcggaatttacagactagcacagaagttgggctaattgaacaagtattgctgaaaatgagtgctgtagatgacatgatagcagatcttctagttgatatgttgggggttcttgccagctacagcatcactgtcaaggagttgaagcttttgttcagcatgcttcgaggagaaagtggaatctggccaagacatgcagtaaaattattatcagttcttaatcagatgccacagagacacggtcctgatacttttttcaatttccctggttgtagcgctgcggcaattgccttgcctcctattgcaaagtggccttatcagaatggcttcaccttaaacacttggtttcgtatggatccattaaataatattaatgttgataaggataaaccttatctttattgttttcgtactagcaaaggagttggttactctgctcattttgttggcaactgtttaatagtcacatcattgaagtccaaaggaaaaggttttcagcattgtgtgaaatatgattttcaaccacgcaagtggtacatgatcagcattgtccacatttacaatcgatggaggaacagtgaaattcggtgttatgttaatggacaactggtatcttatggtgatatggcttggcatgttaacacaaatgatagctatgacaagtgctttcttggatcatcagaaactgctgatgcaaatagggtattctgtggtcaacttggtgccgtgtatgtgttcagtgaagcactcaacccagcacagatatttgcaattcatcagttaggacctggatataagagtaccttcaagtttaaatctgagagtgatattcatttggcagaacatcataaacaggtgttatatgatgggaaacttgcaagtagcattgcctttacatataatgctaaggccactgatgctcagctctgcctggaatcatcaccaaaagagaatgcatcaatttttgtgcattccccacatgctctaatgcttcaggatgtgaaagcgatagtaacacattcaattcatagtgcaattcattcaattggagggattcaagtgctttttccactttttgcccaattggataataggcagctcaatgacagtcaagtggaaacaactgtctgtgctactctgttggcattcctggttgaactacttaaaagttcagtagccatgcaagaacagatgctgggtggaaaaggctttttagtcattggctacttacttgaaaagtcatcaagagttcatataactagagctgtcctggagcaatttttatcttttgcaaaataccttgatggtttatctcatggagcacctttgctgaagcagctttgtgatcacattttatttaacccagccatctggatacatacacctgcaaaggttcagctttccctatacacatatttgtctgctgaatttattggaactgctaccatctacaccaccatacgcagagtaggaacagtattacagctaatgcacaccttaaaatattattactgggttattaatcctgctgacagtagtggcattacacctaaaggattagatggtccccggccatcacaaaaagaaattatatcactgagggcatttatgctactttttctgaaacagctgatactaaaggatcgaggggtcaaggaagatgaacttcagagtatattaaattacctacttacgatgcatgaggatgaaaatattcatgatgtgctacagttactggtggctttaatgtcggaacacccagcctcaatgataccagcatttgatcaaagaaatggaataagggtgatctacaaattattggcttctaaaagtgaaagtatttgggttcaagctttgaaggttctgggatactttctgaagcatttaggtcacaagagaaaagttgaaattatgcacacccatagtcttttcactcttcttggagaaaggctgatgttgcatacaaacactgtgactgtcaccacatacaacacactttatgagatcttgacagaacaagtatgtactcaggtcgtacacaaaccacatccagagccagattctacagtgaaaattcagaatccaatgattcttaaagtggtggcaactttgttaaaaaactctacaccaagtgcagagctgatggaagttcgtcgtttatttttatctgatatgataaaacttttcagtaacagccgtgaaaatagaagatgcttattgcagtgttcagtgtggcaggattggatgttttctcttggctatatcaatcctaaaaattctgaggaacagaagattaccgaaatggtctacaatatcttccggattcttttgtatcatgcaataaaatatgaatggggaggctggagagtctgggtggataccctctcaatagcccattccaaggtcacttatgaagctcataaggaatacctagccaaaatgtatgaggaatatcaaagacaagaggaggaaaacattaaaaagggaaagaaagggaatgtgagcaccatctctggtctttcatcacagacaacaggagcaaaaggtggaatggaaattcgagagatagaagatctttcacaaagccagagcccagaaagtgagaccgattaccctgtcagcacagatactcgagacttactcatgtcaacaaaagtgtcagatgatattcttggaaattcagatagaccaggaagtggtgtacatgtggaagtacatgatcttttagtagatataaaagcagagaaagtggaagcaacagaagtaaagctcgatgatatggatttatcaccggagactttagtaggtggagagaatggtgcccttgtggaggttgaatctctgttggataatgtatatagtgctgctgttgagaaactccagaacaatgtacatggaagtgttggtatcattaaaaaaaatgaagaaaaggataatggtccattgataacattagcagatgagaaagaagaccttcccaatagtagtacatcatttctctttgataaaatacccaaacaggaggaaaaactacttcctgaactttctagcaatcacattattccaaatattcaggacacacaagtacatcttggtgttagtgatgatcttggattgcttgctcacatgaccggtagcgtagacttaacttgtacatccagtataatagaagaaaaagaattcaaaatccatacaacttcagatggaatgagcagtatttctgaaagagacttagcgtcatcaactaaggggctggagtatgctgaaatgactgctacaactctggaaactgagtcttctagtagcaaaattgtaccaaatattgatgcaggaagtataatttcagatactgaaaggtctgacgatggcaaagaatcaggaaaagaaatccgaaaaatccaaacaactactacgacacaagctgtgcagggtcggtctatcacccaacaagaccgagatctccgagttgatttaggatttcgaggaatgccaatgactgaggaacagcgacgccagtttagcccaggtccacggactacaatgtttcgtattcctgagtttaaatggtctccaatgcaccagcggcttctcactgatttactatttgcattagaaactgatgtacatgtttggaggagccattctacaaagtctgtaatggattttgtcaatagcaatgaaaatattatttttgtacataacacaattcacctcatttcccaaatggtagacaacatcatcattgcttgtggaggaattttacctttgctctctgctgctacatcaccaactggttctaagacggaattggaaaatattgaagtgacacaaggcatgtcagctgagacagcagtaactttcctcagccggctgatggctatggttgatgtacttgtgtttgcaagctctctaaattttagtgagattgaagctgagaaaaacatgtcttctggaggtttaatgcgacagtgcctaagattagtttgttgtgttgctgtgagaaactgtttagaatgtcggcaaagacagagagacaggggaaataaatcttcccatggaagcagtaaacctcaggaagttcctcaaagtgtgactgctacagcagcttcgaagactccattggaaaatgttccaggtaacctttctcctattaaggatccggatagacttcttcaggatgttgatatcaatcgccttcgtgctgttgtctttcgggatgtggatgatagcaaacaagcacagttcttagctctggctgttgtttacttcatttcggttctgatggtttccaagtatcgtgacatattagaaccccagagagagactacaagaactggaagccaaccaggtagaaacatcaggcaagaaataaattcaccaacaagtacagttgtggtcataccatctatccctcatccaagtttgaaccatggattccttgccaagttaattcctgagcagagctttggccactcattttacaaagaaacacctgctgcatttccagacaccataaaagaaaaagaaacatcaactcctggtgaagatattcaggtagaaagttcaattccccatacagattcaggaattggagaggagcaagtggctagcatcctgaatggggcagaattagaaacaagtacaggccctgatgccatgagtgaactcttatccactttgtcatccgaagtgaagaaatcacaagagagcttaactgaaaatcctagtgaaacgttgaagcctgcaacatccatatctagcattagtcaaaccaaaggcatcaatgtgaaggaaatactgaaaagtcttgtggctgctccagttgaaatagcagaatgtggccctgaacctatcccatacccagatccagcattgaagagagaaacacaagctattcttcctatgcagtttcattcctttgacaggagtgttgtggtgcctgtaaagaaaccacctccaggtagtttagctgtaaccactgtgggagccactactgctggaagtgggctgccaacaggcagtacctctaatatatttgctgctactggagctacaccaaaaagtatgattaatacaacaggtgccgtggattcagggtcctcctcctcttcctcctcttctagttttgtgaatggtgctactagcaaaaaccttccagctgtacaaactgttgctccaatgccagaagattcagctgaaaatatgagcatcactgcaaaacttgaaagagcgttagaaaaagttgctcctcttcttcgtgaaatttttgtagactttgccccattcctatctcgtacacttcttggcagtcatggacaagagctattgatagaaggccttgtttgtatgaagtccagcacatctgtggttgagcttgttatgctgctttgttctcaggaatggcaaaactctattcagaagaatgcaggacttgcatttattgagctcatcaatgaaggaagattactgtgccatgctatgaaggaccatatagtccgtgttgcaaatgaagctgagtttattttgaacagacaaagagccgaggatgtacataaacatgcagagtttgagtcacagtgtgcccaatatgctgctgatagaagagaggaagaaaagatgtgtgaccatcttatcagtgctgctaaacatcgagatcatgtaacagcaaatcagctgaaacagaagattctcaatattctcacaaataaacatggtgcttggggagcagtttctcatagccaattgcatgatttctggcgtttggattactgggaagatgatcttcgtcgaaggagacgatttgttcgcaatgcatttggctccactcatgctgaagcattgctgaaagctgcaatagaatatggcacggaagaagatgtagtaaagtcaaagaaaacattcagaagtcaagcaatagtgaaccaaaatgcagagacagaacttatgctggaaggagacgatgatgcagtcagtctgctacaggagaaagaaattgacaaccttgcaggcccagtggttctcagcacccctgcccagctcatcgctcccgtggtggtggccaaggggactctctccatcaccacgacagaaatctacttcgaggtagatgaggatgattctgccttcaagaagatcgacacgaaagttcttgcatacactgagggacttcacggaaaatggatgttcagcgagatacgagctgtattttcaagacgttaccttctacaaaacactgctttggaagtatttatggcaaaccgaacctcagttatgtttaatttccctgatcaagcaacagtaaaaaaagttgtctatagcttgcctcgggttggagtagggaccagctatggtctgccacaagccaggaggatatcattggccactcctcgacagctttataaatcttccaatatgactcagcgctggcaaagaagggaaatttcaaacttcgaatatttgatgttccttaatactattgcaggacggacatataatgatctgaaccaatatccagtgtttccgtgggtgttaaccaactatgaatcagaagagttggacctgactcttccaggaaacttcagggatctatcaaagccaattggtgctttgaaccccaagagagctgtgttttatgcagagcgttatgagacatgggaagatgatcaaagcccaccctaccattataatacccattattcaacagcaacatctactttatcctggcttgttcgaattgaacctttcacaaccttcttcctcaatgcaaatgatggaaaatttgatcatccagatcgaaccttctcatccgttgcaaggtcttggagaactagtcagagagatacttctgatgtaaaggaactaattccagagttctactacctaccagagatgtttgtcaacagtaatggatataatcttggagtcagagaagatgaagtagtggtaaatgatgttgatcttcccccttgggcaaaaaaacctgaagactttgtgcggatcaacaggatggccctagaaagtgaatttgtttcttgccaacttcatcagtggatcgaccttatatttggctataagcagcgaggaccagaagcagttcgtgctctgaatgtttttcactacttgacttatgaaggctctgtgaacctggatagtatcactgatcctgtgctcagggaggccatggaggcacagatacagaactttggacagacgccatctcagttgcttattgagccacatccgcctcggagctctgccatgcacctgtgtttccttccacagagtccgctcatgtttaaagatcagatgcaacaggatgtgataatggtgctgaagtttccttcaaattctccagtaacccatgtggcagccaacactctgccccacttgaccatccccgcagtggtgacagtgacttgcagccgactctttgcagtgaatagatggcacaacacagtaggcctcagaggagctccaggatactccttggatcaagcccaccatcttcccattgaaatggatccattaatagccaataattcaggtgtaaacaaacggcagatcacagacctcgttgaccagagtatacaaatcaatgcacattgttttgtggtaacagcagataatcgctatattcttatctgtggattctgggataagagcttcagagtttattctacagaaacagggaaattgactcagattgtatttggccattgggatgtggtcacttgcttggccaggtccgagtcatacattggtggggactgctacatcgtgtccggatctcgagatgccaccctgctgctctggtactggagtgggcggcaccatatcataggagacaaccctaacagcagtgactatccggcaccaagagccgtcctcacaggccatgaccatgaagttgtctgtgtttctgtctgtgcagaacttgggcttgttatcagtggtgctaaagagggcccttgccttgtccacaccatcactggagatttgctgagagcccttgaaggaccagaaaactgcttattcccacgcttgatatctgtctccagcgaaggccactgtatcatatactatgaacgagggcgattcagtaatttcagcattaatgggaaacttttggctcaaatggagatcaatgattcaacacgggccattctcctgagcagtgacggccagaacctggtcaccggaggggacaatggggtagtagaggtctggcaggcctgtgacttcaagcaactgtacatttaccctggatgtgatgctggcattagagcaatggacttgtcccatgaccagaggactctgatcactggcatggcttctggtagcattgtagcttttaatatagattttaatcggtggcattatgagcatcagaacagatactgaagataaaggaagaaccaaaagccaagttaaagctgagagcacaagtgctgcatggaaaggcaatatctctggtggaaaaaactcgtctacatcgacctccgtttgtacattccatcacacccagcaatagctgtacattgtagtcagcaaccattttactttgtgtgttttttcacgactgaacaccagctgctatcaagcaagcttatatcatgtaaattatatgaattaggagatgttttggtaattatttcatatattgttgtttattgagaaaaggttgtaggatgtgtcacaagagacttttgacaattctgaggaaccttgtgtccagttgttacaaagtttaagctttgaacctaacctgcatcccatttccagcctcttttcaagctgagaaaaaaaaaaaaaaacacgtttgatactttgtacatcagatgcatcttatttaaaagggatacttttgtaaaagtaaaaccttgtataaagaacaaaatgtttcttaattttattgtggagttacaacttgcatgttccttactcctgttggcttgatggaacaggtgcattcacactatgaaacagaaagatctgtccaaggacacagcttgtatgaaagggttgaatttgggctccatcagtaatttttgacattttcaccaaaatatagtttgcactttttaatctaaagtcatcccttctgagtgaaatttgctcataaagcatttggatactaagccattatttgccattttgggtactttatacaaagaaaattcagccctaccctgcataatttgaagacacagcagaaagggggcttagggatgaggtcctggtttttcttgtataaataggagtcatgggcgttagttctgtagtaataacttcccagcacctggacatctcttccagagttatcccactggcttggtgtgtatacattaggggaggataatctgatgctaactttttttttctctttggttcttgaatagcttagtttctttaataacaagtcaaactttattacaacaataactgaagttattcttttaggttctcgtgaaattctcactgaaagccacattcttagcctaaggcgtttcatcttttatgatataaaatgatggctatcaaatgattttccatacattgtactgatcaagttatacacccaggggtatatacactttcttcatgtttcttctttgtatatttggtgactgtatcgtcatagatgtacatattgtgtcggtagggctatgaggcatgttacaggaatgtaattttctcagaatttacactcactcgcagtcatttatttaaaaagataaaacaagataatgggttctttgtattggcactttgcaccagaaacatatcattatttattgatgtgattacttatttgttatccaccttgtactagtaagttttagcactgaattccttcttcactgttgtttgtatttatgaaattctgaaattatggggaatcagcgtaatgattaagttattcatcaccaggctgtaagcaatatcttgagtttgtagcttagaattgggaggatacttaacatctggaagacaagttcatttcatcttgagatcatggtgaaatattttggatatataaattccttaagctattgtaaccatgttttattgcaaagatgtaaaatatgccagatgtgtgtgagttggaaatcaaaaaaagaaaaataaaatatgcaaagaattcaaaaaaaaaaaaaaaaaaaaa

SEQ ID NO: 864 - DNA, 2058 bp, human
cggtgctagcgacacgggagtggcaaacgcatcctcttgccgttcccggtgtttgggccttgcctgtgacggtgggaaaagaaaatggccttgctgtgctacaaccggggctgcggtcagcgcttcgatcctgagaccaattccgacgatgcttgcacataccacccaggtgttccggtctttcacgatgcattaaagggttggtcttgctgtaagagaagaacaactgatttttctgatttcttaagcattgtaggctgtacaaaaggtagacataatagtgagaagccacctgagccagtcaaacctgaagtcaagactactgagaagaaggagctatgtgaattaaaacccaaatttcaggaacacatcattcaagcccctaagccagtagaagcaataaaaagaccaagcccagatgaaccaatgacaaatttggaattaaaaatatctgcctccctaaaacaagcacttgataaacttaaactgtcatcagggaatgaagaaaataagaaagaagaagacaatgatgaaattaagattgggacctcatgtaagaatggagggtgttcaaagacataccagggtctagagagtctagaagaagtctgtgtatatcattctggagtacctattttccatgaggggatgaaatactggagctgttgtagaagaaaaacttctgattttaatacattcttagcccaagagggctgtacaaaagggaaacacatgtggactaaaaaagatgctgggaaaaaagttgttccatgtagacatgacttgcatcagactggaggtgaagttaccatttcagtatatgctaaaaactcacttccagaacttagccgagtagaagcaaatagcacattgttaaatgtcattattgtatttgaaggagagaaggaatttgatcaaaatgtgaaattatggggtgtgattgatgtaaagcgaagttatgtaactatgactgcaacaaagattgaaatcactatgagaaaagctgaaccgatgcagtgggcaagccttgaactgcctgcagctaaaaagcaggaaaaacaaaaagatgacacaacagattgagtgggagatggaaggaaggctattacattatttccgaatttttaatactgtgtgaagtggtggcttgctgctgtaatcttttgttttgttgttgtgttactgaatgtggcatttcagggttaacattaggttcttaaaagccaaagtcagtttgtctttttgtgcctctcatctttcttttgtgttatgtaagattgattattcatttctccctactggtaggaaccatagttgtgtcctatacttgaagaggctggaaagtagcccataaccataattgcagtatttctttgtatttctctgttaagcaaagaaatattaaggaacattttttttatgtttttgtattattccataattagtaaagcaagatgaaatgtcaaattttaatcagttttttcatggatttgtgttcttacagtacttgaaaatatttaaggaagagatgaagctctgcagttttttctatgtgggatgattacttttttaaggaggattaattctgaggtagtatagtaactaaaggggaatatatgaattgtttaacaaattagaatttgtttacaactacttgaatttttaaattatgtcaaaacttacattacttgccaagcagtatgatgttataggaaacataaataagattacagaggtatcaatttggttaaaattcaccattttataagactaagcaataatcttaacaacctctttcctgaatatttaaatgtgtttgtatggtgttatgactaattgttactgatttagagactaagccctcttaaaacctttagttaaatataaaaagaaattatatatatcttgcctccctgatggaaaactatataaaattgtagacttaaaaggtttgtggaaatacattaggatatcagaaaactaaatatatggagttgctttatgactattacatgttaaataaaaatagcttaattgttaaaaaaaaaaaaaaaaaaa

SEQ ID NO: 865 - DNA, 2548 bp, human
ggtaaccgcgtcagggagttggattctatcctgcaagggcacggggacccacaacgacggctgtccctaaagaaccgttgcgactggtaactgaagtggaagagagtccagatttcttgtgtgtggtcaaggagacggacaaactttttgtcttcagacgagggagcgttttgtaggctctccaggggttgagatgattcctgcttctgcgaaggctccccataaacagcctcataagcagagcatcagcataggcagaggaaccaggaagagagatgaagattcagggactgaagtgggagaaggcacagatgaatgggcccaatccaaagccacagttagaccccctgaccagctggagttgaccgatgcggagttaaaggaggagttcactcggattttgacagccaacaacccacacgcaccccagaacattgtcaggtacagcttcaaagaaggcacatataagcctattggctttgtgaaccaactggcagttcactacacccaggttgggaacctgatccccaaagactcagatgaaggacggcggcagcattaccgcgatgaattagtggcaggttctcaggagtctgtcaaggtgatttcagaaacaggaaacctcgaagaagacgaagagcccaaggagttagaaactgagcctgggagtcaaacagatgtgcctgcagctggggcagctgaaaaagtgactgaagaagaattgatgactcctaagcagcccaaggagagaaagctcactaaccagttcaacttcagtgagagggcctcacagacctacaacaaccctgtccgggatcgagaatgccagacggagcctcctcccaggacaaacttttcagccacagccaatcagtgggagatctatgatgcctatgtagaggaacttgagaagcaggaaaagaccaaagagaaggagaaggcaaagaccccagtggctaaaaaatcagggaagatggccatgaggaagctgacatctatggagtctcagactgatgatctcatcaaattgtcccaagctgctaagatcatggagcggatggtcaaccagaatacatatgatgacattgctcaagattttaagtactatgacgatgctgctgatgaataccgggaccaggtgggtaccctgctgccgctctggaagttccaaaatgacaaagccaagcgcctgtccgtcactgccctctgctggaatccaaagtacagggatctgtttgcagtgggatatggctcttatgacttcatgaagcagagccggggcatgctgctgctctacagcctgaagaaccccagcttccctgagtacatgttcagcagcaacagcggcgtcatgtgtctcgacatccacgtggaccacccctacctggtggcagtaggccactatgacggcaacgtggccatttacaacctcaagaagccccactcccagccctccttctgcagctcagccaagtctggcaagcactcagaccctgtgtggcaggtcaagtggcagaaggatgacatggaccaaaaccttaacttcttctctgtgtcatctgacggcaggattgtgtcttggactctcgtgaagagaaagctggttcacatagatgtcatcaagctgaaggtggaaggcagcaccacggaagttcctgaggggttgcagctgcacccagtgggttgtggcactgcctttgacttccacaaagagattgactacatgttcctagtgggcacagaggagggaaaaatctacaagtgctctaaatcctactccagccaattcctcgacacctatgacgcccacaacatgtcagtggacactgtgtcctggaacccataccacaccaaggtcttcatgtcctgcagctccgactggacagtgaagatctgggaccacaccatcaagaccccgatgttcatctatgacctgaactcagccgtgggtgatgtggcctgggcgccatactcttctactgtgttcgcagcagtcaccacagatgggaaggcccacatatttgacttagccatcaacaagtatgaggccatctgcaaccagcctgtggcggccaaaaagaacaggctcacccacgtgcagttcaatctcatccaccccatcatcattgtgggcgatgaccgtgggcacatcatcagcctcaagctctcacccaatttgcgcaagatgccaaaggaaaagaaggggcaggaggtgcagaagggtccagctgtggagattgcgaaactggacaaactgctgaacctggtgagggaagtgaaaatcaagacctgaggggctggcctcagtctctgtcccatcgcttgaatacagtactcctagggcttgaccctggtacccagcccagccttagcacccagcatgtgaccccactcctgatcaggtcccagcatcttcccttcttgttctgttccttaaggtcccagcaccttaccccaggacttggtcttcaaccaccattacccctctaactttgcacaaataaacctgtgtagaaacccaaaaaaaaaaaaaaaaaaaaaaaaaaaa

SEQ ID NO: 866 - DNA, 1839 bp, human
atgtggctggaccgccgcggatggctcagggttcttggacattggcgctacgaccttaggcgccctagctttaccaggacttggagtggcgataagggcccaatggcagaaacagtgtctacccaggttgggacagagggcgggctgagggcttcgcatcagcaaaacggtgacgctggtggcgacgcgaaggttgagctgtcccccgggcccccgaagccggctggccgggaagtggagccggccccagtaggcggggagcatccctcggctgcagccccaggcccgggcaagcataagaagcggcggggcgcaaccagggagcgtgtcgtgccgcccccgaagaagcggcggaccggggtgagcttcggagatgagcactttgcagaaaccagttattacttcgagggcggcctgcgtaaggtgcggccctattactttgacttccggacctactgcaaaggtcgctgggtgggccacagcttgctgcacgtcttcagtaccgagttccgagctcagcccctggcctactatgaggccgcggtccgggcgggccgcctgcaactcaacgagaagccggtgcaggacctcaacatcgtgctcaaggacaatgatttcttgcggaacacagtgcacaggcatgagccaccagtcacagcagagcccattcgcctgctagctgagaacgaagatgtggtggttgtagacaagccttcctccattcccgttcacccctgtggccgcttccgacacaacacagtcatcttcatcctaggcaaggagcaccaactcaaggagctacaccccttgcatcggcttgaccgccttacctcaggggtgcttatgtttgccaagacagctgcagtctctgagagaattcacgagcaggttcgggaccggcagctggagaaggagtacgtgtgccgggtggaaggggagttccccactgaggaagtgacctgtaaagaacccatcttagtggtgtcttacaaagtaggggtgtgccgtgtagatccccggggcaagccctgtgagacagtgttccagaggctaagctacaatggccagtccagtgtggtacggtgccggccactcacaggccgcacacaccagattcgagtccaccttcagttcttgggccatcccattctcaacgaccccatctacaactcagttgcctggggtccttctcgaggccggggcggctacattcccaagacaaacgaggagttgctacgggacctggtagcagagcaccaggccaaacagagcctggatgtgctagatctctgtgagggtgacctgtccccaggactcacagactctacggccccctcctcagagttgggcaaggacgacctggaagagttggctgcagctgcccagaagatggaggaagtagctgaggcagcccctcaggagttggacacaatagccttggcatcagagaaggcagttgaaacagatgtcatgaatcaagagacagacccactctgtgcagagtgccggctggtgcgacaggatcccttgccccaagaccttgtgatgttcctacatgccctacgctataaagggccaggctttgagtacttttcaccaatgcctgcctgggcacaggatgactggcaaaaggactgagggtgtggccaatggagggattgcttcttgggttgtgacaaggatgggctatagggcaagggctgaccccatgggctagtacttggggtttctataggaatgaggacgggcttctaaagagacctgctcatacttgctacctccttccagtgggaatttggagactttttggtttgtaaatatatccctttttctaacatc

SEQ ID NO: 867 - DNA, 388 bp, human
ctgtggagggcgagctgagccctggccgccgccacaatgggccgcgagtttgggaatctgacgcggatgcggcatgtgatcagctacagcttgtcaccgttcgagcagcgcgcctatccgcacgtcttcactaaaggaatccccaatgttctgcgccgcattcgggagtctttctttcgcgtggtgccgcagtttgtagtgttttatcttatctacacatgggggactgaagagttcgagagatccaagaggaggatccagctgcctatgaaaatgacaaatgagcaacgcatccggatgacggttccctgtctctgaaagacctttctctggaagaggagtctgcattgtagtgtctcaaagacacaataaacttcctatggtctga

SEQ ID NO: 868 - DNA, 1097 bp, human
ggcacgagggatggtggacagcgtgtaccggacccgctccctgggggtggcggccgaagggctcccggaccagtacgcggacggggaggcggcgcgcgtgtggcagctgtatatcggagacacccgcagccgcaccgccgagtacaaggcatggctgcttgggctgctgcgccagcacggctgccagcgggtgctcgacgtagcctgtggcactggggtggactccattatgctggtggaagagggcttcagtgtgacgagtgtggatgccagtgacaagatgctgaagtatgcacttaaggagcgctggaaccggcggcacgagcccgccttcgacaagtgggtcatcgaagaagccaactggatgactctggacaaagatgtgccccagtcagcagagggtggctttgatgctgtcatctgccttggaaacagtttcgctcacttgccagactgcaaaggggaccagagtgagcaccggctggcgctgaaaaacattgcgagcatggtgcgggcagggggcctactggtcattgatcatcgcaactacgaccacatcctcagtacaggctgtgcacccccagggaagaacatctactataagagtgacttgaccaaggacgtcacaacatcagtgctgatagtgaacaacaaggcccacatggtgaccctggactatacggtgcaggtgccgggggctggccaggatggctctcctggcttgagtaagttccggctctcctactacccacactgtctggcatccttcacggagctgctccaagcagccttcggaggtaagtgccagcacagcgtcctgggcgacttcaagccttacaagccaggccaaacctacattccctgctacttcatccacgtgctcaagaggacagactgagtgtggcctcagctcccacaagcctctgcccaggcactgctaggctctgtctggaagatggggaccagcagccccacaccagggccagcctctagagcagactacagctggggtgcagggatgtgggttccacagacggaagggtaaacaatatagtctttttcagttcctgcaaaaaaaaaaaaaaaaaaaaaaaaaa

SEQ ID NO: 869 - DNA, 2785 bp, human
gatccgccaccatggctgaaggagagaatgaagtgagatgggatggactctgcagcagagattcaactactagggagacagcattggaaaacattaggcaaaccattttgaggaaaaccgagtatcttcgttcggtgaaagaaacacctcatcgtccatcagacgggctttcaaataccgagtcttcggatgggttgaataagctacttgctcatctgcttatgctttctaagaggtgtcccttcaaagatgtgagagagaaaagtgagtttattctgaagagcatccaggaacttggcattagaattcctcgaccactaggacagggaccaagcagattcatcccagaaaaggagatcctccaagtggggagtgaagacgcacagatgcatgctttatttgcagattcttttgctgctttgggccgtttggataacattacgttagtgatggttttccacccacaatatttagaaagtttcttaaaaactcagcactatctactgcaaatggatgggccgttacccctacattatcgtcactacattggaataatggctgcggcaagacatcagtgctcctacttagtgaacctgcatgtaaatgatttccttcatgttggtggggaccccaagtggctcaatggtttagagaatgctcctcaaaaactacagaatttaggagaacttaacaaagtgttagcccatagaccttggcttattaccaaagaacacattgagggacttttaaaagctgaagagcacagctggtcccttgcggaattggtacatgcagtagttttactcacacactatcattctcttgcctcattcacattcggctgtggaatcagtccagaaattcattgtgatggtggccacacattcagacctccttctgttagcaactactgcatctgtgacattacaaatggcaatcacagtgtggatgagatgccggtcaactcagcagaaaatgtttctgtaagtgattctttctttgaggttgaagccctcatggaaaagatgaggcagttacaggaatgtcgagatgaagaagaggcaagtcaggaagagatggcttcacgttttgaaatagaaaaaagagagagtatgtttgtcttctcttcagatgatgaagaagttacaccagcaagagctgtatctcgtcattttgaggatactagttatggctataaagatttctctagacatgggatgcatgttccaacatttcgtgtccaggactattgctgggaagatcatggttattctttggtaaatcgcctttatccagatgtgggacagttgattgatgaaaaatttcacattgcttacaatcttacttataatacaatggcaatgcacaaagatgttgatacctcaatgcttagacgggcaatttggaactatattcactgcatgtttggaataagatatgatgattatgactatggtgaaattaaccagctattggatcgtagctttaaagtttatatcaaaactgttgtttgcactcctgaaaaggttaccaaaagaatgtatgatagcttctggaggcagttcaagcactctgagaaggttcatgttaatctgcttcttatagaagctaggatgcaagcagaactcctttatgctctgagagccattacccgctatatgacctgatgcctttccttcattaaagatgattctggaatgatcagcagatatagtctacaagggggaaggtactaagccccaggaccaatggtagacaaaataattcagaaatccattgtgccatgattcctttagtttctgctatttttctgtggaaaaccactgctggcacaagcagtgactgtttggcagcttcaagtttagagctgtgaagacaggctgccattcacagtattttgctttttgacagtacaagatgctgtgtaactgttttaatacagcaaatagtaactctccaaatcctgttgcttttatgttaaataagataacaagaattggagcatgcaaagaatgggacttggataatgacttaagctttatatgtaaagaattttagaagatcttggtgctgctattcctgctggaggaatgaatagatggctgtttcagttaagctattagtaataaaagtgaacattgctactatctgagcctacatacataacttgtgtgatttcaaattaaacttgcattatgtgttaattttcttgcatctaaaaaagcatagaattcctactcacacagctcagcaacaaccattttgatggtaacagttaatttctttcattagttttttaaattcagggttctggatattaaattaaaatggcattcttaaagattttcttcaaaaagcaatcctaaatgaaagtgtgtaaattataagaagctggcgatcttttgatatgctgtttcacaggatcctgacactggagggcagctgtcttgtgcattacttgtgttcccagcaccaaagttgtgggacatgttgctgtagactgctgcgcagtcctgggtgcattcagtctctctgcctctgcctgcctcctggtccccactttaaaggctgtgcagctccttaaataataaagctggaaaatatttttagtcgggttatcaaatttgatttacaaaaacgctaactttgtttgaaatgcaaacaggtttgaaaatatgtattaagtactttgtattctggaagcgtgaattgcttttgaagtctgtcagtattactggtatttttaaataaagaagaatttttctccaaaaaaaaaaaaaaaaaa

SEQ ID NO: 870 - DNA, 3530 bp, human
gcaatactcagtggataaaaggcttgcagtcccagctgggaaaaagagtcccattatctcccagctgcatagacattccatacggcttggttctgcctggacgcacagcatgcctggctgagagcttgaaacagagttctgcagaaaaactgtaaagatcccgagacatttccctggtaagatctactcttgagatactgactggaagatagactgttttgttccacctgattgtatgggagaaatttttgaccttagaaagtggaaatgaggttgctatggaaactggtaattctgctgccactcataaactcttctgcaggtgatggtcttttaagccgtcctatttttactcaggagccacatgatgtcatttttcctttggatttatcaaaatctgaggtcatcctgaattgtgctgctaatggttacccttcgcctcattataggtggaagcaaaatggcacagacattgattttactatgagttatcactacaggttggatggaggcagtcttgcaatcaatagcccccacacagatcaagatattggcatgtaccagtgcctggccaccaatcttctggggacaattctgagtcggaaggcaaagctccaatttgcatatattgaagactttgaaactaaaacaagaagcacagtatctgtccgagaaggtcaaggtgtggtgcttctctgtggcccaccgccacattttggagatttatcttatgcatggaccttcaatgataaccccttatacgtccaagaggacaataggcgatttgtatctcaagagacgggaaacttgtacattgccaaagtggaaccatcagatgtgggcaactacacttgctttataactaacaaagaggcccagagaagtgttcaaggtccacccactccattagtgcagcgcactgatggtgtgatgggggaatatgaaccaaagattgaagtgcgttttcctgaaactatacaagctgcaaaggattcatctgtaaaactggaatgttttgcccttggaaatccagtccccgatattagttggagaaggttggacgggagcccgttgccagggaaagtcaagtacagcaaatcccaagctatccttgaaatcccgaacttccaacaagaagatgaaggcttttatgagtgcattgcaagcaaccttcgaggaagaaaccttgcaaagggtcaactcattttttatgctcctccagaatgggaacagaaaatccaaaatacacacctctctatctatgacaacttgctctgggaatgtaaagctagtggaaagccaaacccttggtatacatggttaaaaaatggtgaacgactcaacccagaggagagaattcaaatagaaaatgggacactcatcataacgatgctgaatgtgtcagattctggtgtgtaccaatgtgctgcagaaaacaaatatcagataatttatgcaaatgctgaattgagagttttagcctcagctccagatttctccaaaagtccagttaaaaaaaagtcttttgttcaagttggtggggatattgttatcggatgcaaaccaaatgcttttcccagggcagctatctcttggaaaagaggaacggagacccttagacaaagcaaaagaatatttctcttggaggatggcagcctcaagatatataatattaccaggtcagatgctggatcatatacatgcatagccacaaatcagtttggcactgcaaagaacactggcagcctcattgtaaaagagagaactgtcattaccgtcccaccttccaaaatggatgttacagttggcgagagtatagtgctaccatgccaggtgtcccatgacccctccattgaagtggtatttgtatggtttttcaatggagatgtcatagacttaaaaaaaggagtggctcattttgaaaggattggaggagaatctgttggggatttgatgataaggaatattcagttacatcattcaggaaaatatctctgcacagtacaaacaaccctagaaagtttatctgcagtagccgatatcattgttagaggtccaccaggtcctcctgaggatgtgcaagtggaagacatttccagtactacttctcaactaagttggagagcaggcccagataataacagtcccattcaaatatttactattcagactcggacaccattttctgtgggttggcaggctgttgctacagttccagaaattctcaatggtaagacatacaatgcaacagtggttggtttgagtccttgggtggaatatgaatttcgtgttgttgccggcaacagcattgggattggagaaccaagtgaaccatcagaattgttaagaactaaagcatcagtccctgttgtggcaccagtaaacatccatggaggtggaggaagtcggtctgaactcgtcattacgtgggagtcaattccagaagaactgcagaatggggagggatttggatatatcatcatgttccggccagtgggctcgacaacctggtccaaggagaaagtgtcatctgtggaatcatcaaggtttgtctacagaaatgaaagcatcatcccactgtctccctttgaagtcaaagtgggtgtgtataataatgaaggagaaggatccctgagtactgtgaccattgtctactctggggaagatgaacctcaactggccccaaggggaacttctctccagagtttttctgcttctgaaatggaggtttcatggaatgctattgcctggaatagaaacactggaagagtgctgggctatgaggtcttatactggacagatgactccaaagaatccatgataggtaaaattagagtcagtggaaatgtcacaaccaaaaacatcacggggctgaaagctaataccatctactttgcttccgtaagagcttacaacactgctgggacagggccctcaagccccccagtcaatgttaccaccaaaaagtctcctccaagccaaccaccagcaaacattgcctggaagctgacaaactctaaattatgcttgaactgggagcatgtaaaaaccatggaaaatgagtctgaagttttggggtacaagattctgtaccggcaaaacagacagagtaaaactcatattttggaaacaaacaatacatcagctgagcttctggttccatttgaagaagactacttaattgaaataagaacagtcagtgatggtggagatggaagcagcagtgaggaaattaggattccaaaaatgtcaagtttgagttccagaggaattcaattcttagaacctagcacccattttctttccattgtcattgtgatttttcactgttttgctattcagccacttatctgatgaataaaaccataaatctttgagagttttttgaaagcaaatcattctgtatatatgctctccagcctctgacacaagatgcgttcttaatacagacttgtttgcaaagaaaaaaaaaagtatattattaaaatcctgtaaatatctatggtatattaataaaacaattttaaaca

SEQ ID NO: 871 - DNA, 3466 bp, human
gcggagacggcggaagcggagagcaacagcgcgccgagacttccagtgtcctactattgaagcctgcacctgctgcattgctgttttcctgagacggagttttgccatgttgtccaggctggtgtcgaaatcctgagctcaagtggtctgcctgcctcggcttcccaaagtgctgggattacaggtgaggctgctgtcagaaaggaacttttacacagtttgccttcagagacagtctatcggcatgttgtagagttttattactaagaaaataaatgttacttacatgattgtggtggtgccatgcagcaagaatcagagagatgcagagttagagccagaaggcctgacatggcactttatgtacctaaagctcgtaggggtgcagtactccttaagacaggtgatgaagaagaaagctgtggttcacctaactctgtggtgaaagaaaagcaaaaagaaagttctctctcccaaaaagaagtctttaaagacaaaccggaggctcgaagactaaatatcaatcctgatagaaaggagcataattgtagagaagaaaagaaatcttcaacaaaattaagaatggacacatgccttcaaaaaacaaatagagtttgttctaagagaggaaccactgaatccaaagaagtattatcccaaggacaacagcagggagccccaaatgctggggttataactaatgcacctttgcagagacattttaaaccaaagaaggtggagtgtttggaagttgaaactacggatgtgacaggacatgagaggatacttctttcacaggcctgtttagaaatcagcgaggctcaagttccaagcaaaccattccaaaatgtggaattctgtgacttcagtaggcatgaacctgatggggaagcatttgaagacaaagatttggaaggcagaattgaaactgataccgaggttttggagatactatatgagtttcctagagtttttagttctgtcatgaaacctgagaatatgattgtaccaataaaactaagctctgattctgaaattgtacaacaaagcatgcaaacatcagatggaatattgaatcccagcagcggaggcatcaccactacttctgttcctggaagtccagatggtgtctttgatcaaacttgcgtagattttgaagttgagagtgtaggtggtatagccaatagtacaggtttcatcttagatcaaaaagatacagattccattcctgcaactatgggtcacatctctctgtcagagagcacaaatgacactgttagtccagtaatgattagagaatgtgagaagaatgacagcactgctgatgagttacatgtaaagcacgaacctcctgatacagctgtccttgctcatgaaacacatagagatagtggatttaagaatgtaggtgacattaccaataaagcatgtatgatggacactacaggtatgtcctgtagtgatcatgtaactgttgatagcccttatgtagttgcagttagaatagctgatgagacctctattaatacacgaagtttctcaaagtttgtaggaatgagtgcagatgcaacccctcttcatgtagctagaagtgggaatgacactgaagatttcggcaacccttctgcttgctcagatatttatggtgagagtatttcatctcattttacagagtcaacaggaaagttgatagagagcttgtcagattgtgcttcctccttacctataaaaaagattgctggtagtaattataacacttttttggactctgaactcagtatgttaaatgggacaaaagttctttcagacagtgccgtgggcattgacctgggtagtactggtgatacaacagaagcattgcacgaactaagaactgccgaagagttcaaaacagaagagcaagatgactcagggagtatagaatttggtgtatcttttcctgatagggaatcatcatctatggaaacatccatcgaaccaaaagcaactgaaacttctcacacagagggaattactgccattgaggagagctgggagtctatgtttaacgatgatggtgactgcctggatccacgtcttctacaagaggggattctgatgcacataaagcccgagaaccactgctcaaagttatcagggaataccaagagcagagagagcatccaggaacctagatctgattactacaatcatgaagttcctgatattgacctcagtgattgtgaattcccacatgtcattgaaatttatgactttccccaagaatttcgtactgaagaccttctacgggttttctgcagttatcaaaagaaaggatttgatattaaatgggtggatgatacacatgccctaggagtattctccagtccaattacagctcgtgatgcgttgggtattaaacacaccatggtgaagattcgtcccttgtcgcaggccacaagagcagccaaggccaaagctagagcttatgctgagttcctccagccagcaaaggagcgtcctgagacttcagcagccctagccagaaggttagtcatcagtgcccttggggttcgaagtaagcagagcaaaaccgaacgagaagcagagctcaagaaactgcaagaagccagagagagaaagcggttggaagccaagcaacgggaagacatctgggaaggcagagaccagtctacagtttgaacatcactcaatgaaagggataattccatgaatcagaaaatgtttccatagccttcagataagatgatccttccagagctctatgtacatgcagatgtgcatgttaaagagataaagtgatcgagacaaggactgactgggtatagaaggaagacagactcctgtcttcactcctaaatgcagttctttggaatcaccctactgtggtgggcgtagtagggagccatcagctaggaagaaacgtgggagatgtgaattccaagagttgcctggacagggcaagtcatgttagcgtgggtcacacttccaagatatttaaagcaaatacaaaacagaacagaggattcaaaccgcaagtatgggagatttaggccctgcagaggcagaccattccttagtatctcacaaagcagagtaatactggaggcagagtagggggtggttggagagcagttagtacaaagaggcagaacagtgtctggtttacttggcatacacagaatctgcactgccggttccagaactccaaagttggtgaactacaggagatgtgggtatttagactccaaagtttatactgagctcagtgcctgggaccgctccagctgcactgcagccaggggggataccagcttcattcctcagagtaaaccaaccttgggagctgtgtgccagttccagtgtaagcagtaataccatgttgtaagagggaacattaaagcccattttatggcatataaaaaaaaaaaaaaaaaaaaaaaaaaaaaaaaaaaaaaaaaaaaaa

SEQ ID NO: 872 - DNA, 1102 bp, human
ccacgcgtccgctggagggaccgaaggtgccgagggctccgcatcgcaaccatggcgctgcgctggggcatcgtgtctgtcggcctcatctccagcgacttcacagccgtgctgcagacgctgcctcgctctgagcaccaggtggtggcggtggcggcccgcgatctgagccgtgcgaaggagtttgcacagaaacacgacatccccaaggcctacggctcctatgaggagctggccaaggacccgagcgtggaggtggcctacattggcacccagcacccccagcacaaggcggcggtgatgctgtgcttggcggcgggcaaggccgttctgtgcgagaagcccacgggcgtgaacgcggcggaagttcgcgagatggtcgcggaggcccgatcccgagccctcttccttatggaggccatctggacccgcttctttcctgcctccgaggctctgaggtctgttttggcccagggaactctaggagacctccgggtggctcgggcagaatttgggaagaatctcatccacgttccccgggccgtagaccgggcccaggctgggggggccctgctggacatcggcatctactgtgtccagttcacctccatggtctttggagggcagaagccagagaagatttctgtcgtgggaaggcgtcatgaaacaggtgtggatgacactgtcacggtgctcctgcagtacccaggggaggtccatggcagcttcacctgcagcatcaccgtgcagctctccaacacggcctccgtgagcggcaccaagggcatggtacagctcctcaacccctgctggtgcccgaccgagctggtggtgaagggggagcataaggagttcccgctgcccccagtcccaaaggactgcaattttgacaacggggcaggcatgagttatgaggccaagcacgtctgggagtgcctacgcaagggtatgaaggaaagtcctgtgattcccctgtcggaaagtgagctcctggctgacatccttgaagaggtgaggaaggccattggagtcaccttcccccaagacaaacgctgatgtatccccgaataaataaagacatcttaaaaaaaaaaaaaaaaaa

SEQ ID NO: 873 - DNA, 1191 bp, human
atggtggcgcgcaggaggaagtgcgccgcgcgggacccggaggaccgtatccccagcccactgggctacgcagctattccaatcaagttctctgaaaagcaacaggcttctcactacctctatgtgagagcacacggcgttcgacaaggcaccaagtccacctggcctcagaagaggactctttttgtcctcaatgtgcccccatactgcacagaggagagcctgtcccgcctcctgtccacctgtggcctcgtccagtctgtagagttgcaggagaagccggacctggctgagagcccaaaggagtcaaggtcgaagttttttcatcccaagccagttccgggtttccaggtagcctatgtggtgttccagaagccaagtggggtgtcagcggccttggccctgaagggccccctgctggtgtccacagagagccaccctgtgaagagtggcattcacaagtggatcagtgactacgcagactctgtgcccgaccctgaggccctgagggtggaagtggacacgttcatggaggcatatgaccagaagatcgctgaggaagaagctaaggccaaggaggaggagggggtccctgacgaggagggctgggtgaaggtgacccgccggggccggcggcctgtgctcccccggactgaggcagccagcttgcgggtgctggagagggagagacggaagcgcagccgaaaagagctgctcaacttctacgcctggcagcatcgagagagcaagatggagcatctagcgcagctgcgcaagaagttcgaggaggacaagcagaggatcgagctgctgcgggcccagcgcaaattccgaccgtactgagctgtgagagccgcagtgaatggctggaggtgcagggccaggaggaggcgaggcagggcctgcagcggtctctgagaggccgagctctggccaacgggccccaggttgaaggccaccgcgtccaacagccccatcagagtccacacaggccaggagggaaggaccaggccacccctcgggtcttgtgcttcagcagtcctggggacccaggcgtgccgagaggaggacttgtccttcctgcttcttgcctccacaccctcctctccaggaccctggatgaatccgttctgtgcttccttttccctcaatgcaaaagcccttgctggcaacgaaaaagcctcaaaagca

SEQ ID NO: 874 - DNA, 2825 bp, human
tggggaagctgctaacccgacccggattggcgctgaggtggcccgtggggcagggcagatgattctggaccagatgaagcctgaggagccttccagctctaagatagcaggataggagacttctaagattggagctgcagaagacttgccagcccaccagcacaatgtcaggaagccatacacctgcctgtggccctttctcagccctgactccgagcatatggccccaggagatcttggccaagtacacgcagaaggaagagtcagcagagcaaccagagttctactacgatgagtttggtttccgtgtgtacaaggaagaaggtgatgagcctggctccagtctgctggcgaactcccctctgatggaggatgctccacagaggctgcggtggcaggcccacctggagttcacccataaccacgatgtgggggatctcacctgggacaagattgccgtctccctaccccgctctgagaagctccgctccctggtgctggccggcatcccacatggcatgaggccacagctgtggatgcggctctctggggccctgcagaagaagaggaactctgagctgtcctaccgcgagattgtgaagaacagctccaacgatgagaccatcgctgccaagcagatcgagaaggacctgctccgcaccatgcccagcaacgcctgcttcgccagcatgggtagcatcggggtgccccgcctgcgcagggtgctccgggccctggcctggctctacccagagatcggctactgccagggcaccggcatggtggccgcctgcctcctgctgttcctggaggaggaggacgccttctggatgatgtctgccatcatcgaggacctgctccccgcctcctacttcagcaccaccctgctgggtgtccagactgaccagcgggtcctgcgccacctcattgtccagtacctgcctcgcctggacaagctgctccaggagcatgacattgagctgtccctgatcacactgcactggttcctcacggccttcgccagcgtggtggacatcaagctgctcctgcgcatctgggacctgtttttctacgagggctcccgggtgctgttccagctcacgctgggcatgctgcacctcaaggaggaagagctgatccagtcagagaactcggcctccatcttcaacacgctatcggatatcccgtcgcagatggaggacgcggagctgcttctgggggtggccatgcggctggccggctccctcaccgatgtggccgtggagactcagcgccgcaagcacctggcctatctcattgcagaccagggccagctcctgggggccggcaccctcaccaacctctctcaggttgttcgccgcaggacccagcggaggaagtccaccatcactgctctgctcttcggggaggatgacctggaggcactcaaggccaagaacatcaagcagacggaactggtggctgacctccgggaagccatcctgcgcgtggcacgccacttccagtgcacagaccccaaaaactgcagcgtggagctgactccagactatagcatggagagccaccagcgggaccacgagaactacgtggcgtgctcacgcagccaccggcgccgagccaaggccctgctggactttgagcggcacgacgacgacgagctgggcttccgcaagaacgacatcatcacaatcgtgtctcagaaggacgagcactgctgggtgggggagctcaacggcctgcgaggctggtttccagccaagttcgtggaagtcctggatgagcgcagcaaagagtactccatcgcgggggatgactcggtgacggagggggtcacagacctcgtgcgagggaccctctgcccggcccttaaggccctgttcgaacatggactgaagaagccatccctgcttgggggcgcctgccacccctggctgtttatcgaggaggctgcaggccgggaggtcgagagagactttgcctccgtgtattcccgtctggtgctctgtaagaccttcaggttggatgaagatggcaaagtcctgaccccggaggagctgctctaccgggctgtgcagtctgtgaacgtgacccacgatgcagtgcatgcacaaatggatgtgaagctccgctcactgatctgcgtggggctcaatgagcaggtgctgcacctgtggctggaggtgctctgctccagcctgcccaccgtggagaagtggtaccagccctggtccttcctgcgcagcccgggctgggtccagatcaagtgtgagctccgagtcctctgctgctttgccttcagcctctcccaggactgggagctccctgcgaagagagaggcgcagcagcccctgaaggagggcgtccgggacatgctggtgaagcaccacctcttcagctgggatgtggacgggtgaccccctcctccccagcccaacctcgggcctgcgtctgaggtggcccaggaccccaagctgcagagcccagggaagagcagctccagagccctggccggggccgcgggatatcaatatcaggctgccccactccacgttccccagcacatcccaggtggtgggagcagagggtaccctgccccaccagggtccttagggatgctctaggccaaaccacagtttgtaccaaaaaccttgtgaggaggtgggggagccatgtctgtgctcaggaagagggaaggggatgggggtggctagtaggctcctggcctctttggtttataaataaactgtgtctgtctttgaaaaaaaaaaaaaaaaaaaaaaaaaaaaaaaaaaaaaaaaaaaaaaaaaaaaaaaaaaaaaaaaaaa

SEQ ID NO: 875 - DNA, 3158 bp, human
aaaccggaacggggcccaacttctggggcctggagaagggaaacgaagtcccccccggtttcccgaggttgcctttcctcgggcatccttggtttcggcgggacttcgcagggcggatataaagaacggcgcctttgggaagaggcggagaccggctttaaagaaagaagtcttggtcctgcggcttgggcgaggcaagggcgaggcaagggcgctttctgccgacgctccccgtggccctacgatcccccgcgcgtccgccgctgttctaaggagagaagtgggggccccccaggctcgcgcgtggagcgaagcagcatgggcagtcggtgcgcgctggccctggcggtgctctcggccttgctgtgtcaggtctggagctctggggtgttcgaactgaagctgcaggagttcgtcaacaagaaggggctgctggggaaccgcaactgctgccgcgggggcgcggggccaccgccgtgcgcctgccggaccttcttccgcgtgtgcctcaagcactaccaggccagcgtgtcccccgagccgccctgcacctacggcagcgccgtcacccccgtgctgggcgtcgactccttcagtctgcccgacggcgggggcgccgactccgcgttcagcaaccccatccgcttccccttcggcttcacctggccgggcaccttctctctgattattgaagctctccacacagattctcctgatgacctcgcaacagaaaacccagaaagactcatcagccgcctggccacccagaggcacctgacggtgggcgaggagtggtcccaggacctgcacagcagcggccgcacggacctcaagtactcctaccgcttcgtgtgtgacgaacactactacggagagggctgctccgttttctgccgtccccgggacgatgccttcggccacttcacctgtggggagcgtggggagaaagtgtgcaaccctggctggaaagggccctactgcacagagccgatctgcctgcctggatgtgatgagcagcatggattttgtgacaaaccaggggaatgcaagtgcagagtgggctggcagggccggtactgtgacgagtgtatccgctatccaggctgtctccatggcacctgccagcagccctggcagtgcaactgccaggaaggctgggggggccttttctgcaaccaggacctgaactactgcacacaccataagccctgcaagaatggagccacctgcaccaacacgggccaggggagctacacttgctcttgccggcctgggtacacaggtgccacctgcgagctggggattgacgagtgtgaccccagcccttgtaagaacggagggagctgcacggatctcgagaacagctactcctgtacctgcccacccggcttctacggcaaaatctgtgaattgagtgccatgacctgtgcggacggcccttgctttaacgggggtcggtgctcagacagccccgatggagggtacagctgccgctgccccgtgggctactccggcttcaactgtgagaagaaaattgactactgcagctcttcaccctgttctaatggtgccaagtgtgtggacctcggtgatgcctacctgtgccgctgccaggccggcttctcggggaggcactgtgacgacaacgtggacgactgcgcctcctccccgtgcgccaacgggggcacctgccgggatggcgtgaacgacttctcctgcacctgcccgcctggctacacgggcaggaactgcagtgcccccgtcagcaggtgcgagcacgcaccctgccacaatggggccacctgccaccagaggggccacggctatgtgtgcgaatgtgcccgaagctacgggggtcccaactgccagttcctgctccccgagctgcccccgggcccagcggtggtggacctcactgagaagctagagggccagggcgggccattcccctgggtggccgtgtgcgccggggtcatccttgtcctcatgctgctgctgggctgtgccgctgtggtggtctgcgtccggctgaggctgcagaagcaccggcccccagccgacccctgccggggggagacggagaccatgaacaacctggccaactgccagcgtgagaaggacatctcagtcagcatcatcggggccacgcagatcaagaacaccaacaagaaggcggacttccacggggaccacagcgccgacaagaatggcttcaaggcccgctacccagcggtggactataacctcgtgcaggacctcaagggtgacgacaccgccgtcagggacgcgcacagcaagcgtgacaccaagtgccagccccagggctcctcaggggaggagaaggggaccccgaccacactcaggggtggagaagcatctgaaagaaaaaggccggactcgggctgttcaacttcaaaagacaccaagtaccagtcggtgtacgtcatatccgaggagaaggatgagtgcgtcatagcaactgaggtgtaaaatggaagtgagatggcaagactcccgtttctcttaaaataagtaaaattccaaggatatatgccccaacgaatgctgctgaagaggagggaggcctcgtggactgctgctgagaaaccgagttcagaccgagcaggttctcctcctgaggtcctcgacgcctgccgacagcctgtcgcggcccggccgcctgcggcactgccttccgtgacgtcgccgttgcactatggacagttgctcttaagagaatatatatttaaatgggtgaactgaattacgcctaagaagcatgcactgcctgagtgtatattttggattcttatgagccagtcttttcttgaattagaaacacaaacactgcctttattgtcctttttgatacgaagatgtgctttttctagatggaaaagatgtgtgttattttttggatttgtaaaaatatttttcatgatatctgtaaagcttgagtattttgtgatgttcgttttttataatttaaattttggtaaatatgtacaaaggcacttcgggtctatgtgactatatttttttgtatataaatgtatttatggaatattgtgccaatgttatttgagttttttactgttttgttaatgaagaaattcctttttaaaatatttttccaaaataaattttatgaggaattc

SEQ ID NO: 876 - DNA, 3042 bp, human
gcggctgtccgcggtgccggctgggggcggagaggcggcggtgggctccctggggtgtgtgagcccggtgatggagccgggcccgacagccgcgcagcggaggtgttcgttgccgccgtggctgccgctggggctgctgctgtggtcggggctggccctgggcgcgctccccttcggcagcagtccgcacagggtcttccacgacctcctgtcggagcagcagttgctggaggtggaggacttgtccctgtccctcctgcagggtggagggctggggcctctgtcgctgcccccggacctgccggatctggatcctgagtgccgggagctcctgctggacttcgccaacagcagcgcagagctgacagggtgtctggtgcgcagcgcccggcccgtgcgcctctgtcagacctgctaccccctcttccaacaggtcgtcagcaagatggacaacatcagccgagccgcggggaatacttcagagagtcagagttgtgccagaagtctcttaatggcagatagaatgcaaatagttgtgattctctcagaattttttaataccacatggcaggaggcaaattgtgcaaattgtttaacaaacaacagtgaagaattatcaaacagcacagtatatttccttaatctatttaatcacaccctgacctgctttgaacataaccttcaggggaatgcacatagtcttttacagacaaaaaattattcagaagtatgcaaaaactgccgtgaagcatacaaaactctgagtagtctgtacagtgaaatgcaaaaaatgaatgaacttgagaataaggctgaacctggaacacatttatgcattgatgtggaagatgcaatgaacatcactcgaaaactatggagtcgaactttcaactgttcagtcccttgcagtgacacagtgcctgtaattgctgtttctgtgttcattctctttctacctgttgtcttctaccttagtagctttcttcactcagagcaaaagaaacgcaaactcattctgcccaaacgtctcaagtccagtaccagttttgcaaatattcaggaaaattcaaactgagacctacaaaatggagaattgacatatcacgtgaatgaatggtggaagacacaacttggtttcagaaagaagataaactgtgatttgacaagtcaagctcttaagaaatacaaggacttcagatccatttttaaataagaattttcgatttttctttccttttccacttctttctaacagatttggatatttttaatttccaggcatagcaatgttatctattttaatgtgtatttgtcacaataacagaacatgcaagaacaatcattattttattttataggcatttgattactattctagacttctggtatcttcttactaacataaatatctcaagtagaaaagtttttgaaaactaacatttaaaaattaatcagttacagtaaagactttgaaaaagaaatgtacttgttaggaagtagcttaattaccccccattgcagtattattgttatatatatagttaatatgttgtacatcacaataatatataattcagtctctagtttccctagagtcatttttgaaaccactgattgcaaacctccctgacaatttttaaaagtagtaagccacattacatttatctttgtaaaaagatttatggtaactggtttcttacttgacttttataaatagtattttacatcttatttttgcctttatttcataagtaatttaaaaatcactggattgctttattatattcagggcaatatggattatttttataccaaggatttgcatcgtgaattacattaagttatttggcaatttataatttattactactttaaatcaaatgtagcattatcacactgtatttaaattgtcattttttaaaggaatattttcttcttaagatatatagaggattttggagaagagagacaggaggggtaaaaccagcttaaggttcagcgagcagaaagggacctgagaggatgctcactgtaagactgttggacagtggtgtgtattgaggggatgaatcggaacgatagtctcatgcagaaaatagtgagattaagatcatccttattgtttctaaattatttcaatcagatgaaagtgatacgattgaaatgaaatcacatagttcgtgctcagaaattctattttggtatgtttgtattagcctttagaaaaaacactccgtttcagaattgttcacagttttatttcttaggtttttagagttcaggatttcatttattaatttcttcttgcttttttggtggaaataggctttgttgtaaacattaagaatataaaatctcctctatatagaaacaagaattttgttaaaaagagaatttgaatcccttcctatactataaaatgctctatagggagacaaagtgtttcttttttcttttatgtttactgtttatgtggagtgaaatataaggctcttggatgtataacatactcaaaagctgttacactttctctgatctgctgtgatccactgaaaatgtgctggggtttgttctgctgtcactgtttatgctgctggaacttagcactgtcttgatttgaagcatatgattgagagccatttgaagcaatcttcattaatgcagataaaacaagtttacatgtgcagagttagaaaatgacatgttcaattctgtaagtggtgactttttgagcacctttcagtattatgtatttgtaaaaaccattgtttttggatataaagctaataagcactttaaaaaggaaaaggcagcctttactattttttctggttgagtcattgctctttagacctagcatcagcaatagatttcaaagataagtattaagcgctaccctaaagtgtgtaagtttttcattttgtcatattgaaaaatgatttgcatagtactgaatgttgacacacagcttatatgtatttacaagaatatctttaagtgtttttttgacacattaaaataaaggaaataaggaaattgtaa

SEQ ID NO: 877 - DNA, 2403 bp, human
ctgactaacgtgggcggagctctagctcgcgtatcctgaggaggcggggttggcctaggcgaagatccggactctgggtgttttgctaccgtgaccgtttagaacagaaactgttcatacttggtgcgctgtggactcttgtgataattaaccaagagtagctctatttgtccaacctcacacctaaagaagaaagaaaatggcttgtgctgagttttcttttcatgtaccaagtcttgaagagcttgctggagttatgcagaaggggttaaaagataactttgctgatgtccaggtctctgtagttgattgccctgatttgactaaggaaccctttacctttcctgtaaaaggcatctgtgggaaaactagaattgcagaagttggaggtgtgccttacttattgcctcttgtaaaccaaaaaaaagtttatgatctgaataaaattgcaaaagaaatcaagctgcctggagcctttattcttggagcaggagcaggtccatttcagactctcgggttcaattctgagtttatgccagttattcagacagaaagtgaacacaagcctcctgtaaatggaagttactttgcccatgtgaaccctgcagatggagggtgcctactggagaaatacagtgagaaatgtcatgattttcagtgtgcattactggctaatctttttgccagtgaaggccaacctggcaagcctgcagaattttcttcctgccccttgaactctgatgaagaagtgaataaatggttgcatttttatgaaatgaaagctcctttggtttgtctaccagtttttgtctccagagacccagggtttgatttgcgactggagcacactcatttttttagtcgtcatggagaaggtggacactaccattatgacactactccagatatagtggaatatcttggatacttcttacctgcagagtttctctatcgcattgatcaaccaaaagagacgcattcaattgggcgagattaaatcagctgatacttatttagaaaaagaaataattaaggttaattaattgattgacttattaattaatactgatataaaaccaatagaaatgatcccacaggccaggcacaatggctcatgcctataatcccagcactttgggaggctgaggcaggaagcacactggagcccaggagtttgagaccagcttgggcaacatagcaagaccctgtctatttttttaaaaaagtaaaaaatagaaattatctcactacttaaatcccatttttttcacttcatatgaaagaacatattgatagtatattctatattatttcatagatctgtctgaaagagattgggaacaaaaatatctaattgagatattctttaattttttacatagcagctttattttttttattctgtagtatcagcgaaatcagtcatgtttataccttgaatataaatatcaggaatcatgcaattatttctactatgtatttagtagtatcttatatttgtataacattattacattttgcaaattagtatcacaactgctaagtagatgtttctgagtattagaaaaatcagtgttattacctgcaggatattaaaaaacatttgaaaaagagaaaaagaaaaatcagtgtttagaaatgttgatagttattgaatctttgaattgaattttaaaaatccattctagtaatcagagtatactttttttatagaacaaggtggcaggtggggagccctttacccttctggtgaagttaaaccatagaagtttacaatttgcctttcacaaacattagcagtccgggcatggtggctgaagcctgtgatcccagcatgttgggaggccgagtgggaggattgcctgagcctaggagtttaaaccagcctgggcaccatggtgagaccccatctctattatttaaaatgtttcttaaataaaaaaaacacaaacattagcaactagttggctagccataattcctcccttgtttcgattgccagttagaagcaatttttatttcactggttatttgcaagagaaggggtaaaaaaacagcatcagagtgcaacactgaagtgagcttactttaatttgtaagtgaagctgttgctgaacgtgaccactatcgttgctgaaatataaaattatactcactgattgtaatggttgaaattttcctgaataatcattagccaaagatcaactctctaatggtgctaatggcaatctagctaatgtgcaaatttaggaagtcttcagtactaagtacataattttcaaataatattttttaattgtctactttggatgttagctatgtcttgtgagtataaattccaattttaagcactattttgatgcaaaaaaatgaataaaaaatttaatttaaaaaaaaaaaaaa

SEQ ID NO: 878 - DNA, 2485 bp, human
agtaacgtcatcagacgtgtgtgtccctgcggcgctaagaaggggagactgaggctgaggctggggaacatcgggcagcatgagcggctgcgggctcttcctgcgcaccacggctgcggctcgtgcctgccggggtctggtggtctctaccgcgaaccggcggctactgcgcaccagcccgcctgtacgagctttcgccaaagagcttttcctaggcaaaatcaagaagaaagaagttttcccatttccagaagttagccaagatgaacttaatgaaatcaatcagttcttgggacccgtggaaaaattcttcactgaagaggtggactcccgaaaaattgaccaggaagggaaaatcccagatgaaactttggagaaattgaagagcctagggctttttgggctgcaagtcccagaagaatatggtggcctgggcttctccaacaccatgtactcacgactaggggagatcatcagcatggatgggtccatcactgtgaccctggcagcgcaccaggctattggcctcaaggggatcatcttggctggcactgaggagcagaaagccaaatacttgcctaaactggcgtccggggagcacattgcagccttctgcctcacggagccagccagtgggagcgatgcagcctcaatccggagcagagccacactaagtgaagacaagaagcactacatcctcaatggctccaaggtctggattactaatggaggactggccaatatttttactgtgtttgcaaagactgaggtcgttgattctgatggatcagtgaaagacaaaatcacagcattcatagtagaaagagactttggtggagtcactaatgggaaacccgaagataaattaggcattcggggctccaacacttgtgaagtccattttgaaaacaccaagatacctgtggaaaacatccttggagaggtcggagatgggtttaaggtggccatgaacatcctcaacagcggccggttcagcatgggcagcgtcgtggctgggctgctcaagagattgattgaaatgactgctgagtacgcctgcacaaggaaacagtttaacaagaggctcagtgaatttggattgattcaggagaaatttgcactgatggctcagaaggcttacgtcatggagagtatgacctacctcacagcagggatgctggaccaacctggctttcccgactgctccatcgaggcagccatggtgaaggtgttcagctccgaggccgcctggcagtgtgtgagtgaggcgctgcagatcctcgggggcttgggctacacaagggactatccgtacgagcgcatactgcgtgacacccgcatcctcctcatcttcgagggaaccaatgagattctccggatgtacatcgccctgacgggtctgcagcatgccggccgcatcctgactaccaggatccatgagcttaaacaggccaaagtgagcacagtcatggataccgttggccggaggcttcgggactccctgggccgaactgtggacctggggctgacaggcaaccatggagttgtgcaccctagtcttgcggacagtgccaacaagtttgaggagaacacctactgcttcggccggaccgtggagacactgctgctccgctttggcaagaccatcatggaggagcagctggtactgaagcgggtggccaacatcctcatcaacctgtatggcatgacggccgtgctgtcgcgggccagccgctccatccgcattgggctccgcaaccacgaccacgaggttctcttggccaacaccttctgcgtggaagcttacttgcagaatctcttcagcctctctcagctggacaagtatgctccagaaaacctagatgagcagattaagaaagtgtcccagcagatccttgagaagcgagcctatatctgtgcccaccctctggacaggacatgctgaggcaggggacagtgtcccctgctaccgcccgcccctacccatggcccgttgctggatgactgttactcttttttcagaaggtgttgggattatcacaggttaagccttttgttccccgtctgcacctgaagggttgtcgcctggcctgggagagcctcttccaggttttgacctgcaggcagtgctctctaacaggaccatcacagcttctgaactgagccggagagagagaatggaattgctgacccctggaactggcgggtattctggtcattgaggagacaccatagtggaaactggggcttatgctgctgcctccagggtgtgaggtgggtggggacctgtgtcaggtgtggatagccatttctgctcaaccacacattctctaagaaacagcttgaaagctctgtctgggtcattcatttaaactagaagcagaggcacttaaaacatgtaccaggaaccatttaacaaagaatataaaatgtcacaatctgtgtactgttaaaaaaaaaaaaaaaaaaaaaaaaaaaaaaaaaa

SEQ ID NO: 879 - DNA, 2161 bp, human
gcggagactgcggggcgggccatggcggcgaacctgagccggaacgggccagcgctgcaagaggcctacgtgcgggtggtcaccgagaagtccccgaccgactgggctctctttacctatgaaggcaacagcaatgacatccgcgtggctggcacaggggagggtggcctggaggagatggtggaggagctcaacagcgggaaggtgatgtacgccttctgcagagtgaaggaccccaactctggactgcccaaatttgtcctcatcaactggacaggcgagggcgtgaacgatgtgcggaagggagcctgtgccagccacgtcagcaccatggccagcttcctgaagggggcccatgtgaccatcaacgcacgggccgaggaggatgtggagcctgagtgcatcatggagaaggtggccaaggcttcaggtgccaactacagctttcacaaggagagtggccgcttccaggacgtgggaccccaggccccagtgggctctgtgtaccagaagaccaatgccgtgtctgagattaaaagggttggtaaagacagcttctgggccaaagcagagaaggaggaggagaaccgtcggctggaggaaaagcggcgggccgaggaggcacagcggcagctggagcaggagcgccgggagcgtgagctgcgtgaggctgcacgccgggagcagcgctatcaggagcagggtggcgaggccagcccccagagcaggacgtgggagcagcagcaagaagtggtttcaaggaaccgaaatgagcaggagtctgccgtgcacccgagggagattttcaagcagaaggagagggccatgtccaccacctccatctccagtcctcagcctggcaagctgaggagccccttcctgcagaagcagctcacccaaccagagacccactttggcagagagccagctgctgccatctcaaggcccagggcagatctccctgctgaggagccggcgcccagcactcctccatgtctggtgcaggcagaagaggaggctgtgtatgaggaacctccagagcaggagaccttctacgagcagcccccactggtgcagcagcaaggtgctggctctgagcacattgaccaccacattcagggccaggggctcagtgggcaagggctctgtgcccgtgccctgtacgactaccaggcagccgacgacacagagatctcctttgaccccgagaacctcatcacgggcatcgaggtgatcgacgaaggctggtggcgtggctatgggccggatggccattttggcatgttccctgccaactacgtggagctcattgagtgaggctgagggcacatcttgcccttcccctctcagacatggcttccttattgctggaagaggaggcctgggagttgacattcagcactcttccaggaataggacccccagtgaggatgaggcctcagggctccctccggcttggcagactcagcctgtcaccccaaatgcagcaatggcctggtgattcccacacatccttcctgcatcccccgaccctcccagacagcttggctcttgcccctgacaggatactgagccaagccctgcctgtggccaagccctgagtggccactgccaagctgcggggaagggtcctgagcaggggcatctgggaggctctggctgccttctgcatttatttgccttttttctttttctcttgcttctaaggggtggtggccaccactgtttagaatgacccttgggaacagtgaacgtagagaattgtttttagcagagtttgtgaccaaagtcagagtggatcatggtggtttggcagcagggaatttgtcttgttggagcctgctctgtgctccccactccatttctctgtccctctgcctgggctatgggaagtggggatgcagatggccaagctcccaccctgggtattcaaaaacggcagacacaacatgttcctccacgcggctcactcgatgcctgcaggccccagtgtgtgcctcaactgattctgacttcaggaaaagtaacacagagtggccttggcctgttgtcttcccctattttctgtcccagctcatccgtgtctctgaagaacaaatatgcttttggaccacgaaaaaaaaaaaaaaaaaaaaaaaaaaaaaaaaaaaaaaaaaaaaaa

SEQ ID NO: 880 - DNA, 2801 bp, human
ttacagggcccctgagatcatccttggtttaccattttgtgaggcaattgacatgtggtccctgggctgtgttattgcagaattgttcctgggttggccgttatatccaggagcttcggagtatgatcagattcggtatatttcacaaacacagggtttgcctgctgaatatttattaagcgccgggacaaagacaactaggtttttcaaccgtgacacggactcaccatatcctttgtggagactgaagacaccagatgaccatgaagcagagacagggattaagtcaaaagaagcaagaaagtacattttcaactgtttagatgatatggcccaggtgaacatgacgacagatttggaagggagcgacatgttggtagaaaaggctgaccggcgggagttcattgacctgttgaagaagatgctgaccattgatgctgacaagagaatcactccaatcgaaaccctgaaccatccctttgtcaccatgacacacttactcgattttccccacagcacacacgtcaaatcatgtttccagaacatggagatctgcaagcgtcgggtgaatatgtatgacacggtgaaccagagcaaaacccctttcatcacgcacgtggcccccagcacgtccaccaacctgaccatgacctttaacaaccagctgaccactgtccacaaccaggctccctcctctaccagtgccactatttccttagccaatcccgaagtctccatactaaactacccatctacactctaccagccctcagcggcatccatggctgcagtggcccagcggagcatgcccctgcagacaggaacagcccagatttgtgcccggcctgacccgttccagcaagctctcatcgtgtgtccccccggcttccaaggcttgcaggcctctccctctaagcacgctggctactcggtgcgaatggaaaatgcagttcccatcgtcactcaagccccaggagctcagcctcttcagatccaaccaggtctgcttgcccagcaggcttggccaagtgggacccagcagatcctgcttcccccagcatggcagcaactgactggagtggccacccacacatcagtgcagcatgccaccgtgattcccgagaccatggcaggcacccagcagctggcggactggagaaatacgcatgctcacggaagccattataatcccatcatgcagcagcctgcactattgaccggtcatgtgacccttccagcagcacagcccttaaatgtgggtgtggcccacgtgatgcggcagcagccaaccagcaccacctcctcccggaagagtaagcagcaccagtcatctgtgagaaatgtctccacctgtgaggtgtcctcctctcaggccatcagctccccacagcgatccaagcgtgtcaaggagaacacacctccccgctgtgccatggtgcacagtagcccggcctgcagcacctcggtcacctgtgggtggggcgacgtggcctccagcaccacccgggaacggcagcggcagacaattgtcattcccgacactcccagccccacggtcagcgtcatcaccatcagcagtgacacggacgaggaggaggaacagaaacacgcccccaccagcactgtctccaagcaaagaaaaaacgtcatcagctgtgtcacagtccacgactccccctactccgactcctccagcaacaccagcccctactccgtgcagcagcgtgctgggcacaacaatgccaatgcctttgacaccaaggggagcctggagaatcactgcacggggaacccccgaaccatcatcgtgccacccctgaaaacccaggccagcgaagtattggtggagtgtgatagcctggtgccagtcaacaccagtcaccactcgtcctcctacaagtccaagtcctccagcaacgtgacctccaccagcggtcactcttcagggagctcatctggagccatcacctaccggcagcagcggccgggcccccacttccagcagcagcagccactcaatctcagccaggctcagcagcacatcaccacggaccgcactgggagccaccgaaggcagcaggcctacatcactcccaccatggcccaggctccgtactccttcccgcacaacagccccagccacggcactgtgcacccgcatctggctgcagccgctgccgctgcccacctccccacccagccccacctctacacctacactgcgccggcggccctgggctccaccggcaccgtggcccacctggtggcctcgcaaggctctgcgcgccacaccgtgcagcacactgcctacccagccagcatcgtccaccaggtccccgtgagcatgggcccccgggtcctgccctcgcccaccatccacccgagtcagtatccagcccaatttgcccaccagacctacatcagcgcctcgccagcctccaccgtctacactggatacccactgagccccgccaaggtcaaccagtacccttacatataaacactggaggggagggagggagggagggagggagagaatggcccgagggaggagggagagaaggagggaggcgctcctgggaccgtgggcgctggccttttatactgaagatgccgcacacaaacaatgcaaacggggcaggggcggggggggggggggcagagggcagggggacgggtcgggacaccagtgaaacttgaaccgggaagtgggaggacgtagagcagagaagagaacatttttaaaaggaagggattaaagagggtgggaaatctatggtttttattttaaaaaaaaaaaa

SEQ ID NO: 881 - DNA, 6334 bp, human
ttctgtgaacatttggaattctgtattcaaatctattttgaccattcccaagtgattttgaaggtctttggcatgtcataatttgttattttgtcaaggccagtgtttgggtgtgagagtggtgcacagggcaggagtgtgtaactttgttaggaagtgagcctagccacaccctcctgagtcactggttctttactatcctggggtaggcaatatcttttgttcagctgataaaagctttgtcattgtgaagattggctcccaatgataggaaactgctggtgatgaaaataaaggggtcttaaagattattctcagccagaaaaaataagtgttagacaaattaaatggaaaataattaatattttagtagtctttacaatttggaggtctaaggctctgtcagcatgggttctttaaggtcaaggatctaggatacacatgcacaggaaaaaagactggaagtatgctaagcagtgactatctctgaatgattgtgaaaaaatttaggatgaataagcagaaaaaaacaataaatgacaaaatataacaatggagttttcttgacaatgaaattctcttaaacttaaatctctttaattaggcaggtaaactattttatcatcttcgtttgacctggcccttcttttcaatgttaacagaagccatgcagtgacacccgctaagacttgttggtagccatgtcggagccccacagggtccagttcacctctctcccaggttccctgaatcctgcgtttttgaagaagtcccggaaggaggaggctggggcaggagaacagcatcaggactgtgagccggctgcagcagctgttcggattacactcaccctctttgaaccagatcacaaacgctgcccagagttcttctacccagagctggtgaagaatatccgagggaaggtaaaaggccttcagcctggagataagaagaaagatctgtcagatcctttcaatgacgaagaaaaggaaaggcataaagtagaggcccttgcccgaaaatttgaagaaaaatacggtggaaagaaacgtagaaaagaccgaatacaggacttgatcgatatggggtatggttatgatgaatccgactccttcatcgataactctgaggcgtatgatgagcttgttcctgcttctttgactacgaagtatggaggattttacattaactcgggaaccctgcagtttagacaagcatcagagtctgaagatgacttcattaaagaaaagaagaaaaaatctccaaagaagcggaagttgaaggaaggtggtgagaagataaagaagaagaaaaaagatgacacttatgacaaggagaagaaatcgaaaaagtccaagttttccaaagccggcttcacagccctcaatgccagtaaggagaagaagaagaagaaatattctggggctttaagcgttaaagagatgctaaagaaatttcagaaagagaaagaggctcagaaaaaaagggaggaggagcataagcctgttgcggtcccatcagcggaagttcagggcctgcgggaactggagggtgcctctgaccccttgctctcactctttggctctacttctgacaacgacttgctccaggcggccactgccatggactcgctgacggatttggacttggagcatctgctcagtgagtctccagaaggaagtcccttccgagatatggatgatggaagtgattcccttggggtgggattggaccaggaattcaggcagccctcttctctccccgaaggcctgccagcacccctggagaagcgcgttaaggagctggctcaggctgccagagctgctgagggggagagcagacagaagttcttcacccaggatattaatggaatcctattagacatagaggcgcagactcgggagctgagcagtcaggtccgctctggggtgtatgcctatcttgcgtcattcctgccctgcagcaaggatgccctgctcaagcgtgctcggaaacttcacctctatgaacaggggggccgtctgaaggagcctctccagaagctcaaggaagccattggcagggcgatgccagagcagatggccaagtaccaggacgaatgccaggcacacacgcaggcaaaggttgccaagatgctggaagaggagaaagacaaggagcagagggaccggatttgttcggatgaggaagaagatgaagaaaaagggggcaggaggataatgggacctcggaagaagttccaatggaatgatgagatcagggagctactgtgccaggtggtgaagatcaaactggagagccaggacctggagaggaacaacaaagcccaggcttgggaggactgtgtgaagggctttctggatgcggaagtcaagcccctctggcccaaaggctggatgcaggccagaactctgtttaaggagagcagacgaggccatgggcacctgacttcaatcctggccaagaagaaagttatggccccttctaaaatcaaggtgaaggagtcgtctacgaagcctgataaaaaggtttctgtcccatcaggacagattggtggccccattgctttgccctcagatcaccaaacaggaggcctgagtattggggcctcgagcagggagctcccatcccaggcatcgggcggccttgctaaccctcctcctgtcaacctggaggactcattggatgaagacttgatccgcaatccagcctcctcggtggaagccgtgtccaaggaattggctgcattgaatagcagagcagctgggaactctgaattcacactgcctgcaccctcaaaagcacctgcagaaaaagttggaggcgttttatgtacagaagaaaaaaggaacttggcgaagcctagtccttctgctccaccaccagctagctctctgcagtcacccctcaattttctggcagaacaggctctggcactggggcagtcctctcaggagaaaaaaccagagagttctggctacaaagagctgtcctgccaggctcccctcaataagggcctgccagaagtacatcagtccaaagctaagcaccacagcttgccacggacgtctcacgggccccaagtggcagttcctgtgcctggcccccaggtcaaagtctttcatgccggcactcagcagcagaaaaacttcacgcccccatctccatttgccaataagctccaaggcccaaaggcttctcccacacagtgtcatcgttccctcctgcagttagtgaagacagcggccaaaggccagggcttccatccctctgcaccagccacctcaggaggcctgtcagcctccagcagcagctctcacaagaccccagcctcgtcctcttctgccctgagccatccagcaaagccacattcagtcagctctgcaggctcatcttacaagaataatccctttgccagctcaatctccaaacatggggtttcttctggcagctcttcctcgggaggaacaccagtccagagttctgtttctgggagcctggtccctggcatacagcctccctccgtgggacagcccaccagccgacccgtcccaagttcagcagggaaaaaaatgcctgtttcccagaagttgactctggtagcccctccaggcggtccaaacggagattccagtggtgggacccagggagtggcaaagttgctgacctcgccgtccctaaagccctctgcagttagtagtgtgacatcgtctacctccttgtcaaaaggagcgagtgggactgtgctgctggccggctcctctttgatggcttcaccctacaaatccagcagcccaaagctgtctggggccatgagctcgaactccttgggaattataacccctgtccctattcctgtccatgtgctctccttcagcgctgactcctctgccaaagcaggggtctccaaggatgccatcgtcacaggccctgcccccgggtccttccaccatggccttggccacagtcttctggctggcttgcactccagcccgccccatgcagcgcctctcccacacgctgcggtgcccacccatatcccgcagagtctgccaggtgcttctcagcttcatgggaaagggcctgctgtaccacggaaattgtgaccgcttcagaggcaaggcttgccacttgggtctgggtggaatcagaacgtgcaggtctcccaggatgtacactcactgcgccctttctgctgcttggtgttcttctggaggagcgtgagttctcagcggagcgcttctcggcacttctgatgtgcctcccatggagggagccgggcccttgctgctcaggaggtgcagactgccccgtgctctggcttgcagctctgtcgctagacggttgttagaggggcagctctaggctggggcttgcgctgggccgtggtgggaggcacagtgtttacaggctctggtggcagagcagttggcacacctgtgggtgaatctgcctgatcccctggcatttggtcagagtacctcagagcaccccactgctcaggggctccttctggctgcagtaagctccctggatggtcacagtgccgccccatccccaggctgtgtgctcaaagcggacaaaactcaggccagagccacagctgggagacctgcactgtccctgcgaaatactaagaacacctagggtgtgctcactgtgggggccagtttctcctcggaacatgacaatgaagctcttttagagaaaagacctttgtagattcaacaattatgataggatttttacagacacctattttgggctcagttttcatcattaccattaaatgccattggatagaaggggactgttcttcacacatcatattataggaagacataattccagtgcctttatggtggagcagaattcgacaacacatgtccattctgccctctgaatggatctgagacgaagaccttttaaaagatatgtctgtattgaagagaaagccagttttgagttttctacacttgcacatcattatctgtgccgtcctgactagaatgtgtctgggcccccaaattccatgtccctttatatccatggctcccattttgttttttcccgagttcgtggaggtggactgcatagcccagagcccttcatctctctgagggtcaaggataccagggtcccaagtcacagatagacattccagtttgtattcttaggaatcattcttaggcagtgcggtataatcaggcctctgtgaagtgtctgccgggtagaaataggccttgaagtcctggggctctccaggcagtggggttatgtgtcgactgaagggtgatgtgcagaagatcttggagagtggatcagagagactaggacagttactgcagagctcctaagtcaccactcaaccagtggctgtttcacaaggatttgagggcacttgcctgtcttgtgaggtctgtgccacaaggtgagtctgaactgactgctccagctaagtgatcaggcacgttgagagtatatggtgtcctcagcacatacacctgtgggaaaacggaccgctcttggctcctgactcccagggtacagcgcccagtaactcatccttcattcagaggtttgctggccttcccggtttcccaaggagcaagacctctgtctgccctttggcccggcctctgctctgactcctttttttacataagaaccaatctgtgtttcacattgggctaagtggattccttatccctttgttatatatattttttgcaacttggatttccagtttgtttacagagtagtcttaggtagtagcaaaagagccaaagaagagatttgtattgctgagctcaaagccaagcagaggccggcagtggaggctgagcagggactctccaggcttctctgcccataaacacccgggtcccaggccctccttcctttccctttggtgctccctcctccccatgtaccattgcgcgtgcagctggagcagaataccctcatttttaggaatctagtgatgcctcttgcctcagggaaacgtttctttgatggggagtttgagatttcttttccttgtttatgctttatttgtggtaatgaaagagcgaatgactgaacagccatggcaaggcagacctacaggcgaggccgcagcagagggtggggcagagcagcctcggggtctgggggctgcaggggtttccctggcgcagcgaaagtctctgagcacttaccgggcgtgaccgtttcttaggtgtgagaggggctgtggcttttgtgcagcgactatgttggtgttaggggtggtgtggagattgttaatcttgtataaagcaattcaataaattgtttcaaggtttccaaaaca

SEQ ID NO: 882 - DNA, 2163 bp, human
gcggagcgcagctgtgagggagtcgctgtgatccggggccccggaacccgagctggagctgaagcgcaggctgcggggcgcggagtcgggaggcctgagtgttccttccagcatgtcggagggggagtcccagacagtacttagcagtggctcagacccaaaggtagaatcctcatcttcagctcctggcctgacatcagtgtcacctcctgtgacctccacaacctcagctgcttccccagaggaagaagaagaaagtgaagatgagtctgagattttggaagagtcgccctgtgggcgctggcagaagaggcgagaagaggtgaatcaacggaatgtaccaggtattgacagtgcatacctggccatggatacagaggaaggtgtagaggttgtgtggaatgaggtacagttctctgaacgcaagaactacaagctgcaggaggaaaaggttcgtgctgtgtttgataatctgattcaattggagcatcttaacattgttaagtttcacaaatattgggctgacattaaagagaacaaggccagggtcatttttatcacagaatacatgtcatctgggagtctgaagcaatttctgaagaagaccaaaaagaaccacaagacgatgaatgaaaaggcatggaagcgttggtgcacacaaatcctctctgccctaagctacctgcactcctgtgacccccccatcatccatgggaacctgacctgtgacaccatcttcatccagcacaacggactcatcaagattggctctgtggctcctgacactatcaacaatcatgtgaagacttgtcgagaagagcagaagaatctacacttctttgcaccagagtatggagaagtcactaatgtgacaacagcagtggacatctactcctttggcatgtgtgcactggagatggcagtgctggagattcagggcaatggagagtcctcatatgtgccacaggaagccatcagcagtgccatccagcttctagaagacccattacagagggagttcattcaaaagtgcctgcagtctgagcctgctcgcagaccaacagccagagaacttctgttccacccagcattgtttgaagtgccctcgctcaaactccttgcggcccactgcattgtgggacaccaacacatgatcccagagaacgctctagaggagatcaccaaaaacatggatactagtgccgtactggctgaaatccctgcaggaccaggaagagaaccagttcagactttgtactctcagtcaccagctctggaattagataaattccttgaagatgtcaggaatgggatctatcctctgacagcctttgggctgcctcggccccagcagccacagcaggaggaggtgacatcacctgtcgtgcccccctctgtcaagactccgacacctgaaccagctgaggtggagactcgcaaggtggtgctgatgcagtgcaacattgagtcggtggaggagggagtcaaacaccacctgacacttctgctgaagttggaggacaaactgaaccggcacctgagctgtgacctgatgccaaatgagaatatccccgagttggcggctgagctggtgcagctgggcttcattagtgaggctgaccagagccggttgacttctctgctagaagagaccttgaacaagttcaattttgccaggaacagtaccctcaactcagccgctgtcaccgtctcctcttagagctcactcgggccaggccctgatctgcgctgtggctgtccctggacgtgctgcagccctcctgtcccttccccccagtcagtattaccctgtgaagccccttccctcctttattattcaggagggctgggggggctccctggttctgagcatcatcctttcccctcccctctcttcctcccctctgcactttgtttacttgttttgcacagacgtgggcctgggccttctcagcagccgccttctagttgggggctagtcgctgatctgccggctcccgcccagcctgtgtggaaaggaggcccacgggcactaggggagccgaattctacaatcccgctggggcggccggggcgggagagaaaggtggtgctgcagtggtggccctggggggccattcgattcgcctcagttgctgctgtaataaaagtctactttttgct

SEQ ID NO: 883 - DNA, 2083 bp, human
ggccaggaacgccagccgttcacgcgttcggtcctccttggctgactcaccgccctggccgccgcaccatggacgcccccaggcaggtggtcaactttgggcctggtcccgccaagctgccgcactcagtgttgttagagatacaaaaggaattattagactacaaaggagttggcattagtgttcttgaaatgagtcacaggtcatcagattttgccaagattattaacaatacagagaatcttgtgcgggaattgctagctgttccagacaactataaggtgatttttctgcaaggaggtgggtgcggccagttcagtgctgtccccttaaacctcattggcttgaaagcaggaaggtgtgctgactatgtggtgacaggagcttggtcagctaaggccgcagaagaagccaagaagtttgggactataaatatcgttcaccctaaacttgggagttatacaaaaattccagatccaagcacctggaacctcaacccagatgcctcctacgtgtattattgcgcaaatgagacggtgcatggtgtggagtttgactttatacccgatgtcaagggagcagtactggtttgtgacatgtcctcaaacttcctgtccaagccagtggatgtttccaagtttggtgtgatttttgctggtgcccagaagaatgttggctctgctggggtcaccgtggtgattgtccgtgatgacctgctggggtttgccctccgagagtgcccctcggtcctggaatacaaggtgcaggctggaaacagctccttgtacaacacgcctccatgtttcagcatctacgtcatgggcttggttctggagtggattaaaaacaatggaggtgccgcggccatggagaagcttagctccatcaaatctcaaacaatttatgagattattgataattctcaaggattctacgtgtctgtgggaggcatccgggcctctctgtataatgctgtcacaattgaagacgttcagaagctggccgccttcatgaaaaaatttttggagatgcatcagctatgaacacatcctaaccaggatatactctgttcttgaacaacatacaaagtttaaagtaacttggggatggctacaaaaagttaacacagtatttttctcaaatgaacatgtttattgcagattcttcttttttgaaagaacaacagcaaaacatccacaactctgtaaagctggtgggacctaatgtcaccttaattctgacttgaactggaagcattttaagaaatcttgttgcttttctaacaaattcccgcgtattttgcctttgctgctactttttctagttagatttcaaacttgcctgtggacttaataatgcaagttgcgattaattatttctggagtcatgggaacacacagcacagagggtaggggggccctctaggtgctgaatctacacatctgtggggtctcctgggttcagcggctgttgattcaaggtcaacattgaccattggaggagtggtttaagagtgccaggcgaagggcaaactgtagatcgatctttatgctgttattacaggagaagtgacatactttatatatgtttatattagcaaggtctgtttttaataccatatactttatatttctatacatttatatttctaataatacagttatcactgatatatgtagacacttttagaatttattaaatccttgaccttgtgcattatagcattccattagcaagagttgtaccccctccccagtcttcgccttcctctttttaagctgttttatgaaaaagacctagaagttcttgattcatttttaccattctttccataggtagaagagaaagttgattggttggttgtttttcaattatgccattaaactaaacatttctgttaaattaccctatcctttgttctctactgttttctttgtaatgtatgactacgagagtgatactttgctgaaaagtctttcccctattgtttatctattgtcagtattttatgttgaatatgtaaagaacattaaagtcctaaaacatctaaaaaaaaaaaaaaaaaaaaaaaaaaaaaaaaaaa

SEQ ID NO: 884 - DNA, 2112 bp, human
cggctttcaaagccaatttgaataaacaactcttccctctcaaatgggcaagagtaactcttcagcaccatggagaggtccgggcagcgtgttacaacgtgggactgtgaccagggcaagcactctgacagtgattaccgagaggatgggatggatctaggcagtgacgccggcagcagcagcagcagcagccgcgccagttcacagtccaactccaccaaagtgaccccttgctccgagtgcaaatcttcatcgtcgccggggggcagcctggacttggtgtctgccctggaggactatgaggagcccttcccggtctaccagaagaaggtgattgatgagtgggcgccggaggaggacggggaggaggaggaagaggaggacgagcgcgaccagcgagggtaccgggatgaccgctctccggcccgggaaccgggggacgtaagcgccaggacccgcagcggcggcggcgggggcaggagcgccaccaccgccatgccgcccccggtgcccaacggcaacctccaccagcacgacccccaggacctcaggcacaatggcaacgtggtggtggctggccggccgagctgttcccggggcccccgccgggcgatccaaaagccccagccggctgggggccggcgcagtggccgcggcccggcggctggggggctctgccttcagcccccagacggcgggacgtgcgtccccgaagagcccccggtgccacctatggattgggaggcgctggagaagcatctggccgggctgcagttccgggagcaggaggtacggaaccagggccaggcgaggaccaactccacctccgcacagaaaaatgagagagagtctatcagacagaagttggcacttggaagcttctttgatgatggcccaggaatttataccagctgtagcaaaagtgggaagccaagcctttcctcccgactgcagagtgggatgaacttgcagatatgctttgtcaacgacagtggcagtgataaggacagtgatgctgatgacagtaagactgaaaccagcttggacacccccttgtctcccatgagcaaacagagttcttcctattctgatagagacactactgaagaggagtctgaatccttggatgacatggacttccttacaaggcaaaagaaattgcaagctgaagccaaaatggcccttgccatggccaaaccaatggccaaaatgcaagtagaagtggagaaacagaacaggaaaaagtctcccgtcgctgatcttctgccacacatgcctcatataagtgaatgcttgatgaaaagaagtttaaaacccaccgacctgagagacatgactattgggcagctacaagtgatagtcaatgatctccattcccagatagaaagcttgaatgaagagttggtccagctgcttctcatccgagatgagctgcacacagagcaggatgccatgctggtggacattgaagacttgaccagacatgctgaaagtcagcagaagcacatggcagagaaaatgcctgcaaagtgaaaagaagccattcaaccagagaacaagctagaatttattttgcttctgtggttgtaaaaatgctgttgctaaaggtggcgcagaaacaaatatcagtgttagtcattgataatgtctgaagcttaatgtccagtgattggcctttgcttcttaatttattttaattttttacttgtgccacttaatatcaggcattttaataaaatattgttacaaaaaatgtacagtactgacaccaccacaaatcatggttaataaaagagagtagttttaactttatttttatttgtttagagattttaagttggaacagtattttcccattgactacttttcattcttcactgtagttttaaagaagaactgtaaatgacggtgctatacaagtcaaaaaatacatgcctgcctcgtagtgaagttgtagctctccgtaatatgtatattttactcagttttcaacattttgtgaatgttgactacctgaagttcctttttagatgtgctattaacattctgttggattcagagggttccttgaaagttttatgtataaatatgtaaaataaaaattaaaacccg

SEQ ID NO: 885 - DNA, 1441 bp, human
gggcaggggcgtgggcggggcgtggaccagccgcgccgagcggggcctctccgggccgcgtctgtggggtcgagactgcgcggccgttgggcgtgcagcggcgccagtcggcggacgaggggcccccgggagttgctggactgagacatgagcctccaactgtgtggttgggctcggtagcacatcgtgggacttgggtgtgcgcccacagatggtttggccctgcagtgaccagagcagcccaagccgccaccatggtgaaattgctagtggccaaaatcctgtgcatggtgggcgtgttcttcttcatgctgctcggctccctgctccccgtgaagatcatcgagacagattttgagaaggcccatcgctcgaaaaagatcctctctctctgcaacacctttggaggaggggtgtttctggccacgtgcttcaacgctctgctgcccgctgtgagggaaaagctccagaaggtcctgagcctcggccacatcagcaccgactacccgctggccgaaaccatcctcctgctgggcttcttcatgaccgtcttcctggagcagctgatcctgaccttccgcaaggagaagccgtccttcatcgacctggagaccttcaacgccggatcggacgtgggcagcgactcggagtatgagagccccttcatggggggcgcgcggggccacgcgctgtacgtggagccccacggccacggccccagcctgagcgtgcagggcctctcgcgcgccagccccgtgcgcctgctcagcctggccttcgcgctgtcggcccactcggtctttgagggcctggccctgggcctgcaggaggagggggagaaagtggtgagcctgttcgtgggggtggccgtccacgagacactggtggccgtggccctgggcatcagcatggcccggagtgccatgcccctgcgggacgcggccaagctggcggtcaccgtaagcgccatgatccccctgggcatcggcctgggcctgggcattgagagcgcccagggcgtgccgggcagcgtggcgtccgtgctgctgcagggcctggcgggcggcaccttcctcttcatcaccttcctggagatcctggccaaggagctggaggagaagagtgaccgtctgctcaaggtcctcttcctggtgctgggctacaccgtcctggccgggatggtcttcctcaagtggtgagcggcctcgccattgtccctgccgccggagcccgccgggagccccgggccggacacaggccgcgtcccccggccgcgcgtcccccaagagcgagcactgtggccctgggccaccacctgtgcacaaggggcctcccgggaccaggctgtgcccccgatcctacaccctgagcctcagagcactgctactttttaaaatacttctttctcttaaaagtctttaccaaaaaaaaaaaaaaaaaa

SEQ ID NO: 886 - DNA, 2154 bp, human
ggcacgaggggcggttcaggcgccagagctggccgatcggcgttggccgccgacatgacgcccgaggacccagaggaaacccagccgcttctggggcctcctggcggcagcgcgccccgcggccgccgcgtcttcctcgccgccttcgccgctgccctgggcccactcagcttcggcttcgcgctcggctacagctccccggccatccctagcctgcagcgcgccgcgcccccggccccgcgcctggacgacgccgccgcctcctggttcggggctgtcgtgaccctgggtgccgcggcggggggagtgctgggcggctggctggtggaccgcgccgggcgcaagctgagcctcttgctgtgctccgtgcccttcgtggccggctttgccgtcatcaccgcggcccaggacgtgtggatgctgctggggggccgcctcctcaccggcctggcctgcggtgttgcctccctagtggccccggtctacatctccgaaatcgcctacccagcagtccgggggttgctcggctcctgtgtgcagctaatggtcgtcgtcggcatcctcctggcctacctggcaggctgggtgctggagtggcgctggctggctgtgctgggctgcgtgcccccctccctcatgctgcttctcatgtgcttcatgcccgagaccccgcgcttcctgctgactcagcacaggcgccaggaggccatggccgccctgcggttcctgtggggctccgagcagggctgggaagacccccccatcggggctgagcagagctttcacctggccctgctgcggcagcccggcatctacaagcccttcatcatcggcgtctccctgatggccttccagcagctgtcgggggtcaacgccgtcatgttctatgcagagaccatctttgaagaggccaagttcaaggacagcagcctggcctcggtcgtcgtgggtgtcatccaggtgctgttcacagctgtggcggctctcatcatggacagagcagggcggaggctgctcctggtcttgtcaggtgtggtcatggtgttcagcacgagtgccttcggcgcctacttcaagctgacccagggtggccctggcaactcctcgcacgtggccatctcggcgcctgtctctgcacagcctgttgatgccagcgtggggctggcctggctggccgtgggcagcatgtgcctcttcatcgccggctttgcggtgggctgggggcccatcccctggctcctcatgtcagagatcttccctctgcatgtcaagggcgtggcgacaggcatctgcgtcctcaccaactggctcatggcctttctcgtgaccaaggagttcagcagcctcatggaggtcctcaggccctatggagccttctggcttgcctccgctttctgcatcttcagtgtccttttcactttgttctgtgtccctgaaactaaaggaaagactctggaacaaatcacagcccattttgaggggcgatgacagccactcactaggggatggagcaagcctgtgactccaagctgggcccaagcccagagcccctgcctgccccaggggagccagaatccagccccttggagccttggtctgcagggtccctccttcctgtcatgctccctccagcccatgacccggggctaggaggctcactgcctcctgttccagctcctgctgctgctctgaggactcaggaacaccttcgagctttgcagacctgcggtcagccctccatgcgcaagactaaagcagcggaagaggaggtgggcctctaggatctttgtcttctggctggaggtgcttttggaggttgggtgctgggcattcagtcgctcctctcacgcggctgccttatcgggaaggaaatttgtttgccaaataaagactgacacagaaaatcaggtcagtgtctctgggctttgtgcaagctcagtttgaaaagggtttattcccatcactgcccaggacaccctgtggctttacttgctcatggtcagccaagcttacccttcacactgagaagtcatttctggctacttccttgggctcagttccctgggtcatcagccatcaaatcttgttgagtttaaaaaataaacagcaaaaaaaaacaaaccaaaaaaaaaaaaaaaaaaaaaaaaaaaaaaa

SEQ ID NO: 887 - DNA, 4878 bp, human
ggctggctccggggagatagcgcctgtcagtcggtgggtcggtcctcgcgccggccctccccctccccggtctccgggggaggcgcggtggagtccgcccccggggttctccgatgggggagaagcggcgacggcggcagtggagtaaccgagccggagcgtgagcggccccggtgccccgttccccacggaggccatgggcgacccagcccccgcccgcagcctggacgacatcgacctgtccgccctgcgggaccctgctgggatctttgagcttgtggaggtggtcggcaatggaacctacggacaggtgtacaagggtcggcatgtcaagacggggcagctggctgccatcaaggtcatggatgtcacggaggacgaggaggaagagatcaaacaggagatcaacatgctgaaaaagtactctcaccaccgcaacatcgccacctactacggagccttcatcaagaagagccccccgggaaacgatgaccagctctggctggtgatggagttctgtggtgctggttcagtgactgacctggtaaagaacacaaaaggcaacgccctgaaggaggactgtatcgcctatatctgcagggagatcctcaggggtctggcccatctccatgcccacaaggtgatccatcgagacatcaaggggcagaatgtgctgctgacagagaatgctgaggtcaagctagtggattttggggtgagtgctcagctggaccgcaccgtgggcagacggaacactttcattgggactccctactggatggctccagaggtcatcgcctgtgatgagaaccctgatgccacctatgattacaggagtgatatttggtctctaggaatcacagccatcgagatggcagagggagccccccctctgtgtgacatgcaccccatgcgagccctcttcctcattcctcggaaccctccgcccaggctcaagtccaagaagtggtctaagaagttcattgacttcattgacacatgtctcatcaagacttacctgagccgcccacccacggagcagctactgaagtttcccttcatccgggaccagcccacggagcggcaggtccgcatccagcttaaggaccacattgaccgatcccggaagaagcggggtgagaaagaggagacagaatatgagtacagcggcagcgaggaggaagatgacagccatggagaggaaggagagccaagctccatcatgaacgtgcctggagagtcgactctacgccgggagtttctccggctccagcaggaaaataagagcaactcagaggctttaaaacagcagcagcagctgcagcagcagcagcagcgagaccccgaggcacacatcaaacacctgctgcaccagcggcagcggcgcatagaggagcagaaggaggagcggcgccgcgtggaggagcaacagcggcgggagcgggagcagcggaagctgcaggagaaggagcagcagcggcggctggaggacatgcaggctctgcggcgggaggaggagcggcggcaggcggagcgcgagcaggaatacaagcggaagcagctggaggagcagcggcagtcagaacgtctccagaggcagctgcagcaggagcatgcctacctcaagtccctgcagcagcagcaacagcagcagcagcttcagaaacagcagcagcagcagctcctgcctggggacaggaagcccctgtaccattatggtcggggcatgaatcccgctgacaaaccagcctgggcccgagaggtagaagagagaacaaggatgaacaagcagcagaactctcccttggccaagagcaagccaggcagcacggggcctgagccccccatcccccaggcctccccagggcccccaggacccctttcccagactcctcctatgcagaggccggtggagccccaggagggaccgcacaagagcctggtggcacaccgggtcccactgaagccatatgcagcacctgtaccccgatcccagtccctgcaggaccagcccacccgaaacctggctgccttcccagcctcccatgaccccgaccctgccatccccgcacccactgccacgcccagtgcccgaggagctgtcatccgccagaattcagaccccacctctgaaggacctggccccagcccgaatcccccagcctgggtccgcccagataacgaggccccacccaaggtgcctcagaggacctcatctatcgccactgcccttaacaccagtggggccggagggtcccggccagcccaggcagtccgtgccagtaaccccgacctcaggaggagcgaccctggctgggaacgctcggacagcgtccttccagcctctcacgggcacctcccccaggctggctcactggagcggaaccgcgtgggagtctcctccaaaccggacagctcccctgtgctctcccctgggaataaagccaagcccgacgaccaccgctcacggccaggccggcccgcagactttgtgttgctgaaagagcggactctggacgaggcccctcggcctcccaagaaggccatggactactcgtcgtccagcgaggaggtggaaagcagtgaggacgacgaggaggaaggcgaaggcgggccagcagaggggagcagagatacccctgggggccgcagcgatggggatacagacagcgtcagcaccatggtggtccacgacgtcgaggagatcaccgggacccagcccccatacgggggcggcaccatggtggtccagcgcacccctgaagaggagcggaacctgctgcatgctgacagcaatgggtacacaaacctgcctgacgtggtccagcccagccactcacccaccgagaacagcaaaggccaaagcccaccctcgaaggatgggagtggtgactaccagtctcgtgggctggtaaaggcccctggcaagagctcgttcacgatgtttgtggatctagggatctaccagcctggaggcagtggggacagcatccccatcacagccctagtgggtggagagggcactcggctcgaccagctgcagtacgacgtgaggaagggttctgtggtcaacgtgaatcccaccaacacccgggcccacagtgagacccctgagatccggaagtacaagaagcgattcaactccgagatcctctgtgcagccctttggggggtcaacctgctggtgggcacggagaacgggctgatgttgctggaccgaagtgggcagggcaaggtgtatggactcattgggcggcgacgcttccagcagatggatgtgctggaggggctcaacctgctcatcaccatctcagggaaaaggaacaaactgcgggtgtattacctgtcctggctccggaacaagattctgcacaatgacccagaagtggagaagaagcagggctggaccaccgtgggggacatggagggctgcgggcactaccgtgttgtgaaatacgagcggattaagttcctggtcatcgccctcaagagctccgtggaggtgtatgcctgggcccccaaaccctaccacaaattcatggccttcaagtcctttgccgacctcccccaccgccctctgctggtcgacctgacagtagaggaggggcagcggctcaaggtcatctatggctccagtgctggcttccatgctgtggatgtcgactcggggaacagctatgacatctacatccctgtgcacatccagagccagatcacgccccatgccatcatcttcctccccaacaccgacggcatggagatgctgctgtgctacgaggacgagggtgtctacgtcaacacgtacgggcgcatcattaaggatgtggtgctgcagtggggggagatgcctacttctgtggcctacatctgctccaaccagataatgggctggggtgagaaagccattgagatccgctctgtggagacgggccacctcgacggggtcttcatgcacaaacgagctcagaggctcaagttcctgtgtgagcggaatgacaaggtgttttttgcctcagtccgctctgggggcagcagccaagtttacttcatgactctgaaccgtaactgcatcatgaactggtgacggggccctgggctggggctgtcccacactggacccagctctccccctgcagccaggcttcccgggccgcccctctttcccctccctgggcttttgcttttactggtttgatttcactggagcctgctgggaacgtgacctctgacccctgatgctttcgtgatcacgtgaccatcctcttccccaacatgtcctcttcccaaaactgtgcctgtccccagcttctggggagggacacagcttccccttcccaggaattgagtgggcctagcccctccccccttttctccatttgagaggagagtgcttggggcttgaaccccttaccccactgctgctgactgggcagggccctggacccctttatttgcacgtcaggggagccggctccccccttgaatgtaccagaccctggggggggtcactgggccctagatttttggggggtcaccagccactccaggggcagggaccatttcttcattttctgaaagcactttaatgattccccttcccccaaactccagggaatggaggggggaccccgccagccaaaacattccccccattcccgacccccatctcctcttctagcccatgcccttccccggtggagggagggagcagggagccctcactctccacgccccttgcttgcatctgtatatagtgtgagcagcaagtaacccttctcctccctcccccctcacccctcctcaatgtagtggccttggatatcctgtttgttaataaagacaattcaaccagctcccaccaaaaaaaaaaaaaaaaaa

SEQ ID NO: 888 - DNA, 3969 bp, human
actgccccgccccggcgcagactgcgtgaggcgccgccggaggcgcggggcttgccggggatcgtggtcggcgagcgcgcccgagcccactagcggagcccgcccgggactacatttcccacaattaccgccatgatgcccattggtgggggaagccatgggaaccggaggccgtcagggggagaggcgggcggcgctcacgcctggcctgagggggccgagactgaggcggttgcggaataggactgctagccccgcccagagtccctaccctttggagaactgcgcttctctttcggagggagtgttcgccgccgccgcggccgccacctggagtttcttcagactccagatttccctgtcaaccacgaggagtccagagaggaaacgcggagcggagacaacagtacctgacgcctctttcagcccgggatcgccccagcagggatgggcgacaagatctggctgcccttccccgtgctccttctggccgctctgcctccggtgctgctgcctggggcggccggcttcacaccttccctcgatagcgacttcacctttacccttcccgccggccagaaggagtgcttctaccagcccatgcccctgaaggcctcgctggagatcgagtaccaagttttagatggagcaggattagatattgatttccatcttgcctctccagaaggcaaaaccttagtttttgaacaaagaaaatcagatggagttcacactgtagagactgaagttggtgattacatgttctgctttgacaatacattcagcaccatttctgagaaggtgattttctttgaattaatcctggataatatgggagaacaggcacaagaacaagaagattggaagaaatatattactggcacagatatattggatatgaaactggaagacatcctggaatccatcaacagcatcaagtccagactaagcaaaagtgggcacatacaaattctgcttagagcatttgaagctcgtgatcgaaacatacaagaaagcaactttgatagagtcaatttctggtctatggttaatttagtggtcatggtggtggtgtcagccattcaagtttatatgctgaagagtctgtttgaagataagaggaaaagtagaacttaaaactccaaactagagtacataacattgaaaaatgaggcataaaaatgcaataaactgttacagtcaagaccattaatggtcttctccaaaatattttgagatataaaagtagggaacaggtataattttaatgtgaaaattaagtcttcactttctgtgcaagtaatcctgctgatccagttgtacttaagtgtgtaacaggaatattttgcagaatataggtttaactgaatgaagccatattaataactgcattttcctaactttgaaaaattttgcaaatgtcttaggtgatttaaataaatgagtattgggcctaattgcaacaccagtctgtttttaacaggttctattacccagaacttttttgtaaatgcggcagttacaaattaactgtggaagttttcagttttaagttataaatcacctgagaattacctaatgatggattgaataaatctttagactacaaaagcccaacttttctctatttacatatgcatctctcctataatgtaaatagaataatagctttgaaatacaattaggtttttgagatttttataaccaaatacatttcagtgtaacatattagcagaaagcattagtctttgtactttgcttacattcccaaaagctgacattttcacgattcttaaaaacacaaagttacacttactaaaattaggacatgttttctctttgaaatgaagaatatagtttaaaagcttcctcctccatagggacacattttctctaacccttaactaaagtgtaggattttaaaattaaatgtgaggtaaaataagtttatttttaatagtatctgtcaagttaatatctgtcaacagttaataatcatgttatgttaatttttacatgattgctgacttggataattcattattaccagcagttatgaaggaaatattgctaaaatgatctgggcctaccataaataaatatctccttttctgagctctaagaattatcagaaacaggaaagaatttagaaaaacttgagaaaacctaatccaaaataaaattcacttaagtagaactataaataaatatctagaatctgactggctcatcatgacatcctactcataacataaatcaaaggagatgattaatttccagttagctggaagaaactttggctgtaggtttttattttctacaagaattctggtttgaattatttttgtaagcaggtacattttataaaatgtaagccctactgtaaggtttagcactgggtgtacatatttattaaaaatttttattataacaacttttattaaaatggcctttctgaacactttatttattgatgttgaagtaaggattagaaacatagactcccaagttttaaacacctaaatgtgaataacccatatatacaacaaagtttctgccatctagctttttgaagtctatgggggtcttactcaagtactagtaatttaacttcatcatgaatgaactataatttttaagttatgcccatttataacgttgtttatgactacattgtgagttagaaacaaacttaaaatttggggtatagaacccctcaacaggttagtaatgctggaattcttgatgagcaataatgataaccagagagtgatttcatttacactcatagtagtataaaaagagatacatttccctcttaggcccctgggagaagagcagcttagatttccctactggcaaggtttttaaaaatgaggtaaatgccgtatatgatcaattaccttaattggccaagaaaatgcttcaggtgtctaggggtatcctctgcaacacttgcagaacaaaggtcaataagatccttgcctatgaatacccctcccttttgcgctgttaaatttgcaatgagaagcaaatttacagtaccataactaataaagcagggtacagatataaactactgcatcttttctataaaactgtgattaagaattctacctctcctgtatggctgttactgtactgtactctctgactccttacctaacaatgaatttgttacataatcttctacatgtatgatttgtgccactgatcttaaacctatgattcagtaacttcttaccatataaaaacgataattgctttatttggaaaagaatttaggaatactaaggacaattatttttatagacaaagtaaaaagacagatatttaagaggcataaccaaaaaagcaaaacttgtaaacagagtaaaaatctttaatatttctaaagacatactgtttatctgcttcatatgctttttttaatttcactattccatttctaaattaaagttatgctaaattgagtaagctgtttatcacttaacagctcattttgtctttttaaatatacaaattttaaaaatactacaatatttaactaaggcccaaccgatttccataatgtagcagttaccgtgttcacctcacactaaggcctagagtttgctctgatatgcatttggatgattaatgttatgctgttctttcatgtgaatgtcaagacatggagggtgtttgtaattttatggtaaaattaatccttcttacacataatggtgtcttaaaattgacaaaaaatgagcacttacagttgtatgtctactcaaatgaaaattctttatctgaaattttaaaagacattgattccgcatgtaaggatttttcatctgaagtacaataatgcacaatcagtgttgctcaaactgctttatacttataaacagccatcttaaataagcaacgtattgtgagtactgatatgtatataataaaaattatcaaagaaaaaaaaaaaaaaga

SEQ ID NO: 889 - DNA, 1298 bp, human
tcgcgcccgcttttctctcgggtgatccggccgagtggccctgggttagcagctgctgcatttccccggctggctgcggtcactggtggcagtgctcaggcgcccgcgcccttgaccttcggccccgcgagctctaaccctacagcgcaggaagatcggccgccgcggcaggctctgatgctggtgtctggtagaagaaggttactcacagttctgctgcaggctcagaagtggccctttcaaccctccagagacatgagactagtgcagttccgggcaccccacctggtgggtcctcacttgggcctggagacagggaatggtggaggggttatcaacctcaatgcctttgaccccacactcccgaagacgatgacgcagttcctagagcagggagaggccaccctctcagtggcaagaagagccctggctgcccagttgccagtcctaccacggtcggaggtaaccttcctggctccagtcacacgaccagataaggtggtgtgtgtgggcatgaattatgtggaccactgcaaagaacagaacgtgcccgtgcccaaggagcccatcatcttcagcaagtttgccagctccatcgtggggccctatgatgaggtggtcctcccaccacagagccaggaggtagattgggaagtggagctggccgtggtcattggaaagaaaggcaagcacatcaaggccacagatgctatggcccacgtgggcggcttcactgtggctcatgacgtgagtgctcgtgactggcaaatgagacgtaatgggaaacaatggctgctgggaaaaaccttcgacaccttctgccctctgggccctgccttggtgaccaaggacagtgtagcagatccacacaacttaaagatctgctgccgagtgaatggggaagtggtccagagcggcaacaccaaccagatggtattcaagacagaggacctgatagcctgggtctcccagtttgttaccttttacccaggggatgtcatcctaactgggacccccccaggtgtcggtgtattcaggaaacctcctgtctttctcaagaagggggatgaagtccagtgtgagattgaagaactaggtgtcatcatcaacaaggtggtgtgatggctcctgcacaggccctgcacataggatgagggcatctgctcccactcagcctagcccagggaaaggcccagtgacaggtgtggacaggtgccagccctgcaagccgcctcttctcggtagaagggagaaggacagagctctcttcaataaattcgtcaggtcaaagcagcaaa

SEQ ID NO: 890 - DNA, 4085 bp, human
taggggaggtgcctcatccggagcgggccgccaacggtccggccccgtccgcacagacgctcctgtcggcggcgcccgggagcggctcggctgcccgatgcttccgccccggctgccgcgggccgggctgtacgcttagtgcccggctcaggccccctgaagcgcccgcgggggtgagagcggcctccggccccgcggagacggagcggcttgaggacgaggcggcggccgcggggaggaggatgggggctaaccagttagtggtgctcaacgtgtacgacatgtattggatgaacgaatatacctcatccattggaattggagtttttcattcaggaattgaagtctatggcagagaatttgcttatggtggccatccttaccccttttctggaatatttgaaatttccccaggaaatgcttctgaactaggagaaacatttaaatttaaagaagctgttgttttagggagcacggacttcctagaagatgatatagaaaaaattgtagaagaactgggaaaagaatacaaaggcaatgcttatcatttaatgcataaaaactgcaatcatttttcttcagctttatcagagattctttgtgggaaagagattcctcgctggatcaatcgacttgcctacttcagctcctgtataccctttctacagagttgcctcccgaaggagtggctcacgcccgcagccctgcagtctagtgtcagccaagaactccaggatgaactggaggaagcagaggatgctgccgcatccgcttccgtggcaagcactgcagcaggctccagacccgggcgccacactaaactataaatgtctccaaagtcacacattcagaactgtctctggcagtcgaatatcactagagaaaagtaaacagagaagcatcctttagatattttgtatgcaaagatggctctcccccaaatcccagtttttcagctcaggattatatttgtaatcaaaaaaaaaaaatcacttggcgcaggagggagaactttgtaagaagctgccctctgttttttttatccactcgtaaatctggatttatttcttctgttttatacaagctctgttaagttatgtttacagtatcttgtatcgctgtttacaaatcttgcatggactcctgccacagtgaaagaagaaaatcttcatgtcttcaaaaattaggcaggtaatctttgtatacttctgacaattgccagatctatggcataaataggcacacaaaaaggtacttaaacagttatagtcaccatcacctgcttcagaatggtcttttagatttgtgtttgttttgttaaagttgttggcaccaggatgcagagaatcagactggcctgaggtgaaggagcacacagccctgagggcttggaaccctgggtccagttcctcttcacacccccttccactctgagtagcacatctccccaggtgcccatggaacacctgctttcatcccaaatatccgtccacctaggcggggtggtatgttcttacgtctctctgactttgatgccactcattctatagtttagctggttttcgttcaagatattcttggtagtaactgacaagtatgttgcacatgtattgggggaggcgcttcatttttattttaatacacatgtatttcctccttgcacaggattttgatggtgtgggaatatcctaagtggtagccttccaagtagcagtgagttgacattcagctgcttttaactattcaggctaccttttatactaaaccttgaaaactagaatctaatgtctaccccaaaaaagtagttctttgatattttatactttttatgtaccatgtcagaaagagtatgttggcgtttgtcatgggactcatttcacataatagaatgcctagtctcattgaccaatcgttaaaaaatcatatttgtgtgtcttaagattcatatttatatgttctctcaaatgtatgtctcttacgtaacatactctaagaatgaaactgtcaccacaggtaaatccttgttagcaaggaatctgtctgctccagtctactcctagtttgatccttggatgtaagaaccaagtcattacatgtcaaattcaatttttctgccttaagaatgaatgtccttcataaaatattggatgcagtgtaacactatccaaggcagtgacttcagctttatatacatataaaatatagttagttttaaaattattgacatttatttaaacttttagattggattgtttgctattgctctgtgtgaggatacataatctttcagtaaactgtatttttaacttttccataagctgattttggttcattttatcaacgtaagcacaccctgttcatagggaaaataaaccttgggttataagcattagcctgaggacaatgaagccacttaacctaatttatgctttcgactgttctgtttccagagaggaaagcctttacaaattactctcagttctttaggggcagaaggcttgtttcaagaggtttgacagaagaaaggaatatatgaacttaatgagatgtcgacttggttcaggtctaaaaatgagggcaaaacactaaggctctagcagtgacttgttcactaaaaagagagagtcctgtccccagacggttagtacaaagccttggatacagtttgcttgtaatatttttaataatgtgaggagtacagtgttttctaattcattcaagtatatatgatttaaacctgggctactgacacacacacagtagccattagttagactcttcttagtgaatatcaggaacatcccatctgtgcttaaccagaatccagcaagtcagcacacaagtgattttattgttattttgttgtatttacttgcatttgttgtatttactttcatctgcagcatttggagtttaaaaataatgtaaagggttctagtagaaatagtgtcctaaggccaattacctaccatactaacaatcagcagataaaattctggacgtgagattccttataatctaattatacctgaggttgagcaagaaatgtcttcctttagaaaatctcattcaagtcaggttcttctctacagttcaaaattgagaatggatttaattaactagcatttagccagctttttcttgcccttggagaaaaagaatcattctcaacctgataatctgttaagaaaaatcccatatgaacaatctggtcattaacatacatatgatacggagtctctttgttgtcaccaagtgaacatacttctcatggtgggttggacagtaatacatgttagagggtcagaagcttctggtttctgctgtttgctttaaatacccttggggtttttttttaaacccttacaaggggagcatcagctttggaaagtgtgactctgtaggagtgtagaaggcagtggtgtatgatcttagcctcgtcctgatgcctgaatccagccagctgttgctctgacccacagcaatagagcaagttacccatcaccagcatttgtacagagcagggaattctggttttagtccattggtagcattgtgtgtatgaggagattcaacaccacagacagctgcaggactcgatatccatggcttctttccatcacaaaacgggtagaaacacattcactgcttcagggttctaatctgtgtgtctccttatgactccatttctgtaagctactctgtaactttgatatatgctgtattttctttctttaaaagatttagatgttttttcagcaagctagccatacaaccattgtatctctttctcttcagtatggtttagagcccagatcagttagtaggctttcgttgtcttctctttcaatacatgtacatctttactgtttgaaaagtgttacagctgtcaaagaatcttcatggacctgaagataatttcttgtgaagttgaatgcaagtgtactgtcattcatagtgtttatatcaaaataccaggaatcttcacttttgctaccttgatatagcattgggctatcatgttacaacattgaaatacattgatttattaaaaaatacttttataagaaaaaaaaaaaaaaaaa

SEQ ID NO: 891 - DNA, 2762 bp, human
ggggctctgtggcggagacagccaggttggcagctgacgggacagccggggtctattttgttgcgggttttcagcaaatccagggctggtctggaggcgcgaaaacttaaggcatacagaacgatggagtatatggcagaatccaccgaccgcagccctggacacatcttgtgctgtgagtgtggtgttccgataagtccaaatcctgccaatatttgtgtggcctgtttgcgaagtaaagtggacatcagccaaggtattccgaaacaagtctcgatttcgttctgcaaacaatgtcaaaggtattttcaaccaccaggaacttggatacagtgtgctttagaatccagggaacttcttgctttgtgcttgaaaaaaatcaaagcccctctgagtaaggtacggcttgtagatgcaggctttgtttggactgagcctcattctaagagacttaaagttaaactgactattcagaaagaggtgatgaatggtgctatccttcaacaagtgtttgtggtggattatgttgttcagtcccaaatgtgtggagattgccatagagtagaagctaaggatttctggaaggctgtgattcaagtgaggcaaaagactttgcataaaaaaactttctactatctggaacagttaattctgaaatatggaatgcatcagaatacacttcgtatcaaagagattcatgatggtctggatttttattattcctcaaaacaacatgctcagaagatggtcgaatttcttcagtgtacagttccctgtagatacaaagcatcacaaagactgatctctcaagatatccatagtaacacatacaattacaaaagcactttttctgtggaaattgttccaatatgcaaggataatgttgtctgtctgtctccaaaactggcacaaagcctgggaaatatgaaccagatttgtgtgtgtattcgagtaaccagtgccattcacctcattgatccaaacaccctacaagtggcagatattgatgggagcactttctggagtcaccctttcaatagtttatgtcatcccaaacagctagaggagtttattgtgatggaatgcagcatagtccaagatataaaacgtgctgcaggtgctggaatgatatcaaaaaagcataccctcggggaagtctgggtacagaagacatctgaaatgaatacagataaacagtatttttgtcgtactcatttgggacatcttctaaatcccggagacctggtgttagggtttgatttggccaactgtaacttaaatgatgagcatgtcaacaaaatgaactcagatagagttccagatgtggtattaatcaagaagagctatgaccggaccaaacgtcagcgtcgtagaaactggaaattgaaagagcttgcaagagagagagaaaacatggatacagatgatgaaaggcaataccaagattttcttgaagatcttgaagaagatgaggcaattcgaaaaaatgtcaacatttacagagattcagccatccctgtggaaagtgacaccgatgatgaaggagcacctcgaattagtctggctgagatgcttgaagaccttcatatttcccaagatgccactggtgaagaaggtgcatcaatgctgacataatgagatgttgtagactgtttccatacatgggcttaagaagttggacagagttaccttaagtgtctctactatctttgcctccagatttcaagaggagaaatttagttttaaacctgaataaacatgtttgttttcagtgctcactcaaaccactaaaacagatggatagctttgaggttttagataaggaaagattatggagaatgtagttgttattgatttttggcaattttacatttggaattttatcactgtgcttttttatatgaggcactgtagtattttcacatagtatagtactctggatgtaaaagctcaaaaattgtgattccttgaacgttcactaaatcttcaagcaaaaacacatttttacattatttttacgttgattattttagtgaaagaccatatgaagaagcatttttaatattaacttgttacatactttgatccactttacatcatttttatgttgttgaggtagggaaattagggttcagtttatcactggacattcaggaggcaagtcaatcttttttatttccttataaaattaactcttcaaaagccgttaaacagagagttatcttaatttttattgcagtaggaggaaatatatttaaaatatttgtagatttatagcaaatagagactcgttatttaaaggttaaataacaatttgttcttttgttgtttttgccagtttagggcagtagctgcttttgtcataaatatcttcctaccacatcaaaaatgctgcttttaaaatttttgtttataaattgagaaggaattttctctctataagtttctgtcattgaacagatcaccattaaaaagaatattagaatccagcatgaagataatggctaataaaaatgaggtacatactttataaaaccattaatcagatttgaatgaggaatgcttcccacatccttgaaagaaaaactgtggcttacgttttgaagtattctgagaatgaagtattaagatccaatttctataagcaagatcagacttgttaagtatgccgcaagtaagagctaattcattcattccatgtgtgccactaaataaagagattgagcaagtgcaaaaaaaaaaaaaaaaaaaaaaaaaaaaaa

SEQ ID NO: 892 - DNA, 1292 bp, human
atccagcttgggctccagttttctgcccgcctccttttacgttattgcggagcgacggcgccggacagtcaacgtcatctaggagcaccgagcagcttggctaaaagtaagggtgtcgtgctgatggccctgtgcgcactgacccgcgctctgcgctctctgaacctggcgcccccgaccgtcgccgcccctgccccgagtctgttccccgccgcccagatgatgaacaatggcctcctccaacagccctctgccttgatgttgctcccctgccgcccagttcttacttctgtggcccttaatgccaactttgtgtcctggaagagtcgtaccaagtacaccattacaccagtgaagatgaggaagtctgggggccgagaccacacaggccgaatccgggtgcatggtattggcgggggccacaagcaacgttatcgaatgattgactttctgcgtttccggcctgaggagaccaagtcaggaccctttgaggagaaggttatccaagtccgctatgatccctgtaggtcagcagacatagctctggttgctgggggcagccggaaacgctggatcatcgccacagaaaacatgcaggctggagatacaatcttgaactctaaccacataggccgaatggcagttgctgctcgggaaggggatgcgcatcctcttggggctctgcctgtggggaccctcatcaacaacgtggaaagtgagccaggccggggtgcccaatatatccgagctgcagggacgtgtggtgtgctactgcggaaggtgaatggcacagccattatccagctgccctctaagaggcagatgcaggtgctggaaacgtgcgtagcaacagtaggccgagtatccaacgttgatcataacaaacgggtcattggcaaggcaggtcgcaaccgctggctgggcaagaggcctaacagtgggcggtggcaccgcaaggggggctgggctggccgaaagattcggccactaccccccatgaagagttacgtgaagctgccttctgcttctgcccaaagctgatatccctgtactctaataaaatgccccccccccccgttttaatctgttactgtggttttgttttgggtgttttttgttttttttgttgttgttttttttttgcgggggaggggatggtacagactaaacgtggggaaaagaagtaaaaagtgtggaagagaaagtacaggacactgggtctgtccccaccccaattcccttacaagtaatggagccggggatggaaataaatgacgtccaaggtcaaaaaa

SEQ ID NO: 893 - DNA, 1831 bp, human
ggggaggccagctgggaggggagggggccgtgggggcggctcggcggaaccagccccggctgggcagcagcggggacgccgggggccggggccagggctttccgggcttcggtgaggccgccgtgggccccatcttccggcggtcgccggagtttgtggtgattgttgctgccgccgccaccgccccggctgccatctcctcctcctgggccgccgcctcctcctcttcctcctcctcctgggccgggctgatcccctccccgctgccgcctcctcctgggctgggcccgcggtgtctcgtcccctcgcggagccgctcctgccgccgccgccgccgcctcctcattcatcctcgtgcaccataggcggcacaggcaccaagatgtccaaccgagtggtctgccgagaagccagtcacgccgggagctggtacacagcctcaggaccgcagctgaatgcacagctagaaggttggctttcacaagtacagtctacaaaaagacctgctagagccattattgccccccatgcaggatatacgtactgtgggtcttgtgctgcccatgcttataaacaagtggatccgtctattacccggagaattttcatccttgggccttctcatcatgtgcccctctctcgatgtgcactttccagtgtggatatatataggacacctctgtatgaccttcgtattgaccaaaagatttacggagaactgtggaagacaggaatgtttgaacgcatgtctctgcagacagatgaagatgaacacagtattgaaatgcatttgccttatacagctaaagccatggaaagccataaggatgagtttaccattattcctgtactggttggagctctgagtgagtcaaaagaacaggaattcggaaaactcttcagtaaatatctagcggatcctagtaatctctttgtggtttcttctgatttctgccattggggtcaaaggttccgttacagttactatgatgaatcccagggggagatttatagatccattgaacatctagataaaatgggtatgagtattatagaacaattagaccctgtatcttttagcaattacttgaagaaataccataatactatatgtggaagacatcccattggggtgttattaaatgctatcacagagctccagaagaatggaatgaatatgagtttttcgtttttgaattatgcccagtcgagccagtgtagaaactggcaagacagttcagtgagttatgcagctggagcactcacggtccactgaagctctgaatcctcagggatgccacctgcacattctcatactctgtccggggtcccagcctagcctttaccacgatactggtcctggtttggggggattctgaaacctcaaactaatagaactttcttctctttttttctagtaggtgtagtccttccttaatttcaactcattaaaaaatgctttatagtttagggcagtggaaggaaggctggcatcaaaatattttgatcaaaaaagatgacaatgtaaaggctcagttgtggcagacagttttttgaaagtaacttgtaaagcatttaccatatcctaaatttgcactctttgcagacttgtgcacatatattccgctttcagaatagttttgcaaattgtacacaaacaaacaaaaaggtggaagctttttaataaagaaattgcatttataaatgatctgtattagaatataataaatctccagttatagtcaattactacccatgttgtacaacagataccttctattttagttgctaataaagggctacacaactcaaaaaaaaaaaaaaaaaaaaa

SEQ ID NO: 894 - DNA, 1531 bp, human
cggcccaaccatggcgtcctccgcggccggctgcgtggtgatcgttggcagaattaaaactctgtacccattgaacaacagctgctcatttcccccagccccagcccctggcatccacccttctagctttctgtctctatgggtacctcagtggagtcattgggcgactgggccatgctgtttgccagtggaggcttccaggtgaaactctatgacattgagcaacagcagataaggaacgccctggaaaacatcagaaaggagatgaagttgctggagcaggcaggttctctgaaaggctccctgagtgtggaagagcagctgtcactcatcagtggttgtcccaatatccaagaagcagtagagggtgccatgcacattcaggaatgtgttccagaagatctagaactgaagaagaagatttttgctcagttagattccatcattgatgatcgagtgatcttaagcagttccacttcttgtctcatgccttccaagttgtttgctggcttggtccatgtgaagcaatgcatcgtggctcatcctgtgaatccgccatactacatcccgctggttgagctggtcccccacccggagacggcccctacgacagtggacagaacccacgccctgatgaagaagattgggacagtgccccatgcgagtccagaaggaggtggccggcttcgttctgaaccgcctgcaatatgcaatcatcagcgaggcctggcggctagtggaggaaggaattcgtgtctcctagtgacctgggaccttgtcatgtcagaagggttgggcatgcggtatgcattcattggacccctggaaaccatgcatctcaatgcagaaggtatgttaagctactgcgacagatacagcgaaggcataaaacatgtcctacagacttttggacccattccagagttttccagggccactgctgagaaggttaaccaggacatgtgcatgaaggtccctgatgacccggagcacttagctgccaggaggcagtggagggacgagtgcctcatgagactcgccaagttgaagagtcaagtgcagccccagtgaatttcttgtaatgcagcttccactcctctcattggaggccctatttgggaacactgcaagcccttaatcagccctctgtgacataggtagcagcccacggagatcctaagctggctgtcttgtgtgcagcctgagtggggtggtgcaggccggtagtctgcccgtcactttggatcatagccctggcctggcggcacagcagcacttgcgttctcggggctgtcgatttcctgccacctgggcagataacctggagatttccaccttttcttttcagcttgattgcatttgactatattttacagccagtgattgtagtttcatgttaatatgtggcaaaatatttttgtaattattttctaatccctttctgagtactctggggccctgcatttatgaggcacctaccttcatttttaacgcttattctgaataaaagtttttgattccttaaaaaaaa

SEQ ID NO: 895 - DNA, 2127 bp, human
atggcgacggagcagaggcctttccacctggtggtgttcggcgcgtctggcttcaccggccagttcgtgaccgaggaggtggcccgggagcaggtggacccggagcggacccagcctgccctgggcgtggcgggccgctcccgggagaagctgcagcgggtgctggagaaggcggccctgaagctgggaagaccaacactgtcatctgaagttggaatcatcatctgtgatattgctaatccagcctcgcttgatgaaatggctaaacaggcaacagttgtcctcaattgcgtaggaccatatcggttttatggagaacctgtaataaaagcatgtattgaaaatggagccagttgtatcgacatcagtggagaacctcagtttctggaactaatgcaactgaagtatcatgagaaagctgcagacaaaggggtttatatcattggaagcagcggctttgactccattccagcagatctgggagtaatatataccagaaataaaatgaatggtactttgactgctgtggaaagtttcctgactatacattcaggacctgaggggttgagcattcatgatggtacctggaagtcagcaatttatggttttggagatcagagtaatttgagaaaactaagaaatgtatcaaatctgaaacctgtcccgctcattggtccaaaattgaagagaaggtggccaatttcttattgtcgggaactcaaaggttattccattccttttatgggatctgatgtgtctgttgtaaggaggactcaacgttacttgtatgaaaatttagaggaatcaccagttcagtatgctgcgtatgtaactgtgggaggcatcacctctgttattaagctgatgtttgcaggacttttctttttgttctttgtgaggtttggaattggaaggcaacttctcataaaattcccatggttcttctcctttggctatttttcaaaacaaggcccaacacaaaaacagattgatgctgcctcattcacgctgacattctttggtcaaggatacagccaaggcactggtacagataagaacaaaccaaatatcaaaatttgtactcaggtgaaaggaccagaggctggctatgtggctacccccatagctatggttcaggcagccatgactcttctaagtgatgcttctcatctgcctaaggcgggcggggtcttcacacctggagcagctttttccaaaacaaagttgattgacagactcaacaaacacggtattgagtttagtgttattagcagctctgaagtctaaacactggaagaattaactgaagtcataacgtgcgtgaattaacagcttctctatttgatatttgaaattcttctgtaagcctgtctgagtgtatgtggaaacgattgtcaaatctaaaatatctatatattaaaaagtaggaaattgtcctagcttaccctaaatttcaaatctgagttgattttgtgattttattgcttataacagagaactcatatttgacatatttttttcattgatgtgttcctggtagattttcacgaatgagctggcaggtctaatgggggaggcggcgtcccagtctgtgttgcagcagcattctcatcgggggtgcgcacaccatcgttactgtcgggcagtaactgccgcttgccttgccgcagtaggagggaaatctcaccttccttccacatactgtcttgagcctttgctaaattaaactgcactttttgctgtttttgcctagtttttcgccaatctacactgattttggactgttacctaagttgaaaaataaaaggttgtcaatcgaatggtggttaatgttggacctgccgatgtatttgtatagtggtagaaacatgctgcttaagtggcctaacctgtttcttgccaataagtaggcttatcattttatttttacgtaattctatatctgtgactaggtttttaaggatacagcttataagttgctatcaattttcactacctaagcagaatttttctctaatttactttttgtattttaactaggttttacatggaagccctaaaataaggcaaaagactttttcttttgtaataagcatataataaacacgtatatacatagcaaattga

SEQ ID NO: 896 - DNA, 1506 bp, human
cagataggcgacacgcggcgggcgctgaggcgggaatggctgctgtactgcagcgcgtcgagcggctgtccaatcgagtcgtgcgtgtgttgggctgtaacccgggtcccatgaccctccaaggcaccaacacctacctagtggggaccggccccaggagaatcctcattgacactggagaaccagcaattccagaatacatcagctgtttaaagcaggctctaactgaatttaacacagcaatccaggaaattgtagtgactcactggcaccgagatcattctggaggcataggagatatttgtaaaagcatcaataatgacactacctattgcattaaaaaactcccacggaatcctcagagagaagaaattataggaaatggagagcaacaatatgtttatctgaaagatggagatgtgattaagactgagggagccactctaagagttctatatacccctggccacactgatgatcacatggctctactcttagaagaggaaaatgctatcttttctggagattgcatcctaggggaaggaacaacggtatttgaagacctctatgattatatgaactctttaaaagagttattgaaaatcaaagctgatattatatatccaggacatggcccagtaattcataatgctgaagctaaaattcaacaatacatttctcacagaaatattcgagagcagcaaattcttacattatttcgtgagaactttgagaaatcatttacagtaatggagcttgtaaaaattatttacaagaatactcctgagaatttacatgaaatggctaaacataatctcttacttcatttgaaaaaactagaaaaagaaggaaaaatatttagcaacacagatcctgacaagaaatggaaagctcatctttagtttcagattaaagaaagctttgttttattttgctttgagagaatggtatgttttcttaactataggttattttatagagaatataaaagtataaaacattaaaaataaccctagatatactttaaaataatgttatatttatgctaaaatatgtaaattacactatacaaccatatgataggttatttctctaaccttgtcttctaacgttttaccaaaaattcataatctaatagtttatcagttttcaatagattaaataaaatgattactttaaaaataataaaatttatctaatttaaagttgatattatttttggccgttagttatctattactagtgatcagttatactgttttctatagctactttatttaacagcacagatttctatgcacctttactctttcctcaacccttgtctctatctgtacataattgctttgtcttgatgtttctatcaactatatcatgactatctattggttccataactctgtatcatgtgtattttcttattctggtataccacaaatgattcatgcaaatgaatttttggtgattgaaaaatattaaattcccaatttaaagtattatatgata

SEQ ID NO: 897 - DNA, 1434 bp, human
gccatggcgacatcctcggccgcgctgccccgaatactcggcgcgggtgcccgggccccgtcgcgctggttgggctttctcgggaaggcgaccccccggcctgctcggccgagccgcaggacgcttggaagcgcgacggcccttatgatccgcgagtcggaggacagcaccgatttcaacgacaagattttgaatgagcccctcaagcactctgacttcttcaatgtcaaggaactgttttccgtgagaagcctcttcgatgcccgagtccatctgggacacaaagctggctgtcggcacaggtttatggagccgtacatctttgggagccgcctggaccacgacatcatcgacctggaacagacagccacgcacctccagctggccttgaacttcaccgcccacatggcctaccgcaagggcatcatcttgtttataagccgcaaccggcagttctcgtacctgattgagaacatggcccgtgactgtggcgagtacgcccacactcgctacttcaggggcggcatgctgaccaacgcgcgcctcctctttggccccacggtccgcctgccggacctcatcatcttcctgcacacgctcaacaacatctttgagccacacgtggccgtgagagacgcagccaagatgaacatccccacagtgggcatcgtggacaccaactgcaacccctgcctcatcacctaccctgtacccggcaatgacgactctccgctggctgtgcacctctactgcaggctcttccagacggccatcacccgggccaaggagaagcggcagcaggttgaggctctctatcgcctgcagggccagaaggagcccggggaccaggggccagcccaccctcctggggctgacatgagccattccctgtgatgttcactctcctcccaaagcaaaccacagccaagcctgtctgagctgggagtccccttccccagccctgggtcagtggcatcctcagtcgttgttacttactcagctgatgtcacagtgcagacatccaccgttccaccacagaaccagtggctgagcggaccaacgttgccatgtgcgtttgctctgtggggaacagagcacagagggtgagcgacatgtgcagaacggccccttggctgcagttaggacctcagtggctggtatggccaagctgctagaagatgctgctgtccctgtgatcccagcagccctcccttcaccgtgacccctgacctttgtcaggaaggtgcagtttttcttctcaatctaaatgcctttcaggtgggccgcttccttggctacctggttccagggggctgttttgtaatgagatgctgctggcaggccactcagaggctcccagctgggttggtgggacagccaggccagatgacctgattccagcaaaaataaaactcagatttgggcaaaatgaaa

SEQ ID NO: 898 - DNA, 1025 bp, human
ggcacgagtggcggcagaggcagtgcggatccggcgttctccactgatcttttccaaggctgtacagacatggcggcggcttttcggaaggcggctaagtcccggcagcgggaacacagagagcgaagcgagcctggctttcgaaaacatctgggcctgctggagaaaaagaaagattacaaacttcgtgcagatgactaccgtaaaaaacaagaatacctcaaagctcttcggaagaaggctcttgaaaaaaatccagatgaattctactacaaaatgactcgggttaaactccaggatggagtacatattattaaggagactaaggaagaagtaaccccagaacaactaaagctgatgagaactcaggacgtcaaatatatagaaatgaagagggttgcagaagctaagaaaatcgaaagactaaaatcagagctccatctgctggatttccaggggaagcaacagaacaagcatgtgttcttttttgacaccaaaaaggaagttgaacagtttgatgtcgcaactcacctgcaaacagccccggagctagtcgacagagtctttaataggcccaggatagagaccttgcagaaagaaaaagtgaaaggagttaccaatcagactggacttaagcgaatagctaaagaaaggcaaaagcagtataactgcctgacacagcggattgaacgagagaagaaattgttcgttattgctcagaaaattcaaacacgcaaagatcttatggataaaactcagaaagtgaaggtgaagaaagaaacggtgaactccccagctatttataaatttcagagtcgtcgaaaacgttgacgtgttatagataagccttgtcattctgtatcaaaaatctgttgtcgttttctagtaacttcaaattccattactccaaatggcatggttttccggtttgtaaccataactaaattgtcagtctgacatttaatgtctttctatggacaacattaaatctccctcccttctgtaattgtttttggattgtgaaa

SEQ ID NO: 899 - DNA, 1258 bp, human
ccggaaggggctgatgcgaactggggccacggcagccatcgcgctttgcagttcggtctcctggtgtacggccaacgccaagtaggggattgcgttccctccagtcgcagaccctatcagatttggatatgtccttcatatttgattggatttacagtggtttcagcagtgtgctacagtttttaggattatataagaaaactggtaaactggtatttcttggattggataatgcaggaaaaacaacattgctacacatgctaaaagatgacagacttggacaacatgtcccaacattacatcccacttccgaagaactgaccattgctggcatgacgtttacaacttttgatctgggtggacatgttcaagctcgaagagtgtggaaaaactaccttcctgctatcaatggcattgtatttctggtggattgtgcagaccacgaaaggctgttagagtcaaaagaagaacttgattcactaatgacagatgaaaccattgctaatgtgcctatactgattcttgggaataagatcgacagacctgaagccatcagtgaagagaggttgcgagagatgtttggtttatatggtcagacaacaggaaaggggagtatatctctgaaagaactgaatgcccgacccttagaagttttcatgtgtagtgtgctcaaaagacaaggttacggagaaggcttccgctggatggcacagtacattgattaacacaaactcacattggttccaggtctcaacgttcaggcttactcagagatttgattgctcaacatgcataacttgaattcaatagacttttgctggttataaaacagatgttttttagattattaatattaaatcaacttaatttgaatgagaattgaaaactgattcaagtaagtttgagtatcacaatgttagctttctaattccataaaagtacttggtttttacagtttataatctgacatcaccccagcgccatttgtaaagagcaactttccagcagtacatttgaagcactttttaacaacatgaaactataaaccatatttaaaagctcatcatgttaaattttttatgtacttttctggaactagtttttaaattttagattatatgtccacctatcttaagtgtacagttaataattagcttattcaatgattgcatgatgccttacagttttcaataactttttttcttatgcaaacgtcatgcaataaaacaaactctaatgtttggcaaaaaaaaaaaaa

SEQ ID NO: 900 - DNA, 2393 bp, human
ggccggcgcctcctcctggattcattcactcgctcttttcattcacgaaggtagtgaggcctagtggaaagccatggagagcgctctccccgccgccggcttcctgtactgggtcggcgcgggcaccgtggcctacctagccctgcgtatttcgtactcgctcttcacggccctccgggtctggggagtggggaatgaggcgggggtcggcccggggctcggagagtgggcagttgtcacaggtagtactgatggaattggaaaatcatatgcagaagagttagcaaagcatggaatgaaggttgtccttatcagcagatcaaaggataaacttgaccaggtttccagtgaaataaaagaaaaattcaaagtggagacaagaaccattgctgttgactttgcatcagaagatatttatgataaaattaaaacaggcttggctggtcttgaaatcggcatcttagtgaacaacgtgggaatgtcgtatgagtatcctgaatactttttggatgttcctgacttggacaatgtgatcaagaaaatgataaatattaatattctttctgtttgtaagatgacacaattggtactgcctggcatggtggaaagatccaaaggggctattctgaacatttcatctggcagtggcatgctccctgtcccactcttgaccatctattctgcaaccaagacttttgtagatttcttctctcagtgcctccatgaggagtataggagcaagggcgtctttgtgcagagtgtcctgccatacttcgtagctacaaaactggctaaaatccggaagccaactttggataagccctctccggagacgtttgtgaagtctgcaattaaaacagtcggcctgcaatcccgaaccaatggatacctgatccatgctcttatgggctcgataatctcaaacctgccttcttggatttatttgaaaatagtcatgaatatgaacaagtctacacgggctcactatctgaagaaaaccaagaagaactaagcatgataactgcattgtaacttggccagatgctccagcatatgcacgttcactgcaaagcaccctactggttttgaaaatctgaccttgtcatttcaatagttattaacatgactaaatattatcttaattaagaggaaaatagaagttgcttttaggggtttctgacatatattctggatactatccgaggtaattttgaagtttaatataaatgctcatatcaaatgaatatagaactaatattgtcgggaacacctaatagaaaggaatactattatagcaaatcacagaatgatagactcaagcataaaacttggcagttttatctgcttcaaaatgccattgatcattattcctgtattttctctgaaactgattataaaaaccaatgtccagctactcttttgtttttgacacttgaagaaatggagatcgatttgatttgtttataagcagacacactgcaatttacaaagatctctttacggttttataaaattatcttccagtttgtacatttatatggaattgttctttatcaagggtagctaatgacatgaaaataattgtgaaatatggaattatttctgacacatgaagcccactaaactatgctttcctataatgcatatttcttctcagtttaaatgtatgtaaatatcgaagctatatggtatgatttataaagataaatgggccaaagtgtacattgagactggcagccatctatggtaccactgaaaccctgacccagaaaagtggcttgcttggacacccagctgcctttgtttctgcattaaaccaatattgatcacacatatgacacaggctagtcctataaaagtaatgacttcatagaaatggcattataatttttaagttgatactctacaggtagctattgatataattagttttaataaaacatgctgcaaccatggtatacaacaaaaatacatttctttggtgattgaaattaaggccgtatttacaatgacttaatataagactgacttttatcctgcttcataacttgtatggagaactcaccaagaaagaattcaatactgtgaaatatgcagcaagaagattggtctttacctaggctgtgtttcctaagctctgagttttcagcaccagtagatttgtattaaaagaaaaaaaaatggggccttagcttctggcttttaattttgccagctaaggacataaaacaaaaataaacaaacaaaaacaaatagccatctgctatcagcatcattatgtaaaagaaaatatattttagcccctaaaattaggaagaatgtaatctcagaataaaggttgtcatttaagttgaataaatatatagctttatgaaaaacacaaaaaaaaaaaa

SEQ ID NO: 901 - DNA, 1686 bp, human
acagaccctaggaccacgcaggaggtggtgggctcgcaggaaggttcctctcccagtggccatgggtagcaacagtgggcaggctggccgccacatctataaatccctagctgatgatggcccctttgactctgtggagccgcctaaaagacccaccagcagactcatcatgcacagcatggccatgttcggaagagagttctgctacgcggtggaggcagcgtatgtgaccccagtcctgctcagcgtaggtctgcccagcagcctgtacagcattgtgtggttcctcagccccatcctgggattcctgctgcagcccgtggtcggatcggccagcgaccactgccggtccaggtggggccgccggagaccctacatcctcaccctgggagtcatgatgctcgtgggcatggctctgtacctcaatggggctactgttgtagcagctttgattgctaacccaaggaggaagctggtttgggccataagtgtcaccatgataggtgtcgttctctttgattttgctgccgacttcattgatgggcccatcaaagcctacttatttgatgtctgctcccatcaggacaaggagaagggcctccactaccatgccctcttcacaggttttggaggtgccctgggttaccttttgggtgctatagactgggcccatctggagctgggaagactgttgggtacagaattccaggtcatgttcttcttctctgcattggtgctcactttgtgttttactgttcatctgtgcagtatctctgaagccccacttacagaggttgcaaagggcattcccccacagcaaacccctcaggaccctccattgtcatcagatggaatgtacgagtatggttctatcaagaaagttaaaaatggttacgtaaatccagagctggcaatgcagggagcaaaaaacaaaaatcatgctgaacagactcgcagggcaatgacattaaagtcactgctgagagcactggtgaacatgcctcctcactaccgctacctttgcatcagccacctcattggatggacggccttcctgtccaacatgctgttcttcacagatttcatgggccagattgtgtaccgcggggatccctatagtgcacacaactccacagagtttctcatctacgaaagaggagtcgaggttggatgttggggcttgtgcatcaactccgtgttttcctcactttattcttactttcagaaagttttggtatcctacattggattaaagggtctttacttcacgggatatttgctgtttggcctggggacgggatttattgggctcttcccgaatgtctactccaccctggtcctgtgcagcctgtttggtgtaatgtccagcaccctgtacactgtgccctttaacctcattactgagtaccaccgcgaggaagaaaaggagaggcagcaggccccaggaggggacccagacaacagcgtgagagggaagggcatggactgcgccaccctcacatgcatggtgcagctggctcagatcctggtcggaggtggcctgggctttctggtcaacacagccgggaccgttgtcgtcgtggtgatcacagcgtctgcggtggcactgataggctgttgctttgtcgctctctttgttagatatgtggattaggtcaataaagagacaatgaccctaaaaaaaaa

SEQ ID NO: 902 - DNA, 1185 bp, human
accgtcttccgccgcacgtggattcagcgcgatgcccaaatccaagcgcgacaagaaagtctccttaaccaaaactgccaagaaaggcttggaattgaaacaaaacctgatagaagagcttcggaaatgtgtggacacctacaagtaccttttcatcttctctgtggccaacatgaggaacagcaagctgaaggacatccggaacgcctggaagcacagccggatgttctttggcaaaaacaaggtgatgatggtggccttgggtcggagcccatctgatgaatacaaagacaacctgcaccaggtcagcaaaaggttgaggggtgaggtgggtctcctgttcaccaaccgcacaaaggaagaggtgaatgagtggttcacgaaatacacagaaatggactacgcccgagctggtaacaaagcagctttcactgtgagcctggatccagggcccctggagcagttcccccactccatggagccacagctcaggcagctgggcctgcccaccgccctcaagagaggtgtggtgactctgctgtctgactacgaggtgtgcaaggagggcgatgtgctgaccccagagcaggctcgcgtcctgaagctttttgggtatgagatggctgaattcaaggtgaccatcaaatacatgtgggattcacagtcgggaaggttccagcagatgggagacgacttgccagagagcgcatctgagtccacagaagagtcagactcagaagatgatgactgaaagggactcgggactgaaggtctcctggaagcttctgggtctcactggaccatcaggactgctgccgcccctctggagagagcagctttttatttgtctgtagacagggaacatgatgggcactgacctcctgtaaagaataaaactgtgggccgggcgcggtggctcacgcctggaatcccagcactttgggaagccgaggtgggcagatcataaggtcaggagattaagaccatcctggctaacacggtgaaaccccgtctctactaaaaatagaaaaaaaaactagttgggcatagtggcatgtgcctgtagtcccagctactcaggaggctgaggcaggagaatcacttgaacccgggaggtggaggttgccgtgagttgagattggaccactgctctccagcctgggcaacagagtaaaactctgtccc

SEQ ID NO: 903 - DNA, 1065 bp, human
cgctgaccgagcgcaccccgcccccggcgccatcttcccgaccgcgagccgtccaggtctcagtgctgtgccccccccagagcctagaggatgtttcatgggatcccagccacgccgggcataggagcccctgggaacaagccggagctgtatgaggaagtgaagttgtacaagaacgcccgggagagggagaagtacgacaacatggcagagctgtttgcggtggtgaagacaatgcaagccctggagaaggcctacatcaaggactgtgtctcccccagcgagtacactgcagcctgctcccggctcctggtccaatacaaagctgccttcaggcaggtccagggctcagaaatcagctctattgacgaattctgccgcaagttccgcctggactgcccgctggccatggagcggatcaaggaggaccggcccatcaccatcaaggacgacaagggcaacctcaaccgctgcatcgcagacgtggtctcgctcttcatcacggtcatggacaagctgcgcctggagatccgcgccatggatgagatccagcccgacctgcgagagctgatggagaccatgcaccgcatgagccacctcccacccgactttgagggccgccagacggtcagccagtggctgcagaccctgagcggcatgtcggcgtcagatgagctggacgactcacaggtgcgtcagatgctgttcgacctggagtcagcctacaacgccttcaaccgcttcctgcatgcctgagcccggggcactagcccttgcacagaagggcagagtctgaggcgatggctcctggtcccctgtccgccacacaggccgtggtcatccacacaactcactgtctgcagctgcctgtctggtgtctgtctttggtgtcagaactttgggggccgggcccctccccacaataaagatgctctccgaccttcaaaaaaaaaaaaaaaaaaaaaaaaaaaaaaaaaaaaaaaaaaaaaaaaaaaaaaaaaaaaaaaaaaaaaaaaaaaaaaaaaaaaaaaaaaaaaaaaaaaaaaaaaaaaaaaaaaaaaaaaa

SEQ ID NO: 904 - DNA, 2108 bp, human
agcccctgggctagcctctgggccggcgcctaggccggccaacgcggacgccgggttgcggtgattcccagcggcgagtcctcaaccactgaagaagaagcttgatgcttggctgtcagaagacatgaattacgcacggttcatcacggcagcgagcgcagccagaaacccttctcccatccggaccatgactgacatattgagcagaggaccaaaatcgatgatctccttggctggtggcttaccaaatccaaacatgtttccttttaagactgccgtaatcactgtagaaaatggaaagaccatccaatttggagaagagatgatgaagagagcacttcagtattctccgagtgctggaattccagagcttttgtcctggctaaaacagttacaaataaaattgcataatcctcctaccatccattacccacccagtcaaggacaaatggatctatgtgtcacatctggcagccaacaaggtctttgtaaggtgtttgaaatgatcattaatcctggagataatgtcctcctagatgaacctgcttattcaggaactcttcaaagtctgcacccactgggctgcaacattattaatgttgccagtgatgaaagtgggattgttccagattccctaagagacatactttccagatggaaaccagaagatgcaaagaatccccagaaaaacacccccaaatttctttatactgttccaaatggcaacaaccctactggaaactcattaaccagtgaacgcaaaaaggaaatctatgagcttgcaagaaaatatgatttcctcataatagaagatgatccttactattttctccagtttaacaagttcagggtaccaacatttctttccatggatgttgatggacgtgtcatcagagctgactctttttcaaaaatcatttcctctgggttgagaataggatttttaactggtccaaaacccttaatagagagagttattttacacatacaagtttcaacattgcaccccagcacttttaaccagctcatgatatcacagcttctacacgaatggggagaagaaggtttcatggctcatgtagacagggttattgatttctatagtaaccagaaggatgcaatactggcagctgcagacaagtggttaactggtttggcagaatggcatgttcctgctgctggaatgtttttatggattaaagttaaaggcattaatgatgtaaaagaactgattgaagaaaaggccgttaagatgggggtattaatgctccctggaaatgctttctacgtcgatagctcagctcctagcccttacttgagagcatccttctcttcagcttctccagaacagatggatgtggccttccaggtattagcacaacttataaaagaatctttatgaagaaattaaactaggttgggcatggtggctcacacctataatcccagcactttgggaggcagaggagggaggatcacttgaacccaggaattcaaggctgcagtaagctacgatcacaccactgcactctggcctgcatgcactctggcctgcatggcagaacaagaccctgtctctaaaaaaagagaaagaaatcaaactaatcatgctgctcatggatttttccaataaatttcttgttttggcaggaagaaatgaacactggtattagacttaaagattaaatttcctcaaacatgtcctatctgtagtagttcaactagacaccttttaaagtgcctctaaattcatcagatggccaaactgtatttataatccacttaggcattttgaaaaactttcaacctgtaaaaagttacttttatcttggatttattatgaagaactttgtagttgctttgtaatttcccataaattgtctttgaaactaacattttacactgaattattttgagattttaaagaagtaattaagtgcaaaatggtatataatgtgtactttttctacttttaggaaaatttaatgagagcttattgcaaaaattgttataatttggtcattataagtgacttttagtaaaagtaccataaaccttatgttatgccacagaaattcctttaaaataaaattcttaaactaaacata

SEQ ID NO: 905 - DNA, 829 bp, human
ggagactgcgccgacatggagctgttcctcgcgggccgccgggtgctggtcaccggggcaggcaaaggtatagggcgcggcacggtccaggcgctgcacgcgacgggcgcgcgggtggtggctgtgagccggactcaggcggatcttgacagccttgtccgcgagtgcccggggatagaacccgtgtgcgtggacctgggtgactgggaggccaccgagcgggcgctgggcagcgtgggccccgtggacctgctggtgaacaacgccgctgtcgccctgctgcagcccttcctggaggtcaccaaggaggcctttgacagatcctttgaggtgaacctgcgtgcggtcatccaggtgtcgcagattgtggccaggggcttaatagcccggggagtcccaggggccatcgtgaatgtctccagccagtgctcccagcgggcagtaactaaccatagcgtctactgctccaccaagggtgccctggacatgctgaccaaggtgatggccctagagctcgggccccacaagatccgagtgaatgcagtaaaccccacagtggtgatgacgtccatgggccaggccacctggagtgacccccacaaggccaagactatgctgaaccgaatcccacttggcaagtttgctgaggtagagcacgtggtgaacgccatcctctttctgctgagtgaccgaagtggcatgaccacgggttccactttgccggtggaagggggcttctgggcctgctgagctccctccacacacctcaagccccatgccgtgctcatcctacccccaatccctccaataaacctgattctgctgccca

SEQ ID NO: 906 - DNA, 2795 bp, human
cggggacatgaggtggatactgttcattggggcccttattgggtccagcatctgtggccgagaaaaattttttggggaccaagttttgaggattaatgtcagaaatggagacgagatcagcaaattgagtcaactagtgaattcaaacaacttgaagctcaatttctggaaatctccctcctccttcaatcggcctgtggatgtcctggtcccatctgtcagtctgcaggcatttaaatccttcctgagatcccagggcttagagtacgcagtgacaattgaggacctgcaggcccttttagacaatgaagatgatgaaatgcaacacaatgaagggcaagaacggagcagtaataacttcaactacggggcttaccattccctggaagctatttaccacgagatggacaacattgccgcagactttcctgacctggcgaggagggtgaagattggacattcgtttgaaaaccggccgatgtatgtactgaagttcagcactgggaaaggcgtgaggcggccggccgtttggctgaatgcaggcatccattcccgagagtggatctcccaggccactgcaatctggacggcaaggaagattgtatctgattaccagagggatccagctatcacctccatcttggagaaaatggatattttcttgttgcctgtggccaatcctgatggatatgtgtatactcaaactcaaaaccgattatggaggaagacgcggtcccgaaatcctggaagctcctgcattggtgctgacccaaatagaaactggaacgctagttttgcaggaaagggagccagcgacaacccttgctccgaagtgtaccatggaccccacgccaattcggaagtggaggtgaaatcagtggtagatttcatccaaaaacatgggaatttcaagggcttcatcgacctgcacagctactcgcagctgctgatgtatccatatgggtactcagtcaaaaaggccccagatgccgaggaactcgacaaggtggcgaggcttgcggccaaagctctggcttctgtgtcgggcactgagtaccaagtgggtcccacctgcaccactgtctatccagctagcgggagcagcatcgactgggcgtatgacaacggcatcaaatttgcattcacatttgagttgagagataccgggacctatggcttcctcctgccagctaaccagatcatccccactgcagaggagacgtggctggggctgaagaccatcatggagcatgtgcgggacaacctctactaggcgatggctctgctctgtctacatttatttgtacccacacgtgcacgcactgaggccattgttaaaggagctctttcctacctgtgtgagtcagagccctctgggtttgtggagcacacaggcctgcccctctccagccagctccctggagtcgtgtgtcctggcggtgtccctgcaagaactggttctgccagcctgctcaattttggtcctgctgtttttgatgagccttttgtctgtttctccttccaccctgctggctgggcggctgcactcagcatcaccccttcctgggtggcatgtctctctctacctcatttttagaaccaaagaacatctgagatgattctctaccctcattcacatctagccaagccagtgacctttgctctggtggcactgtgggagacaccacttgtctttaggtgggtctcaaagatgatgtagaatttcctttaatttctcgcagtcttcctggaaaatattttcctttgagcagcaaatcttgtagggatatcagtgaaggtctctccctccctcctctcctgttttttttttttgaggcagagttttgctcttgttgcccaggctggagtgtgatgggctcgatcttggctcaccacaacctctgcctcctgggttcaagcaattctcctgcctcagcctcttgagtagcttggtttataggcgcatgccaccatgcctggctaattttgtgtttttagtagagacagggtttctccatgttggtcaggctggtctcaaactcccaacctcaggtgatctgccctccttggcctcccagagtgctgggattacagggggagccactgtgccggtcccgtcccctccttttttaggcctgaatacaaagtagaagatcactttccttcactgtgctgagaatttctagatactacagttcttactcctctcttccctttgttattcagtgtgaccaggatgggcgggaggggatctgtgtcactgtaggtactgtgcccaggaaggctgggtgaagtccccatctaaattgcaggatggcgaaattatccccatctgtcctaatgggcttccctcctctttgccttttgaactcacttcaaagatgtaggcctcatcttacaggtcctaaatcactcatctggcctggataatctcactgccctggcacattcccatttgtgctggggtatcctgtgtttccttgtcctggtttgtgtgtgtgtgtgtgtgtgtgtgtgtgtgtgtgtgtgtttgtgtgtgtgtgtctgtctattttgatccggcccaagttcctaagtagagcaagaattcatcaaccagctgcctttgtttcatttcacctcagcacgtaccatcgtcctttggggggttgtttgtttttgttttttgctttaaccaaaatgtttgtaaatcttaacctcctgcctaggatttgtacagcatttggtgtgtgcttataagccaataaatattcaatgtgagttccaaaaaaaaaaaaaaaaaaaaaaaaaaaaaa

SEQ ID NO: 907 - DNA, 1836 bp, human
acttccggagacctcacacaagatggcggcacccgaggaacacgattctccgaccgaagcgtcccagccgattgtggaagaggaggaaactaaaacatttaaagacctgggtgtgacagatgtgttgtgtgaagcttgtgaccagttgggatggacaaaacccaccaagatccagattgaagctattcctttggccttacaaggtcgtgatatcattgggcttgcagaaactggctctggaaagacaggcgcctttgctttgcccattctaaacgcactgctggagaccccgcagcgtttgtttgccctagttcttaccccgactcgggagctggcctttcagatctcagagcagtttgaagccctggggtcctctattggagtgcagagtgctgtgattgtaggtggaattgattcaatgtctcaatctttggcccttgcaaaaaaaccacatataataatagcaactcctggtcgactgattgaccacttggaaaatacgaaaggtttcaacttgagagctctcaaatacttggtcatggatgaagccgaccgaatactgaatatggattttgagacagaggttgacaagatcctcaaagtgattcctcgagatcggaaaacattcctcttctctgccaccatgaccaagaaggttcaaaaacttcagcgagcagctctgaagaatcctgtgaaatgtgccgtttcctctaaataccagacagttgaaaaattacagcaatattatatttttattccctctaaattcaaggatacctacctggtttatattctaaatgaattggctggaaactcctttatgatattctgcagcacctgtaataatacccagagaacagctttgctactgcgaaatcttggcttcactgccatccccctccatggacaaatgagtcagagtaagcgcctaggatcccttaataagtttaaggccaaggcccgttccattcttctagcaactgacgttgccagccgaggtttggacatacctcatgtagatgtggttgtcaactttgacattcctacccattccaaggattacatccatcgagtaggtcgaacagctagagctgggcgctccggaaaggctattacttttgtcacacagtatgatgtggaactcttccagcgcatagaacacttaattgggaagaaactaccaggttttccaacacaggatgatgaggttatgatgctgacagaacgcgtcgctgaagcccaaaggtttgcccgaatggagttaagggagcatggagaaaagaagaaacgctcgcgagaggatgctggagataatgatgacacagagggtgctattggtgtcaggaacaaggtggctggaggaaaaatgaagaagcggaaaggccgttaatcacttttatgaaggctcgagttctgctgttctgtaaaagagaattggagaatgaaacctgctccaacagagatcatgagactgaaattggtcagaattgtgtccagaatgtgctcagctaattcagtattcttccccattctgggttggagtttactgcagagtaattcttacagtgctgatgtcaagactgttactgttcttcgactttgattccttgctcatgacatgagtagggtgtgctcttctgtcacttcacacagaccttttgccttttttagctgcaagtcaaggactaggttgatgatgcccatgacctgtaattgtaaagaagcttggacatctgcaaatgatatttaaaccatcttggcttgtgctttattcaaactaatgtgaaacaataaatttaaatattatttttaaaagaaaaaaaaaaaaaaaaaaaa

SEQ ID NO: 908 - DNA, 1053 bp, human
ggggatcctggagctggaggagctcctgcgggcagggaagtcttcttgcagccgtgtggacgaagtttggcccaaccttttcataggagatgcaaacagcatcaagtgtgcggagacaggcggctgaaagccggcagcacgaactgcccgtcagagaagtgcacagcctgggccagatactcccacaggatggactcactgcagaagcaggacctccggaggcccaagatccatggggcagtccaggcatctccctaccagccgcccacattggcttcgctgcagcgcttgctgtgggtccgtcaggctgccacactgaaccatatcgatgaggtctggcccagcctcttcctgggagatgcgtacgcagcccgggacaagagcaagctgatccagctgggaatcacccacgttgtgaatgccgctgcaggcaagttccaggtggacacaggtgccaaattctaccgtggaatgtccctggagtactatggcatcgaggcggatgacaaccccttcttcgacctcagtgtctactttctgcctgttgctcgatacatccgagctgccctcagtgttccccaaggccgcgtgctggtacactgtgccatgggggtaagccgctctgccacacttgtcctggccttcctcatgatctatgagaacatgacgctggtagaggccatccagacggtgcaggcccaccgcaatatctgccctaactcaggcttcctccggcagctccaggttctggacaaccgactggggcgggagacggggcggttctgatctggcaggcagccaggatccctgacccttggcccaaccccaccagcctggccctgggaacagcaggctctgctgtttctagtgaccctgagatgtaaacagcaagtgggggctgaggcagaggcagggatagctgggtggtgacctcttagcgggtggatttccctgacccaattcagagattctttatgcaaaagtgagttcagtccatctctataataaaatattcatcgtcgcaaaaaaaaaaaaaaaaaaaaaaaaaaaaaa

SEQ ID NO: 909 - DNA, 1449 bp, human
ccggagcctgcggcgggcggctgtgacggccccggcgctgacggcggcggccgggggggcggtgtcgacgcccgcggcgccggctggggcatcaccgcgggcctcgaccccgaaatggcgctgctggccgaacacttgctgaagccgctgcccgcggacaagcagatcgagaccgggcccttcctcgaggcggtgtcccacctgccgcccttcttcgattgccttgggtccccagtgtttactcccatcaaggcagacataagcggcaacatcacgaaaatcaaagctgtgtacgacaccaacccagccaagttccggaccctgcagaacatcctggaggtggagaaagaaatgtatggagcagagtggcccaaagtaggggccacactggcgctgatgtggctgaaaagaggcctccgcttcatccaggtcttcctccagagcatctgcgacggggagcgggacgagaaccaccccaacctcatccgtgtcaacgccaccaaggcctacgagatggccctcaagaagtaccatggctggatcgtgcagaagatcttccaggcagcactgtacgcagcaccctataagtctgacttcctgaaagcgctctccaaggggcagaatgttacggaggaggagtgcctggagaagatccgcctcttcctagtcaactacacggcgaccatcgatgtcatctacgagatgtacacccagatgaacgctgagcttaactacaaggtgtaggcatgcccactgctggacacgtccccgactcgtggccacatggagaaacaggcaaaccagaatcactgtgaatcaagtcggtgaactgcccctggcctgtgtcccccagagcagcccagggtcctgccagagtctgcaggggacagccctcgttttttaagtcttttttttttttttttttggtctattctaaaggaccagtaaataatgatcttacttccaaatctccttggaatttcacgacagcacagactgactttataccttcatttcagcgtggtaaaaaccgattaacacttctaatgagtcaagtcctagggttttttggttttgttttgttgccaacgaggaacacagctctgggggaatggtgtcatccacctcgctttaaaaataagcacatgatggctgggcaccgtggctcacgcctgtaatcccagcactttgggaggctgaggcgggtggatcacctgaggtcgggagtttgagaccagcctggccaacatggtgaaaccccatcgctactaaaaatataaaaaattagctgggcatggtggcgcacgcctgtagttccagctactcaggaggctgaggcaggagaatcgcttgaacccgggaggtggaggttgcagtgagctgagatcgcaccattgcactccagcctgggcaacaagagcgaaactctgtctcaaaaaaaaaaaaaaa

SEQ ID NO: 910 - DNA, 852 bp, human
ggatcgactgacgccggggccgggatggcgacgcctcggccctgcgcggacgggccctgctgctcgcatcccagcgcggtgctcggcgtacagcagacgctggaggagatggacttcgagaggggaatctggtcggcagccctgaatggagacctgggccgagtgaagcatttaatccagaaggccgaggacccaagtcagcccgactcggccggctacactgcgctgcactatgccagccgcaatgggcactacgctgtgtgccagttcctgctggaaagcggagctaagtgtgatgcccagacccacgggggtgccactgctctgcaccgagccagctactgcgggcacactgaaatcacgcggctcctgctatcacatgggtccaaccccagggtggtggatgacgacggcatgaccagtctgcataaggctgctgagaggggtcacggggacatctgctccctcctcctgcaacacagcccagccctgaaggccatccgggaccgaaaggcacggctagcatgtgacctgctgccttgcaacagtgacctgcgggacctgctatccagctgagccgccaccctatctccagctgcctttaaagggtacacagaccagttctccaagcccctgccttggtcagcatccatgctgctgggcagggaactgaggccagaccacccaggaagagccccagtctggtcactgtggaagcgagggagtagatttggtgtggctaaaagtgtttaagactggacagatgatcatattctaaattagttcatatgagacatctatttatttggaaaaaaataaagttatatccttaccccaaaaaaaaaaaaaaaa

SEQ ID NO: 911 - DNA, 1514 bp, human
ggggggactggagaagggaggcggcgggcgaagcgcacgtcgagcgggggagcggcgctgcctgtggagatccgcggaggccgacaggattcgttggctgccgtccccgctgctgtgcattgggttaaaaacgacaaccaacatcagccatgaaagatccaagtcgcagcagtactagcccaagcatcatcaatgaagatgtgattattaacggtcattctcatgaagatgacaatccatttgcagagtacatgtggatggaaaatgaagaagaattcaacagacaaatagaagaggagttatgggaagaagaatttattgaacgctgtttccaagaaatgctggaagaggaagaagagcatgaatggtttattccagctcgagatctcccacaaactatggaccaaatccaagaccagtttaatgaccttgttatcagtgaaggctcttctctggaagatcttgtggtcaagagcaatctgaatccaaatgcaaaggagtttgttcctggggtgaagtacggaaatatttgagtagacggggccctcttttggtggatgtagcacaatttccacactgtgaaggcagtattagaagacttaattgtaaaagcactcttgtcactgtgttacacttatgcattgccaaagtttttgttagtcttgcatgcttaataaaagtgctgagactgttactaagtaaaaagctgtcaaacatttactgaaaatagaattggccccatggcttgatgtgaagacagcaaggaaagaagcaccagtcaagttgtgaacaagcaccaaattaaaagacctaaaccttaccaaattgtctttttttgaggctaatctatcacttgttaatgtctaaactttaaaatcagtacatttaatttgagttccaactgttaagcatatttctcagacttaaatttgattatgtccccatcaaaaagaatctccattttctgaaggtctgttagttaatttgagataatttgttaaaggcaagtatgtcatattactgaggctacaagttagtcagcagatgagtgccagtccagccttttccggtatgttattgttagaaatattgagttctaatgttacatctgaggaagtatgtaatttgagaattgtaacttctaagggattcactgcatcatagctatgcctgtatggagtctaacatatgaccaataccaacccataatccagctgaacaaagatactgtaacattatgatttgagtggtgcttttccttgctttgttaaccatcacgagagtctgcagcacaacttttaacaaagctagaacagttttggcttcttaaacttcatatttgggtaggttaagctgccatacgtgttcagtgtgaatagtgtttaagttgaaaatattgtaaaaaaattatattttttcaaaaatatttaaaaaaataaataatagtagaactgaaaaaaaaaaaaaaaaaaaaaaaaaaaaaaaaaaaaaaaagaaaaaaaaaaaaaaaaaaa

SEQ ID NO: 912 - DNA, 649 bp, human
ccggaacaaaaatgcctcagtttggaggtcgcgctcactgcgacggcaggctttgagtgtagcacttggtagttcttcctctgctctgcttcccttcggaggaaaatttcaggctgaaggtttagcgggtgccgcctctaaagagagcaatcactacacttatggctgggattttgcgcttagtagttcaatggcccccaggcagactacagactgtgacaaaaggtgtggagtctcttatttgtacagattggattcgtcacaaattcaccagatcaagaattccagaaaaagtgtttcaggcctcacctgaagatcatgaaaaatacggtggggatccacagaaccctcataaactgcatattgttaccagaataaaaagtacaagaagacgtccatattgggaaaaagatataataaagatgcttggattagaaaaagcacatacccctcaagttcacaagaatatcccttcagtgaatgcaaaattgaaagtagttaagcatttgataaggtttgttgtttcttctcagctctttttaaaatgtattgcctagtgtaattctaaatgcatttttcttttttcgttaatgttctgaaaaaaactttttaaaaaactaaaaaaaaaaaaaaaaaaaaaaaaaaaaag

SEQ ID NO: 913 - DNA, 2208 bp, human
gggcaccgtaaccagcgccgcggacaccggcaccggcgccacggactccgcaggaccccgcgcccgccgccgccgctatgctggggctgctggtggcgttgctggccctggggctcgctgtctttgcgctgctggacgtctggtacctggtgcgccttccgtgcgccgtgctgcgcgcgcgcctgctgcagccgcgcgtccgtgacctgctagctgagcagcgcttcccgggccgcgtgctgccctcggacttggacctgctgttgcacatgaacaacgcgcgctacctgcgcgaggccgactttgcgcgcgtcgcgcacctgacccgctgcggggtgctcggggcgctgagggagttgcgggcgcacacggtgctggcggcctcgtgcgcgcgccaccgccgctcgctgcgcctgctggagcccttcgaggtgcgcacccgcctgctgggctgggacgaccgcgcgttctacctggaggcgcgctttgtcagcctgcgggacggtttcgtgtgcgcgctgctgcgcttccggcagcacctgctgggcacctcacccgagcgcgtcgtgcagcacctgtgccagcgcagggtggagccccctgagctgcccgctgatctgcagcactggatctcctacaacgaggccagcagccagctgctccgcatggagagtgggctcagtgatgtcaccaaggaccagtgaccgccaccttcacaccgtctgccctggccaccatcctgggcctgggggctgcccacagatgggcagtctcagccatactctgttccagctggagtagcctcctgaccagcctggcccaccctgctccacccactgggcccccccagttattgatacccctctgtgctgggctccacgctaggcagaaggaggagtggcattggcatcctgacccagctctgccctcaaggtggggatggatgggcaaaggagagtcctgcctggccctacgatgaggccactcatgtgggcctaggtaggggaggatggtgcctggagcagagggacccacaagtgcctcccgagcctagatcctggctcggaccactgcaagggccgaggcagggccagaccagagcatcctgggtacaggcctgggctctccagggcctgggcctgattcaggtgcagtgggcactcctgaagggtcagagcggcatctgccaggcagcccctctggcttccgctgaggtggttgcaggcctggggcagagcctgggtggtcagaggccggggctagaggcagatggaagggaggcatttgctgacagaggacggggcacccgggctccccactgcagtcggccttgcctcctcctcctcctctacctccagtcaggctggacgggagggtagccttgtggctgagaggggtcagactaggtggcacaggggctcctggaaagacagcaggcttcctgctgggcgttcccttgttggagggaatagagtgggggtgggactctgcaggggtgtccttgtccactcgcacccctcgccgcccaccagggccatgctctgtgacttgggctgatccccaccctttctgggcctacagcaccacaggccgctgtacccccttagagctgcccctctctggcctggccggcaggcgtcttcttaactcctctgtcctctatattcagcatgttccttgtcagctgctgggccggccctgccttgcgctagcagagcctctcctggcagcttctcaggtctccctaatggagacaccaggctactaggacactggctggggccaccccctcctgcctaatgcctcaccttacagctggggaaactgaggcctggaatggcccagagtcaccaaggcaaagttggggctggtcccagcctgaggctccagctgatgccctcagctcccagagagggggtgccccatctagctgggtgcaggggtcactgcttgtcagctcagggccctgtgcccgcttgcctgttcccctacatctgtgcctgcacatccagaactgcctccttgccgctgcctccaggaagcccaccttgagccagagtcaagggctgcagcactgcccgatagaacacgcccgccctcactgctgttcttgccttacagccaccatgggaaagctgcaacctttctgttttatttaaagaaagcccaacattaaagggttttcattgcaaaaaaaaaaaaaaaaaa

SEQ ID NO: 914 - DNA, 1780 bp, human
ttccatggctgcgagaactgacgctccccaaccgtcccgcaactgtcctgtcccagactttggcaccgtcggggtccgtcgtccccgaatgtgacagcatccccaccccggctgctgcccaggatccgccggaccccggcctcgatatgggagacctggaactgctgctgcccggggaagctgaagtgctggtgcggggtctgcgcagcttcccgctacgcgagatgggctccgaagggtggaaccagcagcatgagaacctggagaagctgaacatgcaagccatcctcgatgccacagtcagccagggcgagcccattcaggagctgctggtcacccatgggaaggtcccaacactggtggaggagctgatcgcagtggagatgtggaagcagaaggtgttccctgtgttctgcagggtggaggacttcaagccccagaacaccttccccatctacatggtggtgcaccacgaggcctccatcatcaacctcttggagacagtgttcttccacaaggaggtgtgtgagtcagcagaagacactgtcttggacttggtagactattgccaccgcaaactgaccctgctggtggcccagagtggctgtggtggcccccctgagggggagggatcccaggacagcaaccccatgcaggagctgcagaagcaggcagagctgatggaatttgagattgcactgaaggccctctcagtactacgctacatcacagactgtgtggacagcctctctctcagcaccttgagccgtatgcttagcacacacaacctgccctgcctcctggtggaactgctggagcatagtccctggagccggcgggaaggaggcaagctgcagcagttcgagggcagccgttggcatactgtggccccctcagagcagcaaaagctgagcaagttggacgggcaagtgtggatcgccctgtacaacctgctgctaagccctgaggctcaggcgcgctactgcctcacaagttttgccaagggacggctactcaagcttcgggccttcctcacagacacactgctggaccagctgcccaacctggcccacttgcagagtttcctggcccatctgaccctaactgaaacccagcctcctaagaaggacctggtgttggaacagatcccagaaatctgggagcggctggagcgagaaaacagaggcaagtggcaggcaattgccaagcaccagctccagcatgtgttcagcccctcagagcaggacctgcggctgcaggcgcgaaggtgggctgagacctacaggctggatgtgctagaggcagtggctccagagcggccccgctgtgcttactgcagtgcagaggcttctaagcgctgctcacgatgccagaatgagtggtattgctgcagggagtgccaagtcaagcactgggaaaagcatggaaagacttgtgtcctggcagcccagggtgacagagccaaatgagggctgcagttgctgagggccgaccacccatgccaagggaatccacccagaatgcacccctgaacctcaagatcacggtccagcctctgccggagccccagtctccgcagtggagagcagagcgggcggtaaagctgctgaccgatctccctcctcctcaccccaagtgaaggctcgagacttcctgccccacccagtgggtaggccaagtgtgttgcttcagcaaaccggaccaggagggccagggccggatgtggggaccctcttcctctagcacagtaaagctggcctccagaaacacgggaaaaaaa

SEQ ID NO: 915 - DNA, 2648 bp, human
gcttggggacgcacggagaggtgcagctgggccgtccagcatcaaacactagcctccacacgtggaaaagaccctgactcccacagtagactagtcttatgggagtcctggctcttgggccaggctgcattaggaaaatggaaaccagactgtcttcaaattcttctgcctagccttagccattagagagaggtcctgctaaagatggactgcaaatgcgcttgatggaaggagatgtcaattccactgaagtcctcatttctgctgagctacctgtgcaccctgcctccggctctcctgagcagagagatcctgatggctgactcagaagcactcccctcccttgctggggacccagtggctgtggaagccttgctccgggccgtgtttggggttgttgtggatgaggccattcagaaaggaaccagtgtctcccagaaggtctgtgagtggaaggagcctgaggagctgaagcagctgctggatttggagctgcggagccagggcgagtcacagaagcagatcctggagcggtgtcgggctgtgattcgctacagtgtcaagactggtcaccctcggttcttcaaccagctcttctctgggttggatccccatgctctggccgggcgcattatcactgagagcctcaacaccagccagtacacatatgaaatcgcccccgtgtttgtgctcatggaagaggaggtgctgaggaaactgcgggccctggtgggctggagctctggggacggaatcttctgccctggtggctccatctccaacatgtatgctgtaaatctggcccgctatcagcgctacccggattgcaagcagaggggcctccgcacactgccgcccctggccctattcacatcgaaggagtgtcactactccatccagaagggagctgcgtttctgggacttggcaccgacagtgtccgagtggtcaaggctgatgagagagggaaaatggtccccgaggatctggagaggcagattggtatggccgaggctgagggtgctgtgccgttcctggtcagtgccacctctggcaccactgtgctaggggcctttgaccccctggaggcaattgctgatgtgtgccagcgtcatgggctatggctgcatgtggatgctgcctggggtgggagcgtcctgctgtcacagacacacaggcatctcctggatgggatccagagggctgactctgtggcctggaatccccacaagctcctcgcagcaggcctgcaatgctctgcacttcttctccaggatacctcgaacctgctcaagcgctgccatgggtcccaggccagctaccttttccagcaggacaagttctacgatgtggctctggacacgggagacaaggtggtgcagtgtggccgccgtgtggactgtctgaagctgtggctcatgtggaaggcacagggcgatcaagggctggagcggcgcatcgaccaggcctttgtccttgcccggtacctggtggaggaaatgaagaagcgggaagggtttgagctagtcatggagcctgagtttgtcaatgtgtgtttctggttcgtaccccccagcctgcgagggaagcaggagagtccagattaccacgaaaggctgtcaaaggtggcccccgtgctcaaggagcgcatggtgaaggagggctccatgatgattggctaccagccccacgggacccggggcaacttcttccgtgtggttgtggccaactctgcactgacctgtgctgatatggacttcctcctcaacgagctggagcggctaggccaggacctgtgagccttctctgtcttgctgccggccttgataccacccctcacccgcagagtcactgcattccctcccagcctttgaggccgggtgcagtggctcacgcctgtaatcccagcactttgggaggccgaggcgggtggatcacttgaggtcaggagttcgagaccagcctggccaataaggtgaaaccctgtctctactaaaaatacaaaaattagccgagcatggtggcctgtgcctgtaaacccagctactcaggaggttggggcagaattgcttgaacccagggggcagaggttgcagtgagccgagattgcacccctgcactccaggctgggcaacagtacgagactctgttccaaaaaaaataaaaaagaacagcctttttaggccacagtgacctgcgcaatgtttatatgctttgacctactaactttctcctaactaaatatttgattttaggagagtgtttaaataaattacagtatgtctatatgatgaaatgttattttgccattaaaattttgtttacaaagataatttttattgacataaaaataactttaatgtaatttatgttgaaaaagctgaatacaagtctttatatagagtaatatttgagctgtgttcaaaaatacataggaaaagactgataaaatgaaatatggcaaaatgttaatagttttccctggaataggataataggcaattttaaaacagactcctttaaaaaaacaaacaaacaaaaaaaacatagacttctttatatcttttgagctccctcccttttattatgtaatgaatatgtgttgcttttgtaataggaaaataataaagttaaaatttcaactgcaaaa

SEQ ID NO: 916 - DNA, 1901 bp, human
gtctttccggcggtgctcgcaagcgaggcagccatgtcttatcccgctgatgattatgagtctgaggcggcttatgacccctacgcttatcccagcgactatgatatgcacacaggagatccaaagcaggaccttgcttatgaacgtcagtatgaacagcaaacctatcaggtgatccctgaggtgatcaaaaacttcatccagtatttccacaaaactgtctcagatttgattgaccagaaagtgtatgagctacaggccagtcgtgtctccagtgatgtcattgaccagaaggtgtatgagatccaggacatctatgagaacagctggaccaagctgactgaaagattcttcaagaatacaccttggcccgaggctgaagccattgctccacaggttggcaatgatgctgtcttcctgattttatacaaagaattatactacaggcacatatatgccaaagtcagtgggggaccttccttggagcagaggtttgaatcctattacaactactgcaatctcttcaactacattcttaatgccgatggtcctgctccccttgaactacccaaccagtggctctgggatattatcgatgagttcatctaccagtttcagtcattcagtcagtaccgctgtaagactgccaagaagtcagaggaggagattgactttcttcgttccaatcccaaaatctggaatgttcatagtgtcctcaatgtccttcattccctggtagacaaatccaacatcaaccgacagttggaggtatacacaagcggaggtgaccctgagagtgtggctggggagtatgggcggcactccctctacaaaatgcttggttacttcagcctggtcgggcttctccgcctgcactccctgttaggagattactaccaggccatcaaggtgctggagaacatcgaactgaacaagaagagtatgtattcccgtgtgccagagtgccaggtcaccacatactattatgttgggtttgcatatttgatgatgcgtcgttaccaggatgccatccgggtcttcgccaacatcctcctctacatccagaggaccaagagcatgttccagaggaccacgtacaagtatgagatgattaacaagcagaatgagcagatgcatgcgctgctggccattgccctcacgatgtaccccatgcgtatcgatgagagcattcacctccagctgcgggagaaatatggggacaagatgttgcgcatgcagaaaggtgacccacaagtctatgaagaacttttcagttactcctgccccaagttcctgtcgcctgtagtgcccaactatgataatgtgcaccccaactaccacaaagagcccttcctgcagcagctgaaggtgttttctgatgaagtacagcagcaggcccagctttcaaccatccgcagcttcctgaagctctacaccaccatgcctgtggccaagctggctggcttcctggacctcacagagcaggagttccggatccagcttcttgtcttcaaacacaagatgaagaacctcgtgtggaccagcggtatctcagccctggatggtgaatttcagtcagcctcagaggttgacttctacattgataaggacatgatccacatcgcggacaccaaggtcgccaggcgttatggggatttcttcatccgtcagatccacaaatttgaggagcttaatcgaaccctgaagaagatgggacagagaccttgatgatattcacacacattcaggaacctgttttgatgtattataggcaggaagtgtttttgctaccgtgaaacctttacctagatcagccatcagcctgtcaactcagttaacaagttaaggaccgaagtgtttcaagtggatctcagtaaaggatctttggagccagaaaaaaa

SEQ ID NO: 917 - DNA, 1385 bp, human
gccctccttgccgcccagccggtccaggcctctggcgaacatggcgcttgtcccctgccaggtgctgcggatggcaatcctgctgtcttactgctctatcctgtgtaactacaaggccatcgaaatgccctcacaccagacctacggagggagctggaaattcctgacgttcattgatctggttatccaggctgtcttttttggcatctgtgtgctgactgatctttccagtcttctgactcgaggaagtgggaaccaggagcaagagaggcagctcaagaagctcatctctctccgggactggatgttagctgtgttggcctttcctgttggggtttttgttgtagcagtgttctggatcatttatgcctatgacagagagatgatatacccgaagctgctggataattttatcccagggtggctgaatcacggaatgcacacgacggttctgccctttatattaatcgagatgaggacatcgcaccatcagtatcccagcaggagcagcggacttaccgccatatgtaccttctctgttggctatatattatgggtgtgctgggtgcatcatgtaactggcatgtgggtgtaccctttcctggaacacattggcccaggagccagaatcatcttctttgggtctacaaccatcttaatgaacttcctgtacctgctgggagaagttctgaacaactatatctgggatacacagaaaagtatggaagaagagaaagaaaagcctaaattggaatgagatccaagtctaaacgcaagagctagattgagccgccattgaagactccttcccctcgggcattggcagtgggggagaaaaggcttcaaaggaacttggtggcatcagcacccccctcccccaatgaggacaccttttatatataaatatgtataaacatagaatacagttgtttccaaaagaactcaccctcactgtgtgttaaagaattcttcccaaagtcattactgataataacattttttccttttctagttttaaaaccagaattggaccttggatttttattttggcaattgtaactccatctaatcaagaaagaataaaagtttattgcacttctttttgagaaatatgttaaagtcaaaggggcatatatagagtaaggcttttgtgtatttaatcctaaaggtggctgtaatcatgaacctaggccaccatggggacctgagagggaaggggacagatgtttctcattgcataatgtcacagttgcctcaaatgagcaccatttgtaataatgatgtcaatttcatgaaaagcctgagtgtattgcatctcttgatttaatcatgtgaaacttttcctagatgcaaatgctgactaataaagacaaagccaccctgaa

SEQ ID NO: 918 - DNA, 1456 bp, human
gcggcagtgcgagaaagccgaagatggcggtccccgcggcgctgatcctacgggagagccccagcatgaagaaagcagtgtcactgataaatgcaatagatacaggaagatttccacggttgctcactcggattcttcaaaaacttcacctgaaggctgagagcagtttcagtgaagaagaggaagaaaaacttcaagcggcattttctctagagaaacaagatcttcacctagttcttgaaacaatatcatttattttagaacaggcagtgtatcacaatgtgaagccagcagctttgcagcagcaattagagaacattcatcttagacaagacaaagctgaagcatttgtcaatacgtggtcttctatgggtcaagaaacagttgaaaagttccggcagagaattctggctccctgtaagctagagaccgttggatggcagcttaaccttcagatggctcactctgctcaagcaaaactaaaatctcctcaagctgtgttacaactcggagtgaacaatgaagattcaaagagcctggagaaagttcttgtggaattcagtcacaaggagttgtttgatttctataacaagctagagactatacaagcacagctggattcccttacatgatgttttcgaagactgtttttttcatcacgctcctgccacctcattattttgcattgaagatacattgccaggttgtgttttctgaaggattcagtgacttgctttctgtaaattatatggcttatcacttcttagacaaataacaaccaatagagatcattgttaagaatactgaggttctaatatactttctttagttctgtgagccaacagtaattattaagaacactttccctttaaaggaaacaaaagtgaataccatattgtttttactgtcatagtgttgctttcttgcctgtcctgctaagtttttacttgctggatgataccataatgtatcaaggagcgtccatggatacaagataagatgtgtaccttagtagaatacagagctttggtaattacatgaataaaattaagaaaatagccatatacaatcaaatacactatggcatttttatttgaatatgatgagtatattttgcttcggaaataatataggaaggaaatgtaaaatagtgagtagtatggtatcagttaattccagtctgagcttctctgtcaacttcagtttctctctcagtttaatgatttaataatagtccaggtttttgtgtgtttttctttatactgcaaattaataatgattcactttatagtttgggagacagaatcaggtcttgaataaaataattgtaatgagtgctaaatgggcaccattattcgaatcagataccttttatattctctttccataaatacgttgatttctgtcaataaaatttttgtgtcataaaaaaaaaaaaaaaaaaaaaaaaaaaaaa

SEQ ID NO: 919 - DNA, 2730 bp, human
gccgcgcgctgtgtctccgctgcgtccgccgaggcccccgagtgtcagggacaaaagcctccgcctgctcccgcagccggggctcatctgccgccgccgccgcgctgaggagagttcgccgccgtcgccgcccgtgaggatctgagagccatgtcggccagcagcctcttggagcagagaccaaaaggtcaaggaaacaaagtacaaaatggatctgtacatcaaaaggatggattaaacgatgatgattttgaaccttacttgagtccacaggcaaggcccaataatgcatatactgccatgtcagattcctacttacccagttactacagtccctccattggcttctcctattctttgggtgaagctgcttggtctacggggggtgacacagccatgccctacttaacttcttatggacagctgagcaacggagagccccacttcctaccagatgcaatgtttgggcaaccaggagccctaggtagcactccatttcttggtcagcatggttttaatttctttcccagtgggattgacttctcagcatggggaaataacagttctcagggacagtctactcagagctctggatatagtagcaattatgcttatgcacctagctccttaggtggagccatgattgatggacagtcagcttttgccaatgagaccctcaataaggctcctggcatgaatactatagaccaagggatggcagcactgaagttgggtagcacagaagttgcaagcaatgttccaaaagttgtaggttctgctgttggtagcgggtccattactagtaacatcgtggcttccaatagtttgcctccagccaccattgctcctccaaaaccagcatcttgggctgatattgctagcaagcctgcaaaacagcaacctaaactgaagaccaagaatggcattgcagggtcaagtcttccgccacccccgataaagcataacatggatattggaacttgggataacaagggtcccgttgcaaaagccccctcacaggctttggttcagaatataggtcagccaacccaggggtctcctcagcctgtaggtcagcaggctaacaatagcccaccagtggctcaggcatcagtagggcaacagacacagccattgcctccacctccaccacagcctgcccagctttcagtccagcaacaggcagctcagccaacccgctgggtagcacctcggaaccgtggcagtgggttcggtcataatggggtggatggtaatggagtaggacagtctcaggctggttctggatctactccttcagaaccccacccagtgttggagaagcttcggtccattaataactataaccccaaagattttgactggaatctgaaacatggccgggttttcatcattaagagctactctgaggacgatattcaccgttccattaagtataatatttggtgcagcacagagcatggtaacaagagactggatgctgcttatcgttccatgaacgggaaaggccccgtttacttacttttcagtgtcaacggcagtggacacttctgtggcgtggcagaaatgaaatctgctgtggactacaacacatgtgcaggtgtgtggtcccaggacaaatggaagggtcgttttgatgtcaggtggatttttgtgaaggacgttcccaatagccaactgcgacacattcgcctagagaacaacgagaataaaccagtgaccaactctagggacactcaggaagtgcctctggaaaaggctaagcaggtgttgaaaattatagccagctacaagcacaccacttccatttttgatgacttctcacactatgagaaacgccaaagaggaagaagaaagtgttaaaaaggaacgtcaaggtcgtgggaaataaaaggcagttctacacagactgcagcaacggttgcatctgcatatcctaagaggaaaaaatgaccttcaagagaattaggacttttttcttaatttcactgacttcagagacgattgcagacttgcagtttaagtattggaatttcacaaaagacataggacttaactggaaaatgaaaagaaaagaaaaagaaaaaactaaacaaaaaatccctctaggtagtttaggtgaaaaatgtcccttttattttggctttggttgtgatttcagagcataatgctatgttttttgtctttttactatgtttttcggatttttaagtccgtaagtgcatacagttttctctaatttttaaaccctttcctcctcccatttggacatttgcacttggagaacacttgagttgtgaaggttttgggcatccaccccagaaagtgggaatttgattttatccttccgaactggaagaacatttttatgaagaatttttgtctaggagaatataacagtgttacccaaggttgtgtctttaagggtggttcattttctctgaccttttgttactcaaagtaaagtactaggagtcctaagaaatgttctgttcttgtacattatactgattaagtcaggattaatttgatttcaaagctgagaacagtggtaaaaactcgtttacagaaatgcattttggaagagaaaaatactgtaaaacgtgtcgtgaatgtttcttcagtttcttgttcagccaatgaggaaagggcattgcctttctttttaccattaatcacttctcaataaacgtgagatcctgttgagcatcaaaaaaaaaaaaaaaaaaa

SEQ ID NO: 920 - DNA, 1852 bp, human
ccgcgctgtccgccgccgctgcctgagtcgactctgcgccgcccgccgcgatggaggccgccgcccagttcttcgtcgagagcccggacgtggtctacggccccgaggccatcgaggcgcaatacgagtaccggacgacgcgcgtcagccgcgagggtggcgttctcaaggtgcaccccacgtccacgcgcttcaccttccggaccgcccggcaggtgccccggctcggggtcatgcttgtcggctggggcgggaacaacggctccacactcaccgccgcggtgctggccaatcgactgcgtttgtcctggcccacgcgcagcggccgcaaggaggccaactactacggctcgctgactcaggcgggcaccgtgagcctgggcctggacgccgagggccaggaggtgttcgtacccttcagcgcggtgctgcccatggtggcgcccaacgacctcgtgttcgatggctgggacatctcgtcgctgaacctggccgaggcgatgcggcgcgcgaaggtgctggactgggggctgcaggagcaactgtggccgcacatggaggccctgcggccccggccttctgtttacatccccgaattcatcgcggccaaccagagcgcgcgcgcggacaacctcatcccaggctcgcgtgcgcagcagctggagcagatccgcagggacatccgagacttccggtctagcgcggggctggacaaagtcatagtgctgtggacggcgaacacggagcgcttctgtgaggtgattccaggcctcaacgacacagccgagaacctgctgcgcaccattgagctcggtctggaggtgtcgccctccacgctcttcgccgtggccagcatcctggagggctgtgccttcctcaatgggtctccgcagaacaccctggtgcccggagctcttgagctcgcgtggcagcaccgggtttttgtgggcggagatgacttcaagtcaggccagaccaaagtcaagtccgtgcttgtggacttcctcattggctccggcctcaagaccatgtccatcgtgagttacaaccacctgggcaacaacgatggggagaacctatcggcgccattgcagttccgctctaaggaggtgtccaagagcaacgtggtggacgacatggtgcagagcaacccagtgctctatacgcccggcgaagagcctgaccactgcgtggtcatcaagtatgtgccgtacgtgggtgacagcaagcgcgcgctggatgagtatacctcggagctgatgctgggcggaaccaacacactggtgctgcacaacacgtgtgaggactcgctgctggccgcacccatcatgctggacctagcgctgctgaccgagctgtgccagcgcgtgagcttctgcactgacatggaccccgagccgcagaccttccaccccgtgctgtccctgctcagcttcctcttcaaggcgccactagtgccgcccggcagcccggtggtcaatgcgcttttccgccagcgcagctgcatcgagaacatcctcagggcctgcgtggggctcccgccacagaaccacatgctcctggaacacaaaatggagcgcccagggcccagcctcaagcgagttggacccgtggctgccacctaccctatgttgaacaagaaaggaccggtacccgctgccaccaatggctgcaccggtgatgccaatgggcatctgcaagaggagcccccaatgcccaccacctgaggccccggtcacacagtttctcggctcttcctccccgctgccccccacgaccctaccttgaaggcccccacaaataaaggcgctgccactcagccctcaaaaaaaaaaaaaaaaaaaaaaaaaaa

SEQ ID NO: 921 - DNA, 2173 bp, human
gttgggcgctgaggcgcgagaggaggggatgggcggggcgcgcggccgttagcgcgcggccgttagcggtcggtttctactaacggtaggcgtcgccgcgattcccgaaggtcatagtccgcgtgacccacccccgtttgcgcgctcgcagtcttcgccggcgcagtcaccgcgcagggcggccgcccggaggtagctaccacggcctgtgtcaacgactaaagctccagtacagcggcgccctcagacagctgggagggtggctctggccgggagcggcggccggtgagctaccgcgaggaggagcggcggaggcgacctcggcccggccctgcactggccgcccggcaggcgcgacatgagcctggtctggcatccgcgggatgctccttaagccccttctccggctgttaacctccggggaacggttgtgaccacaccgacacgtattttacagataaatcattcttgcggcggcgggtcgaacacgtttatttattttttattttctcaacaagcttttacccagcacctgtccagtgaaacaacttgataatcgtttcgaggggcgtccgccgggttaggaagccactgcctggcagcttgtggaagcctcatttgcaaagccacccctcagatgttttgaagatcgtgacgtcttgtaactagcagtgtgtgcacagaatcctactcaaggaacgtcttggcccagcgatgcaaagaactgaagtttcaagctggaagagcctgtattgtcctcacaatagtatagaagaattcaagagaggagagagagacagcaccgaatgaagactgtaaaagaaaagaaggaatgccagagattgagaaaatctgccaagactaggagggtaacccagaggaaaccgtcttcagggcctgtttgctggctatgccttcgagaacctggggatcccgaaaaattaggggaatttcttcagaaagacaatatcagcgtgcattatttctgtcttatcttatctagtaagctgcctcagaggggccagtccaacagaggcttccatggatttctgcctgaagacatcaaaaaggaggcagcccgggcttctaggaagatctgctttgtgtgcaagaaaaagggagctgctatcaactgccagaaggatcagtgcctcagaaacttccatctgccttgtggccaagaaaggggttgcctttcacaattttttggagagtacaaatcattttgtgacaaacatcgcccaacacagaacatccaacatgggcatgtgggggaggaaagctgcatcttatgttgtgaagacttatcccaacagagtgttgagaacatccagagcccgtgttgtagtcaagccatctaccaccgcaagtgcatacagaaatatgcccacacatcagcaaagcatttcttcaaatgtccacagtgtaacaatcgaaaagagtttcctcaagaaatgctgagaatgggaattcatattccagacaggaggtggtgcctcattctgtgtgctacatgcggatcccacggaacccacagggactgctcctctcttagatctaacagtaagaaatgggagtgtgaggagtgttcacctgctgcagccacagactacatacctgaaaactcaggggacatcccttgctgcagcagcaccttccaccctgaggaacatttctgcagagacaacaccttggaagagaatccgggcctttcttggactgattggccagaaccttccttattagaaaagccagagtcctctcgtggcaggaggagctactcctggaggtccaagggtgtcagaatcactaacagctgcaaaaaatccaagtaacaccttctgagtagctgctgtcccacacaatagggtatgaagctgcgctcctccatcgggtttggggagggagcactctgggactgtgagacaaggaagcagggccagcagtgagactatgagccaagcaaagagaagtctcagtggagcatgaggagggagcagtccagatgccaacaaggaaatgcgtttatggctacaagagtgcctctgctttctcctcctctcctcccaccaaggattcttccaccttaatcttgttttcatatgcctcttcttacttcacccatgtttgttgttatgcaaataaaggttttctctccaaaaaaaaaaaaaaa

SEQ ID NO: 922 - DNA, 2219 bp, human
ggcaggtgttgaggggctcccggtccggctgccgccgctcccccgctccggacccggggctccccctagcgccgctgaggagccgcctctgcggctccaggagggcgcaggagcgggactgagagcgcctggaggctcgagcggagggtaattcatttgcacacctgttagcaagaaacagaagttgaaggactggaacaagtgaactaggaaagagggaacgccaatccaaggatagaaggacaaggacagaatcaccagcactggctgaaggcctcctgtttcctgcgctttctccttttcctgtgaaatctccgaggagaagaaagaatgatggacagtttatcctttcactgccacaaggcctgtttacttggcagtaggtccttaagttccttgcttttttgctgctgtttggtgactggaagaggcaccagagactctcactctggggaggtttgctggcatgggtaatctcattaaggtgctaaccagggacatagaccacaatgcagcacattttttcttggactttgaaagtaccttaacatggggaatcttcttaaagttttgacatgcacagaccttgagcaggggccaaattttttccttgattttgaaaatgcccagcctacagagtctgagaaggaaatttataatcaggtgaatgtagtattaaaagatgcagaaggcatcttggaggacttgcagtcatacagaggagctggccacgaaatacgagaggcaatccagcatccagcagatgagaagttgcaagagaaggcatggggtgcagttgttccactagtaggcaaattaaagaaattttacgaattttctcagaggttagaagcagcattaagaggtcttctgggagccttaacaagtaccccatattctcccacccagcatctagagcgagagcaggctcttgctaaacagtttgcagaaattcttcatttcacactccggtttgatgaactcaagatgacaaatcctgccatacagaatgatttcagctattatagaagaacattgagtcgtatgaggattaacaatgtaccggcagaaggagaaaatgaagtaaataatgaattggcaaatcgaatgtctttgttttatgctgaggcaactccaatgctgaaaaccttgagtgatgccacaacaaaatttgtatcagagaataaaaatttaccaatagaaaataccacagattgtttaagcacaatggctagtgtatgcagagtcatgctggaaacaccggaatacagaagcagatttacaaatgaagagacagtgtcattctgcttgagggtaatggtgggtgtcataatactctatgaccacgtacatccagtgggagcatttgctaaaacttccaaaattgatatgaaaggttgtatcaaagttcttaaggaccaacctcctaatagtgtggaaggtcttctaaatgctctcaggtacacaacaaaacatttgaatgatgagactacctccaagcaaattaaatccatgctgcaataacaattctggaataagcacctgctgtagacagaagacagtattctgcaatgactgagaatgcagttttttagtgattgcaattactatctcatttattcttgcttttatttctttcctctgttcctcttccctcttttttaatcatgttcttaagacttcttttctgtgccaaaatcagtaaagttacactctgaagggatatcatcctttcaaacgggccatctaaggcagctaattatgcattgcattggggtctctactgagaaaaattctgtgacttgaactaaatatttttaaatgtggattttttttgaaactaatatttaatattgcttctcctgcatggcaaaactgcctattctgctatttaaaaaccctcaatgactttattttctactgccgcctttttcatgtgcaaccaaaatgaaaatgtttaaattaactgtgttgtacaaatggtacccaacacaaactttttttaaattagtaatacttttgtttaaagttttaagtttgcattttgactttttttgtaaggatgtatgttgtgtgtttaacctttattaactaacgttaaaagctgtgatgtgtgcgtagaatattacgtatgcatgttcatgtctaaagaatggctgttgatgataaaataaaaatcagctttcatttttctaaaaaaaaaaaaaaaaaaaaaaaaa

SEQ ID NO: 923 - DNA, 2960 bp, human
actccctctctggatgtgtctgctgccgccattgtgcggcgctggtcccctcagagggttcctgctgctgccggtgccttggaccctccccctcgcttctcgttctactgccccaggagcccggcgggtccgggactcccgtccgtgccggtgcgggcgccggcatgtggctgtgggaggaccagggcggcctcctgggccctttctccttcctgctgctagtgctgctgctggtgacgcggagcccggtcaatgcctgcctcctcaccggcagcctcttcgttctactgcgcgtcttcagctttgagccggtgccctcttgcagggccctgcaggtgctcaagccccgggaccgcatttctgccatcgcccaccgtggcggcagccacgacgcgcccgagaacacgctggcggccattcggcaggcagctaagaatggagcaacaggcgtggagttggacattgagtttacttctgacgggattcctgtcttaatgcacgataacacagtagataggacgactgatgggactgggcgattgtgtgatttgacatttgaacaaattaggaagctgaatcctgcagcaaaccacagactcaggaatgatttccctgatgaaaagatccctaccctaagggaagctgttgcagagtgcctaaaccataacctcacaatcttctttgatgtcaaaggccatgcacacaaggctactgaggctctaaagaaaatgtatatggaatttcctcaactgtataataatagtgtggtctgttctttcttgccagaagttatctacaagatgagacaaacagatcgggatgtaataacagcattaactcacagaccttggagcctaagccatacaggagatgggaaaccacgctatgatactttctggaaacattttatatttgttatgatggacattttgctcgattggagcatgcataatatcttgtggtacctgtgtggaatttcagctttcctcatgcaaaaggattttgtatccccggcctacttgaagaagtggtcagctaaaggaatccaggttgttggttggactgttaatacctttgatgaaaagagttactacgaatcccatcttggttccagctatatcactgacagcatggtagaagactgcgaacctcacttctagactttcacggtgggacgaaacgggttcagaaactgccaggggcctcatacagggatatcaaaataccctttgtgctagcccaggccctggggaatcaggtgactcacacaaatgcaatagttggtcactgcatttttacctgaaccaaagctaaacccggtgttgccaccatgcaccatggcatgccagagttcaacactgttgctcttgaaaatctgggtctgaaaaaacgcacaagagcccctgccctgccctagctgaggcacacagggagacccagtgaggataagcacagattgaattgtacagtttgcagatgcagatgtaaatgcatgggacatgcatgataactcagagttgacattttaaaacttgccacacttatttcaaatatttgtactcagctatgttaacatgtactgtagacatcaaacttgtggccatactaataaaattattaaaaggagcactaaaggaaaactgtgtgccaagcatcatatcctaaggcatacggaatttggggaagccaccatgcaatccagtgaggcttcagtgtacagcaaccaaaatggtagggaggtcttgaagccaatgagggatttatagcatcttgaatagagagctgcaaaccaccagggggcagagttgcatttttccaggctttttaggaagctctgcaacagatgtgatctgatcataggcaattagaactggaagaaacttccaaaaatatctaggtttgtcctcattttacaaatgaggaaactaaactctgtggaagggaaggggttgcctcaaaagtcacagcttagctgggcacagtggctcatgccgataatcccagcaattcagaaagctgaggcaggaggattacttgaggccagactgggcaatatagcaagaccccatctctaaaaaattaggcatggtggtgcatgcctgtattcccagctactcaggaggttgaggtgggaggatcacttgagcccagaagttcaaggctgcaatgagccatgattacaccacggcactacaaccttggtggcacagtgagaacctgactcttaaaaaaaaaaaaaaaaaaaaaaaaaaaaagataactagaacttctagaacatcttgtttacagttagccagaaactatacaagtggtttaacatgcattatcttactcaatccatacaaaagtcttatggaggtgttagcactctttctactgatgaagaactgaggtacttcataaaaccacttacccaaggtgtcttgagtctggtacaactggcattcaaatctaggtcagtctgcccccagagccactacccttacccctcactgaatctgcctttatattgttgagcccatgaccccaaactgctctttccaatttgaacttccagggattttattgtgaacttacatagcaacattaaaatgaagttgaattgtttttaatggcaacgccgtctgtctcctctagcttaccgcttctcacctttcaaccccatctgtggcctttgtccaggcccacagcttagccatggcttccctcctgcatccctgccgtgggttgctggcctcacacttgcagcagctggacagtgattttagaaggccaccagtccccatagctatgtgacaatgagaagcaaacttttttgtgacagattgtattggcataggcatgatagatggggattggtacgttttgaatcagcatttgcaaaaaaattgtcttgaattttaaaataaacaacaaagatttgttcattgagtgcaaaaaaaaaaaaaaaaaaaaaaaaa

SEQ ID NO: 924 - DNA, 3458 bp, human
cctgcggctggggctgggggcggcggcggcggcgacggggcggcgggcggcgcggggcggtccggcgggttcaaagaggaaaacatggcggaaaacaaaggcggcggcgaggctgagagcggcggcgggggcagcggcagcgcgccggtaactgccggggccgccgggcccgccgcgcaggaggcggagccgcctctcaccgcggtgctggtggaggaggaggaggaggaaggcggcagggccggcgctgagggcggcgcggccgggcccgacgacgggggggtggccgcggcctcctcgggctcggcccaggctgcttcatctcctgcggcctcagtgggcactggagttgccgggggcgcagtatcgacgccggctccagctccagcctcggctcccgctccgggtccctcggcagggccgcctcctggaccgccagcctcgctcctggacacctgcgccgtgtgtcagcagagcttgcagagccggcgtgaggcggagcccaagctgctgccctgtcttcactccttctgcctgcgctgcctgcccgagccggagcgccagctcagcgtgcccatcccggggggcagcaacggcgacatccagcaagttggtgtaatacggtgcccagtatgccgccaagaatgcagacagatagaccttgtggataattattttgtgaaagacacatctgaagctcctagcagttctgatgaaaaatcagaacaggtatgtactagttgtgaagacaatgcaagtgcagttggcttttgtgtagaatgtggagagtggctatgtaagacatgtatcgaagcacatcaaagagtaaaatttactaaagatcacttgatcaggaagaaagaagatgtctcagagtctgttggagcatctggtcaacgccctgttttctgccctgtacacaaacaagaacagttgaaacttttctgtgaaacatgtgatagattgacatgtagagactgtcagctattggaacacaaagaacataggtatcagtttttggaagaagcttttcaaaatcagaagggtgcaattgagaatctactggcgaaacttcttgagaagaagaattatgttcattttgcagctactcaggtgcagaataggataaaagaagtaaatgagactaacaaacgtgtagaacaggaaattaaagtggccattttcacccttatcaatgaaattaataagaaaggaaaatctctcttacaacagctagagaatgttacaaaggaaagacagatgaagttactacagcagcagaatgacatcacaggcctttcccggcaggtgaagcatgttatgaacttcacaaattgggcaattgcaagtggcagcagcacagcactactatacagcaagcgactgattactttccagttgcgtcatattttgaaagcacggtgtgatcctgtccctgctgctaatggagcaatacgtttccattgtgatcccaccttctgggcaaagaatgtagtcaatttaggtaatctagtaatagagagtaaaccagctcctggttatactcctaatgttgtagttgggcaagttcctccagggacaaaccacattagtaaaacccctggacagattaacttagcacagcttcgactccagcacatgcaacaacaagtatatgcacagaaacatcagcagttgcaacagatgaggatgcagcaaccaccagcacctgtaccaactacaacaacaacaacacaacagcatcctagacaagcagcccctcagatgttacaacaacagcctcctcgattgatcagtgtgcaaacaatgcaaagaggcaacatgaactgtggagcttttcaagcccatcagatgagactggctcagaatgctgccagaataccagggatacccaggcacagcggccctcaatattccatgatgcagccacacctccaaagacaacactcaaacccagggcatgctggaccctttcccgtagtatcggtacacaacaccacaatcaacccaacgagccctactacagcaactatggcaaatgcaaaccgaggtcccaccagcccatctgttacagcaatagagctaatcccctcagttaccaatccagaaaaccttccatcgctgccagatattccacccatacagttggaagatgctggctcaagtagtttagataatctactaagtagatacatctcaggcagtcacctacccccacagcctacaagcaccatgaatccttctccaggtccctctgccctttctccgggatcatcaggtttatccaattctcacacacctgtgagacccccaagtacttctagtactggcagtcgaggcagctgtgggtcatcaggaagaactgctgagaagacaagtcttagtttcaaatctgatcaggtgaaggtcaagcaagaacctgggactgaagatgaaatatgtagcttttcaggaggtgtaaaacaagaaaaaacagaggatggcaggaggagtgcttgcatgttgagcagtcctgagagtagcttgacaccacctctctcaaccaacctgcatctagaaagtgaattggatgcattggcaagcctggaaaaccatgtgaaaactgaacctgcagatatgaatgaaagctgcaaacagtcagggctcagcagccttgttaatggaaagtccccaattcgaagcctcatgcacaggtcggcaaggattggaggagatggcaacaataaagatgatgacccaaatgaagactggtgtgctgtctgccaaaacggaggagatctcttgtgctgcgaaaaatgtccaaaggtctttcatctaacttgtcatgttccaacactacttagctttccaagtggggactggatatgcacattttgtagagatattggaaagccagaagttgaatatgattgtgataatttgcaacatagtaagaaggggaaaactgcgcaggggttaagccccgtggaccaaaggaaatgtgaacgtcttctgctttacctctattgccatgaattaagtattgaattccaggagcctgttcctgcttcgataccaaactactataaaattataaagaaaccaatggatttatccaccgtgaaaaagaagcttcagaaaaaacattcccaacactaccaaatcccggatgactttgtggccgatgtccgtttgatcttcaagaactgtgaaaggtttaatgaagctgattcagaagtagctcaggcagggaaagcagttgcattgtactttgaagataaactcacagagatctactcagacaggaccttcgcacctttgccagagtttgagcaggaagaggatgatggtgaggtaactgaggactctgatgaagactttatacagccccgcagaaaacgcctaaagtcagatgagagaccagtacatataaagtaaaatgacatggatttaaatgaattgtttaaaaaaaaaaaaaa

SEQ ID NO: 925 - DNA, 2734 bp, human
cccgctccccgcaggggtggagcctgagcgaggagcccgcgagctctcctctctcctctggtctccgcggatgacgagtggctggataacatggagtcgggcaagatggcgcctcccaagaacgctccgagagatgccttggtgatggcacagatcctgaaggatatgggaatcacagagtatgaaccaagggttataaatcaaatgttggaatttgctttccgttatgtgactacaattctggatgatgcaaaaatttattcgagccatgctaagaaacctaatgttgatgcagatgatgtgagactggcaatccagtgtcgtgctgaccaatcttttacctctcctcccccaagagattttttactggatatcgcaaggcagaaaaatcaaacccctttgccactgattaagccatatgcaggacctagactgccacctgatagatactgcttaacagctccaaactataggctgaagtccttaattaaaaagggacctaaccaagggagactagttccacgattaagtgttggtgctgttagtagcaaacctactactcctactatagcaaccccacaaacggtgtctgtcccaaataaagttgcaactccaatgtcagtgacaagccaaagatttacggtgcagattccaccttctcagtccacacctgtcaaaccagttcctgcaacaactgcagttcaaaatgttctgattaatccttcaatgattgggcccaaaaatattcttattaccaccaacatggtttcgtcacagaacacagccaatgaagcaaacccactgaagagaaaacatgaagatgatgatgacaatgatattatgtaaggaatatagtctagtctagatgcatttcaaaaggaaagttggttttgagcccagtatactgaactagaatattctagatcttgttttaccttaaaagactgaaatgtagctgcagtatttttcgtcagttaaaactgttagatctctttagtaaacatacaaatgtgtttttcagtaggcttcaattacaaacagttaagtacttgtttcttaatagtttcattaatgttgagtcctaatatggcaattctgtttttgagacacttttctgccttctatcactgatagtagcatttaagtttcagattctacagcctagtcagcagatttatctttgacagcataatttctgatctacatttaaatactactttattttataaggtaatatagttacttactgtcactagctaattttttttttttaccaaatctctcaatataggaaacattttttggaaaggatggatttagaggagagattctaaatccattttggatgtatttgtttctttgacttccttaacttccaaactcaactccctttctagatcccattcattttctgcacctcccccataggcttgtttctctccattgctattaaatgtagaaggccatacctggaattttaaaaatattattcctggtaatacagctcagtgtcattttcctatttttaaaacatgctctacatgcctaatgtttcgtgattcactttaacctgatggtttgcatttgctgtttttcactcttatgtcagagcagttgggttttaccccttagtttttatgcctgttaagctttactgtgcttttgacaggtagttttgggtcagttatattcagttttagtattgtattccaagttgataactcttccatgtttcacatttctaaatttaacagagatgctgtagcttaaaacatgttttgataagtaattacactggacctaggcaaaaccactgaagaacaagtgttcctttttaccacatacatattatgttttgatcactgctgcttgagccccgctattggtataattcagatcatattagcttgttgctgaggatgtcacatataagacaggatcaaacctgaaagacactaatggttcatcctctataaggccaacaaagaaaacaaattaatgtgatgtaacttgcatttatgtgcactctgcataggtttcccaataatactgtaatgttgctgaacacctttccctgttttccatttatacacatattaaagtcatattgggaaagatggcaaagcttttgagaatataaacacacctgttttgtttttcttaagttcaacatacttttgtagaatttgtaaaataaatgttcgtatcataattgagaatttatagccaaggatcctcaaaacagaagtttcatcttaggatagtgtttgatatatctaagaaagtccagtaacagagaagaaatgtctcaaatgtctcgtatcagttttagtgtttttcagtattagggaaaggtaatataaaaacaggtaaaatgtataaaaatagacctgatcaacatcataggagataaatattcattatatagcataggatattattacttgaatgttctcagggaggcagcaagtcagaaggcctaggttctagtcctagctccatcatttaccaactgtgtgaccttacttcacctcttagccttgttctcctcactagcagtaggaaagtaacacctaccctgcctacctcacagggctgttgtgagggttcaattggtatatgtgaaaattctttcagaattgtaaaatgctatatgactgtaaggaattattgcatttgttccaaggttaataaaaatttgagcttaaaaaaaaaaaaaaaaaaaaaaaaaaaa

SEQ ID NO: 926 - DNA, 1282 bp, human
ctgcgatcccgcagggcagcgacgcgactctggtgcgggccgtcttcttccccccgagctgggcgtgcgcggccgcaatgaactgggagctgctgctgtggctgctggtgctgtgcgcgctgctcctgctcttggtgcagctgctgcgcttcctgagggctgacggcgacctgacgctactatgggccgagtggcagggacgacgcccagaatgggagctgactgatatggtggtgtgggtgactggagcctcgagtggaattggtgaggagctggcttaccagttgtctaaactaggagtttctcttgtgctgtcagccagaagagtgcatgagctggaaagggtgaaaagaagatgcctagagaatggcaatttaaaagaaaaagatatacttgttttgccccttgacctgaccgacactggttcccatgaagcggctaccaaagctgttctccaggagtttggtagaatcgacattctggtcaacaatggtggaatgtcccagcgttctctgtgcatggataccagcttggatgtctacagaaagctaatagagcttaactacttagggacggtgtccttgacaaaatgtgttctgcctcacatgatcgagaggaagcaaggaaagattgttactgtgaatagcatcctgggtatcatatctgtacctctttccattggatactgtgctagcaagcatgctctccggggtttttttaatggccttcgaacagaacttgccacatacccaggtataatagtttctaacatttgcccaggacctgtgcaatcaaatattgtggagaattccctagctggagaagtcacaaagactataggcaataatggagaccagtcccacaagatgacaaccagtcgttgtgtgcggctgatgttaatcagcatggccaatgatttgaaagaagtttggatctcagaacaacctttcttgttagtaacatatttgtggcaatacatgccaacctgggcctggtggataaccaacaagatggggaagaaaaggattgagaactttaagagtggtgtggatgcagactcttcttattttaaaatctttaagacaaaacatgactgaaaagagcacctgtacttttcaagccactggagggagaaatggaaaacatgaaaacagcaatcttcttatgcttctgaataatcaaagactaatttgtgattttactttttaatagatatgactttgcttccaacatggaatgaaataaaaaataaataataaaagattgccatgaatcttgcaaa

SEQ ID NO: 927 - DNA, 670 bp, human
cgcacgctgctaggatcagcggtggtggttccgcgatggtaggcggcggcggggtcggcggcggcctcctggagaatgccaaccccctcatctaccagcgctctggggagcggcctgtgacggcaggcgaggaggacgagcaggttcccgacagcatcgacgcacgcgagatcttcgatctgattcgctccatcaatgacccggagcatccactgacgctagaggagttgaacgtagtagagcaggtgcgggttcaggttagcgaccccgagagtacagtggctgtggctttcacaccaaccattccgcactgcagcatggccacccttattggtctgtccatcaaggtcaagcttctgcgctcccttcctcagcgtttcaagatggacgtgcacattactccggggacccatgcctcagagcatgcagtgaacaagcaacttgcagataaggagcgggtggcagctgccctggagaacacccacctcttggaggttgtgaatcagtgcctgtcagcccgctcctgagcctggcctttgacccctcagcctgcatactggtatcctggtcccagctcctgccagggctgttaccgttgttttcttgaatcactcacaatgagaaactaacattttgctttttgtaataaagttaatttatattcagtaaa

SEQ ID NO: 928 - DNA, 1182 bp, human
gcggccggcggcgtctcctcccgggacgctgaggggcccgaggagaccgtgaggctctggcctgcagctcgcgccgccatggacgctgccgaggtcgaattcctcgccgagaaggagctggttaccattatccccaacttcagtctggacaagatctacctcatcgggggggacctggggccttttaaccctggtttacccgtggaagtgcccctgtggctggcgattaacctgaaacaaagacagaaatgtcgcctgctccctccagagtggatggatgtagaaaagttggagaagatgagggatcatgaacgaaaggaagaaacttttaccccaatgcccagcccttactacatggaacttacgaagctcctgttaaatcatgcttcagacaacatcccgaaggcagacgaaatccggaccctggtcaaggatatgtgggacactcgtatagccaaactccgagtgtctgctgacagctttgtgagacagcaggaggcacatgccaagctggataacttgaccttgatggagatcaacaccagcgggactttcctcacacaagcgctcaaccacatgtacaaactccgcacgaacctccagcctctggagagtactcagtctcaggacttctagagaaaggcctggtgcaggcggcttgctgggggatgtgagcgctcaggatgtgatgaggtactcgtggttctggagctctagaaacacttctgatgcatgaaaaatgtgtgatggtgcaaggaatggattcaggatgttgttggagaaacaagtttgtgattagtccttaaaacttagctccctgggacattcttcaattccacatctgtttctagaaaccagccctttttccccccacttttgagaaataaaaaagccttaggtaaataagtcattctccctagcagagccacttgggtctcctgcatggaagccgtcacacttgggcaggtgttcagtgactggtaggtgtagatacagcaggagtggccatgtggtccacggctttttaccccttcttgatcctgatttcttgggctgaatttagactctctcacagaggtggctcacagagaaggatggcagatggtgcagccaacaatgctgaccggtgcttatcctctaagccctgatccacaataaaaatggacccaactcaaaaaaaaa

SEQ ID NO: 929 - DNA, 1206 bp, human
ctttttcagttctgcttgctgtcggcaccgctgcgttacccggaaccgccgggccgaacagcatgacgtccgctttggagaactacatcaaccgaactgttgccgttattacatcagatgggagaatgattgtgggaacactgaaaggttttgaccagaccattaatttgattttggatgaaagccatgaacgagtattcagctcttcacagggggtagaacaagtggtactaggattatacattgtaagaggtgacaacgttgcagtcattggagaaatcgatgaagaaacagattctgcgcttgatttggggaatattcgagcagaacctttaaattctgtagcacactgaggaaaaactacatacttggacatctgtaaatctttgtacagaaactgattattctgaggatgatatatggagtttttatgagtgtgtcactggattttgactccttattgattcattgtaatatgtaaattaaaatatttctacattttattgaaaaaaaaaaccttttttttttgcctaaatataagtttggtagcttggtttcttttttttattaaatagtgtgaaaatataatgggcattctgaaaacttttagaaaaaagtagtactttttgatactttagtatttatggaaactagtggaaaagagaaattagtgtgctatataaatcaggcattcaagtaacagtaatacaggatatatgtgttttctttccctgatgtttaggaaaatcacaggagggtaaatctttgctggagttatctgaatcattggcatttatccgattccactggtggtagtttgctagtgcttctaaaagttgctccctagcactgagaggtgtgggtaggtaaaaatgtgtttgcttgagaaaagcaaaaatgctaacaaggttttgatagattggcccaaaattctaacttgaatattaagaatgactaggaatggtagaattgacagagatgattagtaaagtctcttgatgcccaattggttaggtatgaaagtaatatgaacacattaatgttgaattttacagacagtatatttgaaaaaaattgattccatgtagtcttcaatttttaatttttaagaattggagaatttctaatgttaaagttagtttataaatgtgagtaaataaactctaagtttgtatcgaaaaaaaaaaaaaaaaaaaaaaaaaaaaa

SEQ ID NO: 930 - DNA, 2286 bp, human
gttcctcacccccgcttcgccctcacactttcgggatgtctgcgattcctgctgaggagagcgaccagctgctgatccgaccccttggagctgggcaagaagtaggaagatcatgtattattctcgagttcaaaggaagaaaaataatgctcgactgtgggatccaccctggcctagaaggaatggatgctcttccttatattgatttaattgacccagctgagattgatctcctattaattagtcatttccatttggatcactgtggagctctgccctggtttctacagaagacaagtttcaaaggaagaacatttatgactcatgccacaaaagctatttatagatggcttctttctgattatgtcaaagttagtaacatatcagcagacgacatgctgtataccgagacagatttggaagaaagcatggacaaaattgaaactatcaactttcatgaagttaaggaagttgcgggaatcaagttttggtgttaccatgcaggtcacgtcctaggagccgccatgttcatgattgagatcgcaggcgtgaagcttttgtacactggtgatttctcaagacaagaagataggcacttaatggcagctgaaattcctaatattaagcctgatattcttatcattgaatctacttatgggacccatatccatgagaaacgtgaagagcgagaagcaagattctgtaacactgtccacgatattgtaaacagaggaggcaggggtctcattcctgtctttgctcttggaagggctcaggagctgctcttgattctagatgagtactggcagaatcacccagaactacatgacattccaatatactatgcatcatctttggccaagaagtgtatggcagtgtaccagacatatgtaaatgccatgaatgacaaaatccgcaaacagatcaacatcaataatccctttgttttcaaacacattagtaacctcaagagcatggatcattttgatgacattggtcccagtgttgtaatggcctccccaggcatgatgcaaagtggcttatccagagaattatttgaaagctggtgtactgataagaggaatggtgtcattatagcgggatactgtgtagaagggacacttgccaagcacatcatgtctgaacctgaagaaatcactactatgtctggacagaagttaccactgaaaatgtctgttgattacatttctttctcagctcacacggattaccagcaaaccagtgaatttattcgtgctttgaaaccgcctcatgtgattttagtccatggagaacagaatgaaatggccagattgaaagcagcactgattcgagaatatgaagataacgatgaagttcacatagaggttcataatcctcggaatacagaagcagtgaccttaaacttcagaggagaaaaactagccaaggttatgggatttttagcagacaaaaaaccagaacaaggccagcgggtctcaggaatacttgttaaaagaaactttaattatcacatactttctccttgcgacctgtccaattatactgacctggccatgagcacggtgaagcagacccaagccattccatatactggtccctttaatttgctctgttaccagctgcagaaattgacaggtgatgtggaagaattagaaattcaagaaaaacctgctctgaaagtgttcaaaaatattactgtaatacaagaaccaggcatggtggtattagaatggctggcaaacccttctaatgatatgtatgcagatacagtaacaactgtgatattggaagttcagtcaaatcccaaaataagaaaaggtgcagtacagaaggtttctaaaaaattagaaatgcacgtttacagcaagaggttggagatcatgctccaggacatatttggagaagactgtgtaagtgtaaaggatgactctattcttagcgtcacagtggacgggaaaactgccaaccttaacttggagacacggactgtagaatgtgaagagggaagtgaagacgatgaatccctccgagaaatggtggagctggctgcacagagactgtacgaggccctgacgccagttcactgagactgtgcctgtatatgaactttgaaaaaatacttgactctacttttgttacctaaaataaaatgcattcgtttctctgggaaaaaaaaaaaaaaaaaaaaaaaaaaaaaaaaaaaaaaaaaaaaaaaaaaaaaaaaaaaaaaaaaaaaaaaaaaaaaaaaaaaaaaaaaaaaaaaaaaaaaaaaaaaaaaaaaaa

SEQ ID NO: 931 - DNA, 4061 bp, human
cccacgcgtccgcggctctctttctcctctctgtcctgctgtcgcctcctctcctcactccagcctccttccctggcttattctgcccaggaaagtttggaacccccgccccccctccccaatcaggtcaacctgactaggagtagggggagatgtaggaaggcctgagagttcgggggggggaagctggaagctggtttcccagaaaatttccccccatcttctccatttagggtggtgggaattttttttaatcctgtttttgaggaggtggtaggtgtttagaaaaggatgtgggaatggaaggggtagatgagtcaaccctctttcaagattccaagggtggtgtgttacctgatccttttcgtgtgtggagttcagggggtcgggaggttggcctttattcccacattcaaagttggaacctcccccaaattaagaatggagttttagtacccacttgtggcaggaatcctggggggaaggggtccttttttcctttttcttttcttttttccctttttttccttttggcaacccacacccttccacacacgctcaccccaaaattaaacaccaagatcctctaacttgtttggattgactgatgaagacataaagctctatgttttttgaggtggagtgagtggtttttcttcatttttaaatggccaaatgacagcttgacccagtttgctttccaatcaaagggcatttattttgaatgtctctttgtggcgcaagagccaacgcaaaaatgatggcggcttacaatggcggtacatctgcagcagcaacaggtcaccaccaccaccatcaccaccaccttccacacctccctcctcctcacctgcaccaccaccaccaccctcaacaccatcttcatccggggtcggctgccgctgtacaccctgtacagcagcacacctcttcggcagctgcggcagccgcagcagcggctgcagctgcagccatgttaaaccctgggcaacaacagccatatttcccatcaccggcaccggggcaggctcctggaccagctgcagcagccccagctcaggtacaggctgccgcagctgctacagttaaggcgcaccatcatcagcactcgcatcatccacagcagcagctggatattgagccggatagacctattggatatggagcctttggtgttgtctggtcagtaacagatccaagagatggaaagagagtagcgctcaaaaagatgcccaacgtcttccagaatctggtctcttgcaaaagggtcttccgggaattgaagatgttgtgtttttttaagcatgataatgtactctctgcccttgacatactccaacctccacacattgactattttgaagaaatatatgttgtcacagaattgatgcagagtgacctacataaaattatcgtctctcctcaaccactcagctcagatcatgtcaaagtttttctttatcagattttgcgaggtttgaaatatctccattcagctggcattttacatcgagacattaagccagggaatctccttgtgaacagcaactgtgttctaaagatttgtgattttggattggccagagtggaagaattagatgaatcccgtcatatgactcaggaagttgttactcagtattatcgggctccagaaatcctgatgggcagccgtcattacagcaatgctattgacatctggtctgtgggatgtatctttgcagaactactaggacgaagaatattgtttcaggcacagagtcccattcagcagttggatttgatcacggatctgttgggcacaccatcactggaagcaatgaggacagcttgtgaaggcgctaaggcacatatactcaggggtcctcataaacagccatctcttcctgtactctataccctgtctagccaggctacacatgaagctgttcatctcctttgcaggatgttggtctttgatccatccaaaagaatatccgctaaggatgccttagcccacccctacctagatgaagggcgactacgatatcacacatgtatgtgtaaatgttgcttttccacctccactggaagagtttataccagtgactttgagcctgtcaccaatcccaaatttgatgacactttcgagaagaacctcagttctgtccgacaggttaaagaaattattcatcagttcattttggaacagcagaaaggaaacagagtgcctctctgcatcaaccctcagtctgctgcttttaagagctttattagttccactgttgctcagccatctgagatgcccccatctcctctggtgtgggagtgatggtggaagataatgtactactgaagatgtaatgtagctttccactggagtctgggatttgcaattctggaggttaatcatgcttgtactgtaattttactaatgaagttttaaattaacaaccactacttgtatgatatgaataatatttagaaatgttactagacttttaatcttgtaaagtggttgtgcttttagaagaaaaatattttacccagagttgcacatgttttatgaatttagtgcagctgttatggctcacctcagaacaaaagagaattgaaccaaatttgggagtttggggttttatgttttgtttttcttttctaaaatgaagtgagattgttcacacacacacacacacacacacacacacaaacacaaaggacagtcatacattttgatatttgagccattcctaaagatttggggttttctaaaactaaagaatctaggaaccttgcctgcgaccaatcatggagccacgtgagctgatcgtggctgcacctggggggagggtagggaggaggggcatgccacctaatgatcaagccctataattagcttctcattagagccgtgatggtgatgtgtgctgtctaaaatccaatgttgtgggtagagagaatgagtttgtgactaggagagactaaacttttgttttccttacccagtataaatatatatatatatatttaatctatttttattagaagtttttctgctctttcttacataaaagaaccccaagcatgcatctttcatgtgtgtaaataattcatttctgggctaatttcaaaagaatcccaatattgctgtatagaaagagaactagcttgcacattttaggtctgtgaaattttgtgagacttttcctgcactggacagtaaaaaaataataaaagacaaaaacaaatttaaaaaaaaatttaagccacaaaaaaaggcacatagggaattatgtcaaatgtgtttgtgtccttaggcaaagctgtgggagtcttgaaatgtcacagtagtaaataacttattactttttgacaagttctttttttctgttggaacactgaattcttctgtgcatatgtacatatgaatacaaatcgaaggcctctacctcctggagttatacaacttggcttgtttacctccacatgctgatgatgactatttttttttttgagttcagtgtggagacttgaaacttgaatgtcccttccaacttttatattaaaaataaaaagacaagaaaattgaagatcatttttcacctgtacaaggaatactaatggatcgtcttaaaattggtctaggaaaaaaccttggtgtgtgttatggacaattaactgttaaagttattgtaagttatctgtatttagcagagtattttcaacttgagtgatctgagctgaatttgaagactattaataagttatgtttggaagttttaacttcaatgaagtaattatttgctgtgaaagaaacaaacattgaattactaaacaaagatggtgcaatatctttgttttttttttatgaggctcctgagaatcaacccaactgaagcatttcaattcacttgaatgagaaacgtgtttagtatcaaaagagcccaagaagacactggtgtgaaaggtacaatctcagaggttggtcaattaccgtggcacactttctggtcactttgtacaatgtagatttgaagtacagtggtgaaaacattaaatgtgacatttgaaaaaaaaaaaaaaaa

SEQ ID NO: 932 - DNA, 3761 bp, human
gcgaagactaaggcggcgccgggccccacagcagcagccgcagcccaagcgagcgcagcagcgcggcggcagccgcgggagcccctgggcaggcgtccgcccgcgcagccgccgccgccgcgggagcccgtcgccgggagcaggagcgggcggaagacaacggaggggccgagcgtccgagccactccgcggggaccgaacgagcagcccgaagcggcggcggccgaggacggggacagcgacgacgcggaggcagagaagggaacgcccggcccagccccgtagcacaggcggagtgcagcggaggcccctgccgctgccgtcatgccgttcccgtttgggaagtctcacaaatctccagcagacattgtgaagaatctgaaggagagcatggctgttctggaaaagcaagacatttctgataaaaaagcagaaaaggctacagaagaagtttccaaaaatctggttgccatgaaagaaattctgtatggcacaaatgaaaaagagcctcagacagaagcagtagctcaacttgctcaagaactctataatagtgggctccttagcaccctggtagctgatttacagctcattgactttgagggcaaaaaagacgtggctcaaattttcaacaatattctcagaagacaaattggtacgagaactcctactgttgaatacatctgcacccaacagaatattttgttcatgttattgaaagggtatgaatctccagaaatagctctaaattgtggaataatgttaagagaatgcatcagacatgaaccacttgcaaaaatcattttgtggtcggaacagttttatgatttcttcagatatgtcgaaatgtcaacatttgacatagcttcagatgcatttgccacattcaaggatttacttacaagacataaattgctcagtgcagaatttttggaacagcattatgatagatttttcagtgaatatgagaagttacttcattcagaaaattatgtgacaaaaagacagtcactgaagcttctcggtgaactactactagatagacacaacttcacaattatgacaaaatacatcagtaaacctgagaacctcaaattaatgatgaacctgctgcgagacaaaagtcgcaacatccagtttgaggcctttcacgtttttaaggtgtttgtagccaatcctaacaagacgcagcccatcctagacatcctcctcaagaaccaggccaaactcatagagttcctcagcaagtttcagaacgacaggacggaggatgagcagtttaacgacgagaagacctatttagttaaacagatcagggatttgaagagaccagctcagcaagaagcttaatctccaataaacatctatgttaaatccaaattcagcatttgctgttagctattcagcatcaggcactcttattgattcatgaggaacattactgctaatctgctgttaagtgaacggtttttcattttacccttttgtttttcagtccaggttggagatcgtagctgctgctgcttgcacactagggcacatgtgggctttctcttgatctttgtgtcatttcagaattcaaagactgtgctacgggagttctgaacatggctgggttcatgaaggcaaatgtatggatgagagtgtggtttaggaaagagggcactgatatcagattagacctatgtgtttgcacccatctttgttggcgatctgagtgcagtgtggcaagtgcacacctggcatccctgcgtcagatcgcgcaccttcaggtcgcgcaccttcgctgaaggaagatgacgcagagctttatctgaaatcagaggggaactatccaaaatgggagtttgggggcagctaaagttgacatgcgaataaattgatactgaaacttagcaacttcttaaaagtgtaaagaagcctcataagatcataaggaaaatgtatatatgcttttcacagctttctagaattttttgacatttgattttcttgagacttgtaaacctggatatgttgaagggtatttgttaattttacttttcaaagatactttaaaacagtagagctagcaatgacaccttgcatttcatttcaacactgcttcaaggtttcttttgtatataattcttagaatgctcatttcttttaaatggtttaatttgtacagcagaggaatgttattgtagtagtatgtaactattacctaatactgagtttttgcaaaaaacaatgaatgctcatatgtaattgaaatacttcagatcacatgaaaatgctgatttaacatttaagtatcacagcattaaaagaaaaagaaagtaaaccagtcctttgtattcagttacctaatggggtgccatcaataagctgcgatacagccctggagctcagtcagccacaccttcctgcatcctattggccttattcattttaaatgagttaatgaatctgccagatctgtgaatgatagagattatgctaaattaatgctgattctttgtgtgtgtgggaaatctctgtagagcaccttttctttcttagactaagtaacccagtacaatagttgtgaactgaataattaaaactttggcttctcttaggaaaagacgacttcctagtcataggtgtcctatggggaaatttattttttttaatgtcctgttccttaatgctgcaaattatcagtatttataaagtaactgattttgcaccacttttttgttactgtgaccacggcagaacaatgtcttctagactatatctatgtaaagttattagaatggtatctgttcattttagtgatatgaagatcacaactaacaactgacaaatcagagtttgccagttcaaattcagcatggctgcagctgattaagaaattgatatgattattctttgctagcctctcttactaatggaattatatactggccagtaaaatgggcctcccaattgctgtttcagcaggttttaaaccttcaggaacaccagttaggaaaatagctccagaaaatatagatatattttatttttattaaaatggcagtctacatcataattggcatttctcaagactgtctttaccagaatctgtgtgaaataaggcaatctagtctccttgaaaaaaaaatctcttggatgtttaggaaggaagacttggccgtgatgtggtgtcctggctttgtggtgtagtgctgtgtgtatggagttagtgtaaaaacatggattacaccaagtggaagaaacgtcttcttgccaagctcattcttagaacttacacatctagaacagcttccactttggcagtgaggtcgtagccttttaggtggaagaagtgagggtgcagcgtgtcagacacaacattcatgttactcttacattggaatctgaaggtagttcagacttcgtgggttttgtttttaagcaaaacaatgtgaaaacatttaagtttgaaatgttgcatttgaagttatgatcatttaatatattcatattaccaagactattatactggaagtggtttttgtgttataaaggtttaattttacataaggcagttacttaatgtgatttttaacccttaaaaaagtggagatgtatacatttgttaacaatgccatgaaagcattttctttctcctaaggaaaagtgaatttcttatcagaatatctggctggccctgtaatttaaattaaaataaaattttggagaaacaaaaaaaaaaaaaaaaaaaaaaaaaaaaaaaaaaaaaaaaaaaa

SEQ ID NO: 933 - DNA, 980 bp, human
aattcggcacagggttgtcattgtccctccgctgtcaccttttcaagccccaggctggctgcttcagaagcccctgaccccatggaggagtgggacgtgccacagatgaagaaagaggtggagagccttaagtaccagctggccttccagcgggagatggcgtccaagaccatccccgagctgctgaagtggatcgaggacgggatccccaaggaccccttcctgaaccccgacctgatgaagaacaacccatgggtggaaaagggcaaatgcaccatcctgtgagccccgcacccggcccctctcacaccatcctgtgagaccacgcccggccccactcccaccatcttgtaagactgtgcccagccccactcactccatcctgtgagtcccactcccagccccactcccaccatcctgtgagcccatgcccggccccactcacaccaacctgtgagccccactcccggccccactcactccatcttgtaagactatgcccagccccattcactccatcctgtgagtcccactcccagccccactcccaccatcctgtgagccccacttccagccccactcccaccatcctgtgagccccactcccagccccactcccaccatcctgtgagccccactcccggccccactcactccatcctgtgagccccactcccagccccactcacaccaacctgtgagccccactcccggccccactcacaacatcttgtaagactgtgcccggccccattcactccatcctgtgagaccacgcccggccccactcactctatcctgtgagaccacgcctggccccactcccaccatcctgtgagccccactcctggccccactcacaccatcctatgagcccacgcccggccccactcccaccatcctgtgaaccccactccactcgcacgtgattacagtctgtaaaggtgtgactttataaagacaaaaaaaaaaaaaaaaaa

SEQ ID NO: 934 - DNA, 4266 bp, human
ccgggctgtgagtctctcgccgccggaggaagatgaggctgaagattgggttcatcttacgcagtttgctggtggtgggaagcttcctggggctagtggtcctctggtcttccctgaccccgcggccggacgacccaagcccgctgagcaggatgagggaagacagagatgtcaatgaccccatgcccaaccgaggcggcaatggactagctcctggggaggacagattcaaacctgtggtaccatggcctcatgttgaaggagtagaagtggacttagagtctattagaagaataaacaaggccaaaaatgaacaagagcaccatgctggaggagattcccagaaagatatcatgcagaggcagtatctcacatttaagcctcagacattcacctaccatgatcctgtgcttcgcccagggatcctcggtaactttgaacccaaagaacctgagcctcctggagtggttggtggccctggagagaaagccaagccattggttttgggaccagaattcaaacaagcaattcaagccagcattaaagagtttggatttaacatggtggcaagtgacatgatctcactggaccgcaacgtcaatgacttacgccaagaagaatgcaagtattggcattatgatgaaaacttgctcacttcgagcgttgtcattgtcttccataatgaaggatggtcaaccctcatgagaacagtccacagtgtaattaaaaggactccaaggaaatatttagcagaaattgtgttaattgacgatttcagtaataaagaacacttaaaagaaaaactggatgaatatattaagctgtggaatggcctagtgaaggtatttcgaaatgaaagaagggaaggtttaattcaagcacgaagtattggtgctcagaaggctaaacttggacaggttttgatataccttgatgcccactgtgaagtggcagttaactggtatgcaccacttgtagctcccatatctaaggacagaaccatttgcactgtgccgcttatagatgtcataaatggcaacacatatgaaattataccccaagggggtggtgatgaagatgggtatgcccgaggagcatgggattggagtatgctctggaaacgggtgcctctgacccctcaagagaagagactgagaaaaacaaaaactgaaccgtatcggtccccagccatggctgggggattatgtgccattgaacgagagttcttctttgaattgggtctctatgatccaagtctccagatttggggtggtgaaaactttgagatctcatacaagatatggcagtgtggtggcaaattattatttgttccttgttctcgtgttggacatatctaccgtcttgagggctggcaaggaaatcctccgcccatttatgttgggtcttctccaactctgaagaattatgttagagttgtggaggtttggtgggatgaatataaagactacttctatgctagtcgtcctgaatcgcaggcattaccatatggggatatatcggagctgaaaaaatttcgagaagatcacaactgccaaagttttaagtggttcatggaagaaatagcttatgatatcacctcacactaccctttgccacccaaaaatgttgactggggagaaatcagaggcttcgaaactgcttactgcattgatagcatgggaaaaacaaatggaggctttgttgaactaggaccctgccacaggatgggagggaatcagcttttcagaatcaatgaagcaaatcaactcatgcagtatgaccagtgtttgacaaagggagctgatggatcaaaagttatgattacacactgtaatctaaatgaatttaaggaatggcagtacttcaagaacctgcacagatttactcatattccttcaggaaagtgtttagatcgctcagaggtcctgcatcaagtattcatctccaattgtgactccagtaaaacgactcaaaaatgggaaatgaataacatccatagtgtttagagagaaaaaaataaaccaataacctacctactgacaagtaaatttatacaggactgaaaaccgcctggaaacctgctgcaactattgttattaactctgtatagctccaaacctggaacctcctgatcagtttgaaggacattgataaactgtgattttacaataacattatcatctgcagttactgtttacaagactgctttttaccttaaactttgtagatgtttacatcttttttgttgtgttttaaagatgatgttggtaatttgtgccttttagctctgttttattaaacagagttaaagcatgttgtcttctttgggattacactcaggggttctgaaaggcagtttgatttttatttttaacacacttgaaaaaaggttggagtaaccagactttcatatataacttggtgattatcaacctgttgtgtctttatttaattttacatctttttgaagcactgccacaggttattagccaaggtggccttccttcacagtcatgctgcttttttgaaaggtgaatttcaacacatttagtgcctctttcatttctcagtatatatttcaagagcttgtgatgaaatctataggatggtaatgatggacttgtcacctgtatggggaatacttttactactcagaaatgaatttatgtgctgccatttgctataaagttgaactttgtatggcttgaaaaagaaatgaccatatggaacatcccaaggctgtcccataagggttggaagttgtgtagcattcactcccttacctactggcattcccagtgccctctgtccatacctacttctaggattgcaaagggagtcttccaactagaagaaaaattgtccactgacatttgggatttacttttctccaatacctgccaatacagaaaactattatcagttgttattgttatcccttgaaaagcgagggtgacaaaaacaacaaaacaccgttataaacacatcaaaggttcattctgactgaggtaagactttccaagcccttgttagattaggccttataaaacttgtgtgcattataacctaagctgtgcaacctggtgaagccaagagtgaactgatgtttcatttatattttcatccaaatgacattatctgcacgtttttaaaatttaaaaacaaaggactatttaaaaatacagtttattaacaaacgtgaaactactttctgttacattaggtgttccctagtgtttcttaatttctttttagaaagtgtatttttattagtatttttccggtgaacagaagatttgtttggatttaaacatttactaagacagtacctattaggaaaaccaaatattgcaaatggtcaattcgattttaatttctcaaaagatactctgttatccagaagattaaaatgcctacattgagtgcttaaaaaaaaaaacaactgtgatgatgtgagcagaatggcaagtaagttaagcatttttgatcctgtaatcatggtatcattacaatgaaaggaattcacaaactactgccagaggaagtttgttttttaatttaagagggaaatataacctataaatttgtttcttccaagcttagctcttaaatttgggagactcaaagttaaacatcctcaacagagttttatttataattttgaattgtcaatttgtattttgctactgatctgtgatcaaccattttaactttcatctctagggatgtttaacatttataattgcaaaataaaccaactataaaaaaagaaactaagagagaattggtactttaattacttgtgtgtttgcaaataggctccattttccatgttgagtagattataaccttattaactaggcataggcctaagaaaggtggcaatgaactgtgcatgtaaattttaaatgggtactttgtgcaattcgttaaaagaagatactctatgaatatgattctatatattgaaatcagaaaacctaccaaacaaaaacatcagaagctgctgccataatgactattttctactgtaggctgctttggaaataattcccatatccttgctttgtaagttggtaatatcactatgcatttctacacattttataaatttgatttatgcagattttgatacactgtatgtttctgtagaaattgtataaatattcaaaattttattaggataaatttgagaaacttacgtatatcttaattctgggttgcttgttttttaggtgacaaaaataaaatattgtattttaattc

SEQ ID NO: 935 - DNA, 2525 bp, human
ccgaagtgcattatttcacaatctaaagcttgtatatataatggtagtttgtaaagtgtaccttccccacaggacgctgtgggatgtaaatttgtaggtcgagtttacagctggtttttcttgactgaagctcattcaactggttacttctttgtgggtgtctttaatgaagcttataaatggcaaaaagcaaacattcccatggtttggcatggacatcggtggaacgctggttaaattggtgtatttcgagccgaaggatattacagccgaagaggagcaagaggaagtggagaacctgaagagcatccggaagtatttgacttctaatactgcttatgggaaaactgggatccgagacgtccacctggaactgaaaaacctgaccatgtgtggacgcaaagggaacctgcacttcatccgctttcccagctgtgctatgcacaggttcattcagatgggcagcgagaagaacttctctagccttcacaccaccctctgtgccacaggaggcggggctttcaaattcgaagaggacttcagaatgattgctgacctgcagctgcataaactggatgaactggactgtctgattcagggcctgctttatgtcgactctgttggcttcaacggcaagccagaatgttactattttgaaaatcccacaaatcctgaattgtgtcaaaaaaagccgtactgccttgataacccataccctatgttgctggttaacatgggctcaggtgtcagcattctagccgtgtactccaaggacaactataaaagagttacagggaccagctttggcaacatgatgagtaaagaaaagcgagattccatcagcaaggaagacctcgcccgggccacattggtcaccatcaccaacaacattggctccattgctcggatgtgcgcgttgaatgagaacatagacagagttgtgtttgttggaaattttctcagaatcaatatggtctccatgaagctgctggcatatgccatggatttttggtccaaaggacaactgaaagctctgtttttggaacatgagggttattttggagccgttggggcactgttggaactgttcaaaatgactgatgacaagtagagacgagcagtggaggaaacagcctcccaaaaggacagagaactaaaaaattgctgctggagaaggtgaaagtcgctttgggacggaagccaagccattatggcagatgaacctgctggatttgtaaataatttaaaatccttccagatgatcttttactcttaggttttgagctaatgattcaaaacgggggaatataaaaggttttttttctgtatactgtatttttttaaaaaaatggtgcagcgtggccaaacctaccaattgtatgcattaactttgaaaagttgtttgatgtttaagaaggacctgatatgtaagcgctggtcatttttcttctggggtttactgatcagtgtggtgattttaacttcatttagtaattactctaggagattttaccttgacttatatttttcatgacgtttcatgatttgctgttggtttcaaatgaaactacaaatctggcatgttttactgtgaacacttttgttatttgttttgtacccttttttgtcttgtttttctgttttagttgtcttctgaaaaaagagtcgttccctctgtttctgtcctcagatgatgtccctccccctacctgtaacctttctttgacataattgttcatatcaatgaaggtgctgaccagctcaatacaaagttaagcacaagatctaaagctcttgaaaatgcccgtgaagagaagactgaatgtgttaatgaatttaatgagtctggcaaaagttgcaaattatatgcaagtttgtcctatcgcttataaatgtagtgtttcattggatttattttatgctaggttatattaagttgaaatagtctgtgattaaatgtcctcatccatgcacagaatatgaatggcagcaaatctttgtgcaagaaatttgaaacttattgggaaaagcctcccagtagattaattgttcatatcaggagatttagggtaagtcatgggttgaggtgtcagatagtaatatctatttgttttgtacatgtatatatctaggaactttgtaacaacacatctttaataatgttaaaggttttttcatttttaatattttaaactaaaaactgtacttcaatctcagtttctaaaattaaaaataatttatactgatctatatattttttctttttgaaagatttcattaagactgatgggtaactttcaaatgagggtcatgtacaaatattgggatgcatgagatcccatgatcttgtgtattgagcttattgttgaaagggatttttgaaggacagaacaattactccatgatgaatcttcctttctctgccttctgagcaccgtctttaatttccatatcttcaagtcttgaagaagttgatgttaattgaagaattcacttgtctggttgaaataaagcctgtttctgtt

SEQ ID NO: 936 - DNA, 2358 bp, human
ggcctcttaggctaggtcagaaaggaggcggaactcggtgatctgactggcggtttcccggccggactgagaaggggagcgcgctgcgcgtcgcaggagtaacctacttggtctcctgctttcgcgacatggccttcaattttggggctccctcgggcacctccggtaccgctgcagccaccgcggcccccgcgggtgggtttggaggatttgggacaacatctacaactgcaggttctgcattcagcttttctgccccaactaacacaggcactactggactctttggtggtactcagaacaaaggttttggatttggtactggttttggcacaacaacgggaactagtactggtttaggtactggtttgggaactggactgggatttggaggatttaatacacagcagcagcagcaaactacattaggtggtctcttcagtcagcctacacaagctcctacccagtccaaccagctgataaatactgcgagtgctctttctgctccaacgctgttgggagatgagagagatgctattttggcaaaatggaatcaactgcaggccttttggggaacaggaaaagggtatttcaacaataatattccgccagtggaattcacacaagaaaatcccttttgccgatttaaggcagtaggttatagttgcatgcccagtaataaagatgaagatgggctagtggttttagttttcaacaaaaaagaaacagagattcgaagccaacaacaacagttggtagaatcattgcataaagttttgggaggaaaccagacccttactgtaaatgtagagggcactaaaacattgccagatgatcagacagaagttgttatttatgttgttgagcgttcgccaaatggtacttcaagaagagttccagctacaacgctatatgcccattttgaacaagccaatataaaaacacaattgcagcaacttggtgtaaccctttctatgactagaacagaactttctcctgcacagatcaaacagcttttacagaatcctcctgctggtgttgatcctattatctgggaacaggccaaggtagataaccctgattctgaaaagttaattcctgtaccaatggtgggttttaaggaacttctccgaagactgaaggttcaagatcagatgactaagcagcatcaaaccagattagatatcatatctgaagatattagtgagctacaaaagaatcaaactacatctgtagccaaaattgcacaatacaagaggaaactcatggatctttcccatagaactttacaggtcctaatcaaacaggaaattcaaaggaagagtggttatgccattcaggctgatgaagagcagttgcgagttcagctggatacgattcagggtgaactaaatgcacctactcagttcaagggccgactaaatgaattgatgtctcaaatcaggatgcagaatcattttggagcagtcagatctgaagaaaggtattacatagatgcagatctgttacgagaaatcaagcagcatttgaaacaacaacaggaaggccttagccatttgattagcatcattaaagacgatctagaagatataaagctggtcgaacatggattgaatgaaaccatccacatcagaggtggtgtctttagttgacagttcacaaacttgtgtaaaggtttgtgaaatgcatcttcttactgcatcagaccttccttaagaatgaaaccgaccacatggagggaaaaagaaaacaattctttcttggattggttttttgagaagtttactgacaaattactgttcatcaaatctgaaatagtcacctcacagctcttcaaagaaaacctttgaaagatttatatctaaaagctgtatttactttaaaagaagtgcataattaccaaaattgtatgtactattgtacatttttacaacagcattttcttaaacataatctgtgtttaatgattattgtccattgagcctgtactctgctttccataccaagtaaatatgaaataatctactttgcacataacagaacaaactataattacttggctgttggagatttgtacttgagtataaatgtacaccagtttttgtatttgtgaactcatctgtgggaggagtaaagaaaatccaaaagcatttaatgttttgtttttgttctataaagatatgaaaatgtatttttatattattttacttatttggaatttacagagcacacctaagcaattaggatataacaaaactacttaaccatttttgcaaccattttgttttttaagcctttttatttctaaaaagatgaaaacttataaataaattcttaatttgtaattacttttaaaaa

SEQ ID NO: 937 - DNA, 1170 bp, human
agagtagaggcggcggcggcggcggccggacccagactggtagtgaggctttggaccccgagccgctgcaatgccgctggagctggagctgtgtcccgggcgctgggtgggcgggcaacacccgtgcttcatcattgccgagatcggccagaaccaccagggcgacctggacgtagccaagcgcatgatccgcatggccaaggagtgtggggctgattgtgctaagttccagaagagtgagctagaattcaagtttaatcggaaagccttggagaggccatacacctcgaagcattcctgggggaagacgtacggggagcacaaacgacatctggagttcagccatgaccagtacagggagctgcagaggtacgccgaggaggttgggatcttcttcactgcctctggcatggatgagatggcagttgaattcctgcatgaactgaatgttccatttttcaaagttggatctggagacactaataattttccttatctggaaaagacagccaaaaaaggtcgcccaatggtgatctccagtgggatgcagtcaatggacaccatgaagcaagtttatcagatcgtgaagcccctcaaccccaacttctgcttcttgcagtgtaccagcgcatacccgctccagcctgaggacgtcaacctgcgggtcatctcggaatatcagaagctctttcctgacattcccatagggtattctgggcatgaaacaggcatagcgatatctgtggccgcagtggctctgggggccaaggtgttggaacgtcacataactttggacaagacctggaaggggagtgaccactcggcctcgctggagcctggagaactggccgagctggtgcggtcagtgcgtcttgtggagcgtgccctgggctccccaaccaagcagctgctgccctgtgagatggcctgcaatgagaagctgggcaagtctgtggtggccaaagtgaaaattccggaaggcaccattctaacaatggacatgctcaccgtgaaggtgggtgagcccaaaggctatcctcctgaagacatctttaatctagtgggcaagaaggtcctggtcactgttgaagaggatgacaccatcatggaagaattggtagataatcatggcaaaaaaatcaagtcttaaaaataaagtgccattctctg

SEQ ID NO: 938 - DNA, 5518 bp, human
agggcgcgggagcgcggagcgagtttggttgcacttacaccggtacttaagcgcggaccggcgtgtccttggacttagagagtggggacgtccggcttcggagcgggagtgttcgttgtgccagcgactaaaaagagaattaaatatgggtgatgttgagaaaggcaagaagatttttattatgaagtgttcccagtgccacaccgttgaaaagggaggcaagcacaagactgggccaaatctccatggtctctttgggcggaagacaggtcaggcccctggatactcttacacagccgccaataagaacaaaggcatcatctggggagaggatacactgatggagtatttggagaatcccaagaagtacatccctggaacaaaaatgatctttgtcggcattaagaagaaggaagaaagggcagacttaatagcttatctcaaaaaagctactaatgagtaataattggccactgccttatttattacaaaacagaaatgtctcatgacttttttatgtgtaccatcctttaatagatctcatacaccagaattcagatcatgaatgactgacagaatattttgttgggcagtcctgatttaaaactaagactggcttgtggttaaatgaatatgttcagtttttgaattttaatagtaactccaattcagtaaatggtatcactgtttaccccttttaaagatatgattagacttcgttagtaatgttcaacttttcacaaagatggtgagtgccatcttaaaacttactggagattggttttatatttagatttatataactggttatgtgaatatatttaaatactggggaaattgcttcactgtcttagaaccaagcaagattcacctgtgttttgtgttcatgttcatttgcctcttaaaggcaagggttgaagataaataaggtagcaatgtctatagttttggccttaactatgccaatctaattataattccctgtatttaaaatggtttcttttacttattgaaaggcattttagtgtggtttatgtgtaatattaaagattattcaacacctctcacatcttacagatctataaggtcacatgcttttaaaatagtagcaagttaaacttcactcttgaattctttacaatctaagtcaaactaagttataatttaggattgtctttaaacagccattcagaaacaaaactgtagaactgtgtatttgattgggaatggtgcttttgccaacttaaaaggattaaagtaacggagatatacacaaattttaaaattatgtgtgatcacaagactaaagataattaaaaagaaaaccacagatcatgactttttgactgtgcttgatttcatgactgatgcacaaattttaatgattaaaaagtgcaggagccctaaatgtcagtgcagcagccctaaatgtcagtgcagcagtgttaaccagtcatggtgctagattgtttacttggttttctaggactgcctcaactagaataacacttcactaattgactcttagtttctttgctcagattgagaactgcagcatttatgccagacatggacagaggaatgcctgtggtcatagttttgtgatgtgtaacagtgtataattacatactgaattatttcatgcatagtctgtgccatacacatttagagtagtccttggagattttatggagatggtgagcacaaggtaagtcataaagaataatgagaaaataaatctatgctggtgcagctgagaactgtatctttgtgggacagtgagaagactgagaagatgtgaatccatggtctcaaaggtgatagggacgattagataggtgttttaaggcctgaaagcaatttataacatatgagtcttatttttatttatagaaatgtggaaagcttgctgtaattcatatttgaagtcctagtctgagttctggtggggaatttaaaaatgcatcctggaaatcctttaaagatttcagactttgaaaggccttgtagcagaggacttggtgactgtataaagttagtggtattcagggacagtgtagcaagtagcttacaaggggacaattctggactaatgagaaagacctgaagtgaaggctagagagttgattttttttttttttggcatcctggaaatgatacaggaaacatattaagatagatacagaaatgtgttcaaccttccatcttggctagttgtggcgtttagtttgttttttgagacatggtcacgctgtgtcgccaaggctggagtgcagtggtgcgatctcggctggctgcaacctctatttcccaggctcaagcgattctctcacttcagcttcccaagtagctgggactacaggtgttcgccaccatgcccagctaatttttttgtagagatggagttttgccatgtggtcccaggctggtctcaaactcctgagctcaagcaatccgtccacttgccttggctccccaaagtgctgggattacaggcgtgagccaccaggccctgcctggttttcaaattcagaaatcttattatttaacccagaagtaatcagcccagtagtaacttaggtttaattttttttcaggtttaaaatttttctcatttattttttctgagacggagtttcgcccttttcgcccaggctgagtacagtggtgcaatctcactgcaacctccgccttccagttgcaagtgattctcctgcctcagcctcctgagtagctgggattacaggcacccgccaccacgcctggctaatttttgtatttttagtggagatggtgtttcaccatgttggccagactggtcttggactcctgacctcgtgatccacccaccttggcctcccaaagttctaggattacaggtgtgagccaccacgtccggccaatttttctcatttctatgcctcctatattaaggtctgtgttggcacagatgagtaactgccatgttctaggtcagttatacccaagcacttctggtggtttaaaatgtgattctgtaacttttttatttttatttttttgagataatttcactcttgttgcccaggctggagtgcaatggcgtgatcgctgctcaccgcaacctccgccttccaggttcaagcgattctcctgactcagcctctcaagtagctgggattacaagcatgcgccaccatgcccagcttattttgtgtttttagtagagacagggtttctccatgctggacaggctggtcttgaactcccgacgtcgggtgatctgcctgcctcggcctcccaaagtgctgggattacaggcgtgagccaccacgcctggccaattatgtaattttttaaaaaggacatttctatcagggatatataccttcagaaataaggaaataggggaaaaaaagagcactataaaccacatgttttcatttctagtgcttcgctgtaagtggctaggttggtagaatcaaaaacaagggccagatgtatttaaggggtattcagatgccacctacatgcttattttgtctagaacagtgctgtctaatagaactttctgtgacgatggatattttgtagacttttgctgtccagtgtggtagccactaaccacatgtggctgttaagcccttgaaatatagctagtgtgactagaaagtattttattttaaatttacataggcacaagtggctagtggctactgtattgacattctgggtctaggactagaaccagtggtctgtaacaaaagtactttctctttactctattaaatctagaattagccgggcatggtcgctcatgcctgtaatcccagcactttgggaggccaaggcaggcagatcacttgaggtcaggcgtttgagaccagcctggtcaacatggcgaaaccctgtctctacaaaaaacataaaagttagccaggtgtggtggtgggcacctgtaatctcagctacttgggaggctgaggcacaagaatcacttgaacttgggaggtggaggttgcagtgagccaagattgtgccactgcactcaagcctgggtgacgagtgaaactgtctccaaaaaaaaaaaaaaatctagaattcttggaagtacattatattgcccttcagaatagattccagttcctgttgtgctcacctttataattttaccataagttttacctattcgtaagttggcagttttagatagataacattctggtggtagctagggatttaccttttgtcatccttttcctgcacttctcttgaattcctttatagatgtacagttttgctttaaccactgaagattgctgtaaattataaagggtgtgatagaatccacatggctgtcaagaaggagatcttaccaaggacagttgactgactagtctcagattgtttcatatcatttatacttgggtaagagtaaactagataactgggcgtcgtggtgcacacctgtagtcccagccactctgaggcaggaggactgcttgtgcccagaagttcgaggctgcagtgtagctgtgattgtgctactgcactccagcctgggcaacagataaaggaaactccatctcttttaaaaaaaaaaaaagtggtctgggtgcagtaggtcatgcctgcaatcccagcactttgggaggccaaggcaggcagatcacctgaggtcaggagcttgagaccagcctggccaacatggtgaaaccccatctctaccaaaaatataaaaactagctgggcgtggtggcggcacctgtaattgcagctatttgagaggctgaggcaggagaatcgcttgaacctgggagatgggggttgcagtgagccaagaccgccccatcgcactccagcctgggcaacaatagtgaaactccgtctcaaaaagaaaaaaagtttccttagaatggaaaatattcattcatgagctcttttggcaatccgtcatcagtatattctgaaaaccaataagatgttgccaagttgggggcgagagctatgtaatgcaaggcatatgcctgatgaagtatacaaatacacctgaccagaaactttgtctcccacataagtctcttctaggcactgtcggggtacatactgagctgctgctttggctgtattttctgtgcctcagaataaccattgtcctggtgttcatatccttagagttcagtacaaaatgttggatatccatttaataggttccaggttatcttagttggagtttggggtatttgaaaacgtcatgccttcaggctatcatttccctcagaaagctaagtaaatttactgcattcatttctcaaagagtaaaagtgcaggttgtatgtgtctatgaacatttaaacatgttaaaatgttaaatttaacattttaaatttaaacatttaaatatgtctgtaacttgaacagtgtagtttcagaaaggaccactgggctagtgtaatgcagaaaatgctgggtctaggattaggagaaaattgtgtttagtgtgtatcaataaacagcccgtggacccaaaaaaaaaaaa

SEQ ID NO: 939 - DNA, 1746 bp, human
ctgggatagcaataacctgtgaaaatgctcccccggctaatttgtatcaatgattatgaacaacatgctaaatcagtacttccaaagtctatatatgactattacaggtctggggcaaatgatgaagaaactttggctgataatattgcagcattttccagatggaagctgtatccaaggatgctccggaatgttgctgaaacagatctgtcgacttctgttttaggacagagggtcagcatgccaatatgtgtgggggctacggccatgcagcgcatggctcatgtggacggcgagcttgccactgtgagagcctgtcagtccctgggaacgggcatgatgttgagttcctgggccacctcctcaattgaagaagtggcggaagctggtcctgaggcacttcgttggctgcaactgtatatctacaaggaccgagaagtcaccaagaagctagtgcggcaggcagagaagatgggctacaaggccatatttgtgacagtggacacaccttacctgggcaaccgtctggatgatgtgcgtaacagattcaaactgccgccacaactcaggatgaaaaattttgaaaccagtactttatcattttctcctgaggaaaattttggagacgacagtggacttgctgcatatgtggctaaagcaatagacccatctatcagctgggaagatatcaaatggctgagaagactgacatcattgccaattgttgcaaagggcattttgagaggtgatgatgccagggaggctgttaaacatggcttgaatgggatcttggtgtcgaatcatggggctcgacaactcgatggggtgccagccactattgatgttctgccagaaattgtggaggctgtggaagggaaggtggaagtcttcctggacgggggtgtgcggaaaggcactgatgttctgaaagctctggctcttggcgccaaggctgtgtttgtggggagaccaatcgtttggggcttagctttccagggggagaaaggtgttcaagatgtcctcgagatactaaaggaagaattccggttggccatggctctgagtgggtgccagaatgtgaaagtcatcgacaagacattggtgaggaaaaatcctttggccgtttccaagatctgacagtgcacaatattttcccatctgtattattttttttcagcatgtattacttgacaaagagacactgtgcagagggtgaccacagtctgtaattccccacttcaatacaaagggtgtcgttcttttccaacaaaatagcaatcccttttatttcattgcttttgacttttcaatgggtgtcctaggaaccttttagaaagaaatggactttcatcctggaaatatattaactgttaaaaagaaaacattgaaaatgtgtttagacaacgtcatcccctggcaggctaaagtgctgtatcctttagtaaaattggaggtagcaaacactaaggtgaaaagataatgatctcattgtttattaacctgtattctgtttacatgtctttaaaacagtggttcttaaattgtaagctcaggttcaaagtgttggtaatgcctgattcacaactttgagaaggtagcactggagagaattggaatgggtggcggtaattggtgatacttctttgaatgtagatttccaatcacatctttagtgtctgaatatatccaaatgttttaggatgtatgttacttcttagagagaaataaagcatttttgggaagaat

SEQ ID NO: 940 - DNA, 1273 bp, human
ccgctgttatacgtcacttccacggctcagcgtcagggcaagttggcctctctgttgtaaattagtggttaaggttatctattattgccacttttccagcgctaaaggctgttttggaaccagtgttgcttgttccgcgggtgattggcttttttttttggcaaaccagttattcaagtttctggtctttaaaaaactctgtggcggtacggtaaccgaggaggttccagcgcggcggaagtaccccgcgggtgggtgtgtgcgcaaggccagggccagaggggcacgtggcgccgggaggagaaagaatgtcttttcgaggcggaggtcgtggaggctttaatcgaggtggtggaggtggcggcttcaaccgaggcggcagcagcaaccacttccgaggtggaggcggcggtggaggcggcggcaatttcagaggcggcggcaggggaggatttggacgagggggtggccgcggaggctttaacaaaggccaagaccaaggacctccagaacgtgtagtcttattaggagagttcctgcatccctgtgaagatgacatagtttgtaaatgtaccacagatgaaaataaggtgccttatttcaatgctcctgtttacttagaaaacaaagaacaaattggaaaagtggatgaaatatttggacaactcagagatttttatttttcagttaagttgtcagaaaacatgaaggcttcatcctttaaaaaactacagaagttttatatagacccatataagctgctgccactgcagaggtttttacctcgacctccaggtgagaaaggacctccaagaggtggtggcaggggaggccgaggaggaggaagaggaggaggtggcagaggtggtggcagaggcggtggttttagaggtggaagaggaggtggaggtgggggcttcagaggaggaagaggtggtggtttcagagggagaggacattaagtgaaacagttgacagacatcaccagttgacttctgcattaacctgcatgatctgtttctactatggattggaaacttgtttcttgaacaagtcttgaagatcttggtcattttatgacaatggatctaaaatgtcagcatcatgcaaagtgcaacggaatagtgaattttgctctaaaagagcatgaacaagtctttctaatgttttgtacagtgcctggcactctgggtgctcaataaatggataggagttttcatttgaaggatatttgaatttttaaaataaagtgttttattcccttaaaaaaaaa

SEQ ID NO: 941 - DNA, 4725 bp, human
caattcggcctcgctccttgtgattgcgctaaaccttccgtcctcagctgagaacgctccaccacctccccggatcgctcatctcttggctgccctcccactgttcctgatgttattttactccccgtatcccctactcgttcttcacaattctgtaggtgagtggttccagctggtgcctggcctgtgtctcttggatgccctgtggcttcagtccgtctcctgttgcccaccacctcgtccctgggccgcctgataccccagcccaacagctaaggtgtggatggacagtagggggctggcttctctcactggtcaggggtcttctcccctgtctgcctcccggagctaggactgcagaggggcctatcatggtgcttgcaggccccctggctgtctcgctgttgctgcccagcctcacactgctggtgtcccacctctccagctcccaggatgtctccagtgagcccagcagtgagcagcagctgtgcgcccttagcaagcaccccaccgtggcctttgaagacctgcagccgtgggtctctaacttcacctaccctggagcccgggatttctcccagctggctttggacccctccgggaaccagctcatcgtgggagccaggaactacctcttcagactcagccttgccaatgtctctcttcttcaggccacagagtgggcctccagtgaggacacgcgccgctcctgccaaagcaaagggaagactgaggaggagtgtcagaactacgtgcgagtcctgatcgtcgccggccggaaggtgttcatgtgtggaaccaatgccttttcccccatgtgcaccagcagacaggtggggaacctcagccggactattgagaagatcaatggtgtggcccgctgcccctatgacccacgccacaactccacagctgtcatctcctcccagggggagctctatgcagccacggtcatcgacttctcaggtcgggaccctgccatctaccgcagcctgggcagtgggccaccgcttcgcactgcccaatataactccaagtggcttaatgagccaaacttcgtggcagcctatgatattgggctgtttgcatacttcttcctgcgggagaacgcagtggagcacgactgtggacgcaccgtgtactctcgcgtggcccgcgtgtgcaagaatgacgtggggggccgattcctgctggaggacacatggaccacattcatgaaggcccggctcaactgctcccgcccgggcgaggtccccttctactataacgagctgcagagtgccttccacttgccggagcaggacctcatctatggagttttcacaaccaacgtaaacagcatcgcggcttctgctgtctgcgccttcaacctcagtgctatctcccaggctttcaatggcccatttcgctaccaggagaaccccagggctgcctggctccccatagccaaccccatccccaatttccagtgtggcaccctgcctgagaccggtcccaacgagaacctgacggagcgcagcctgcaggacgcgcagcgcctcttcctgatgagcgaggccgtgcagccggtgacacccgagccctgtgtcacccaggacagcgtgcgcttctcacacctcgtggtggacctggtgcaggctaaagacacgctctaccatgtactctacattggcaccgagtcgggcaccatcctgaaggcgctgtccacggcgagccgcagcctccacggctgctacctggaggagctgcacgtgctgccccccgggcgccgcgagcccctgcgcagcctgcgcatcctgcacagcgcccgcgcgctcttcgtggggctgagagacggcgtcctgcgggtcccactggagaggtgcgccgcctaccgcagccagggggcatgcctgggggcccgggacccgtactgtggctgggacgggaagcagcaacgttgcagcacactcgaggacagctccaacatgagcctctggacccagaacatcaccgcctgtcctgtgcggaatgtgacacgggatgggggcttcggcccatggtcaccatggcaaccatgtgagcacttggatggggacaactcaggctcttgcctgtgtcgagctcgatcctgtgattcccctcgaccccgctgtgggggccttgactgcctggggccagccatccacatcgccaactgctccaggaatggggcgtggaccccgtggtcatcgtgggcgctgtgcagcacgtcctgtggcatcggcttccaggtccgccagcgaagttgcagcaaccctgctccccgccacgggggccgcatcttcgtgggcaagagccgggaggaacggttctgtaatgagaacacgccttgcccggtgcccatcttctgggcttcctggggctcctggagcaagtgcagcagcaactgtggagggggcatgcagtcgcggcgtcgggcctgcgagaacggcaactcctgcctgggctgcggcgagttcaagacgtgcaaccccgagggctgccccgaagtgcggcgcaacaccccctggacgccgtggctgcccgtgaacgtgacgcagggcggggcacggcaggagcagcggttccgcttcacctgccgcgcgccccttgcagacccgcacggcctgcagttcggcaggagaaggaccgagacgaggacctgtcccgcggacggctccggctcctgcgacaccgacgccctggtggaggtcctcctgcgcagcgggagcacctccccgcacacggtgagcgggggctgggccgcctggggcccgtggtcgtcctgctcccgggactgcgagctgggcttccgcgtccgcaagagaacgtgcactaacccggagccccgcaacgggggcctgccctgcgtgggcgatgctgccgagtaccaggactgcaacccccaggcttgcccagttcggggtgcttggtcctgctggacctcatggtctccatgctcagcttcctgtggtgggggtcactatcaacgcacccgttcctgcaccagccccgcaccctccccaggtgaggacatctgtctcgggctgcacacggaggaggcactatgtgccacacaggcctgcccaggctggtcgccctggtctgagtggagtaagtgcactgacgacggagcccagagccgaagccggcactgtgaggagctcctcccagggtccagcgcctgtgctggaaacagcagccagagccgcccctgcccctacagcgagattcccgtcatcctgccagcctccagcatggaggaggccaccgactgtgcaggtaaaagaaaccggacctacctcatgctgcggtcctcccagccctccagcaccccactccaaagtctggactctttccacatcctgctccagacagccaagctttgttggggtccccactgctttgagatgggttcaatctcatccacttggtggccacgggcatctcctgcttcttgggctctgggctcctgaccctagcagtgtacctgtcttgccagcactgccagcgtcagtcccaggagtccacactggtccatcctgccacccccaaccatttgcactacaagggcggaggcaccccgaagaatgaaaagtacacacccatggaattcaagaccctgaacaagaataacttgatccctgatgacagagccaacttctacccattgcagcagaccaatgtgtacacgactacttactacccaagccccctgaacaaacacagcttccggcccgaggcctcacctggacaacggtgcttccccaacagctgataccgccgtcctggggacttgggcttcttgccttcataaggcacagagcagatggagatgggacagtggagccagtttggttttctccctctgcactaggccaagaacttgctgccttgcctgtggggggtcccatccggcttcagagagctctggctggcattgaccatgggggaaagggctggtttcaggctgacatatggccgcaggtccagttcagcccaggtctctcatggttatcttccaacccactgtcacgctgacactatgctgccatgcctgggctgtggacctactgggcatttgaggaattggagaatggagatggcaagagggcaggcttttaagtttgggttggagacaacttcctgtggcccccacaagctgagtctggccttctccagctggccccaaaaaaggcctttgctacatcctgattatctctgaaagtaatcaatcaagtggctccagtagctctggattttctgccagggctgggccattgtggtgctgccccagtatgacatgggaccaaggccagcgcaggttatccacctctgcctggaagtctatactctacccagggcatccctctggtcagaggcagtgagtactgggaactggaggctgacctgtgcttagaagtcctttaatctgggctggtacaggcctcagccttgccctcaatgcacgaaaggtggcccaggagagaggatcaatgccataggaggcagaagtctggcctctgtgcctctatggagactatcttccagttgctgctcaacagagttgttggctgagacctgcttgggagtctctgctggcccttcatctgttcaggaacacacacacacacacactcacacacgcacacacaatcacaatttgctacagcaacaaaaaagacattgggctgtggcattattaattaaagatgatatccagtc

SEQ ID NO: 942 - DNA, 1772 bp, human
agcgctgcaaggacaaccggctggggtccttgcgcgccgcggctcagggaggagcaccgactgcgccgcgtaagtgccgcctgccctgcgtgggtcgtgccagctcagcgggacaggtcctcgcctcggtccctcggacttagggagcgcggggcagaccctgagagatggttggtgccatgtggaaggtgattgtttcgctggtcctgttgatgcctggcccctgtgatgggctgtttcgctccctatacagaagtgtttccatgccacctaagggagactcaggacagccattatttctcaccccttacattgaagctgggaagatccaaaaaggaagagaattgagtttggtcggccctttcccaggactgaacatgaagagttatgccggcttcctcaccgtgaataagacttacaacagcaacctcttcttctggttcttcccagctcagatacagccagaagatgccccagtagttctctggctacagggtgggccgggaggttcatccatgtttggactctttgtggaacatgggccttatgttgtcacaagtaacatgaccttgcgtgacagagacttcccctggaccacaacgctctccatgctttacattgacaatccagtgggcacaggcttcagttttactgatgatacccacggatatgcagtcaatgaggacgatgtagcacgggatttatacagtgcactaattcagtttttccagatatttcctgaatataaaaataatgacttttatgtcactggggagtcttatgcagggaaatatgtgccagccattgcacacctcatccattccctcaaccctgtgagagaggtgaagatcaacctgaacggaattgctattggagatggatattctgatcccgaatcaattatagggggctatgcagaattcctgtaccaaattggcttgttggatgagaagcaaaaaaagtacttccagaagcagtgccatgaatgcatagaacacatcaggaagcagaactggtttgaggcctttgaaatactggataaactactagatggcgacttaacaagtgatccttcttacttccagaatgttacaggatgtagtaattactataactttttgcggtgcacggaacctgaggatcagctttactatgtgaaatttttgtcactcccagaggtgagacaagccatccacgtggggaatcagacttttaatgatggaactatagttgaaaagtacttgcgagaagatacagtacagtcagttaagccatggttaactgaaatcatgaataattataaggttctgatctacaatggccaactggacatcatcgtggcagctgccctgacagagcgctccttgatgggcatggactggaaaggatcccaggaatacaagaaggcagaaaaaaaagtttggaagatctttaaatctgacagtgaagtggctggttacatccggcaagtgggtgacttccatcaggtaattattcgaggtggaggacatattttaccctatgaccagcctctgagagcttttgacatgattaatcgattcatttatggaaaaggatgggatccttatgttggataaactaccttcccaaaagagaacatcagaggttttcattgctgaaaagaaaatcgtaaaaacagaaaatgtcataggaataaaaaaattatcttttcatatctgcaagatttttttcatcaataaaaattatccttgaaaaaaaaaaaaaaaaaaaaaaaaaaaaaaaaaaaaaaa

SEQ ID NO: 943 - DNA, 953 bp, human
cttttttaagatgaaagactagcgggaagctctgcctctttccccagtgggcgagggaactcggggcgattggctgggaactgtatccacccaaatgtcaccgatttcttcctatgcaggaaatgagcagacccatcaataagaaatttctcagcctggccgaaaatggttggccccacgaagccacgacaactggaagcaaagagggttgctcaacgccccgcctcattggaaaactgaaatcagatctgggacctatatagcgtggcggaggcggggcgatgattgtcgcgctcgcacccactgcagctgcgcacagtcgcatttctttccccgcccctgagaccctgcagcaccatctgtcatggcggctgggctgtttggtttgagcgctcgccgtcttttggcggcagcggcgacgcgagggctcccggccgcccgcgtccgctgggaatctagcttctccaggactgtggtcgccccgtccgctgtggcgggaaagcggcccccagaaccgaccacaccgtggcaagaggacccagaacccgaggacgaaaacttgtatgagaagaacccagactcccatggttatgacaaggaccccgttttggacgtctggaacatgcgacttgtcttcttctttggcgtctccatcatcctggtccttggcagcacctttgtggcctatctgcctgactacaggtgcacagggtgtccaagagcgtgggatgggatgaaagagtggtcccgccgcgaagctgagaggcttgtgaaataccgagaggccaatggccttcccatcatggaatccaactgcttcgaccccagcaagatccagctgccagaggatgagtgaccagttgctaagtggggctcaagaagcaccgccttccccaccccctgcctgccattctgacctcttctcagagcacctaattaaaggggctgaaagt

SEQ ID NO: 944 - DNA, 2996 bp, human
ggggaggggccgggcggggggctggcggcagcggcggatggactcgcgggtatcggagctgttcggcggctgctgccggcccggagggggcccggccgtgggcggaaccctcaaggctaggggggccggcagcagcagcggctgcggggggccaaagggaaagaagaagaacggaaggaacagagggggcaaagccaacaaccccccgtatttgccccccgaggctgaagatggaaacattgaatataaattgaagctggtgaatccatcccagtaccgctttgagcacctggtgacacaaatgaagtggcggctccaggagggacgtggtgaggccgtctaccagattggggtagaggacaatgggctgctggtggggctggctgaggaggaaatgcgagcttcgctcaagaccctgcaccggatggcagagaaggttggggcagacataaccgttcttcgagagcgagaagtggattatgatagcgacatgccccggaagatcaccgaggtgctagtacgaaaggtccctgacaaccaacagttcctagacctccgtgtggccgtcctggggaatgtggactctgggaagtcaactctgcttggagtcctgacccagggagagctggacaatgggcggggccgggctcggctcaaccttttccgccacctgcatgagattcagtctggccgaacctccagcatcagcttcgagatcctgggctttaacagcaagggagaggtggtgaattacagcgactcacggacagcagaagagatctgtgagagcagctccaagatgatcaccttcatcgacctggcaggccaccataagtacctacacaccaccatctttggcctcacatcatactgccccgactgcgccctgctcctcgtcagtgccaacactgggattgctggcaccacaagggaacatctggggctggccctggccctgaaagtgcccttcttcatcgtggtcagcaagatcgacctatgtgccaagaccacagtggagaggacagtacgccagctggagcgggtcctcaagcagcctggctgccacaaggtccccatgctggtcacctctgaggatgatgccgtcactgctgcccagcagtttgctcagtcacccaatgtcacccccatcttcacattgtccagtgtgtctggagagagtctggacctcctcaaagtctttctgaatattctgccgccactcaccaacagcaaagagcaggaggaactcatgcagcagctgacggagttccaggtggatgaaatctacacagtaccagaggtggggactgttgttggaggaacactttccagtgggatttgccgtgagggggaccagctggtggtgggccccacggatgatggctgcttcctggagctgagagtatgcagcatccagcgcaaccgctctgcctgtcgtgtgctgcgagctggtcaggctgctacactggcgcttggggactttgaccgtgcactgcttcgcaagggcatggtgatggtgagcccggagatgaatcctaccatctgctcggtgtttgaggcagagatagtcttactgttccatgccaccaccttccgacgaggattccaggtgacagtacacgtgggcaacgtacgtcagacggcagtggtggaaaagatccatgccaaggacaaactgcggacaggcgagaaggcagtggtacgtttccgcttcctgaaacacccagagtacctgaaggtgggcgccaaactgctgttccgggagggtgtcaccaagggcatcggccatgtcactgatgtacaagccattacagcaggagaagcccaggccaacatgggcttctgaacccttcaggcagggacagttctattgctgtccctacaatatataaggtgacttctggccatgctgccctgccattggcggctctgtgtgttaataggctagggagagaggggtgctgtctgccacttgctccctgccaactttctggagaggtgccaaacttggtgtggccaggaaagggcagtcctgagggagaagacaggattcagggcagtgctccgaagctgtgtgctcacctggttggctcatcaaacctggcaaccctgtggcctgtctgccggagctgactggatccactcatcaattcttcgtccccactactaagactgggcatgttttgctggtgtggtctctgcacttcaggaatggtcacaacagggggtagccctcaaaagcactcctttttctatacctcttctcaaggccatgtaagttgcccatctctacctggctgtggacaaaaggttatctgctcttggccatctggtggtggtggcggcccagagtctgaagaaatggcacagggacagtgaatggtagtgttgccaccctgtgctgaggcctgaggcctcttcctcagctttatctccctttccttcactcaagggccatttccccagtccctatctcccccatcccctcccggcttataggccccacaggtgctatttgttgtgctggcccaggcgtggggctaccaagcaaaggcttggcatataccaaaggccagctgcatgcccatcagtctggtctttttcctctgcggtcatgttggctttcatgctggatcaaatgttttactttcccagactggtggcatctgagttccccatcctaccactctcaccccactttcctgccccacctaaaccctcgttttagtaatttgtagtgactgttcccttccctctgttgcagggaaccaggaggaaagggaaagatgttgccatatttcctactctttaggcatggactctcctttccctttgttagtgtcctgggttcccatggactcagggatttgttggctaaggtttctctgtgcatatatatatatatacatatgtatatatatttaaatacacatatatattgtacagaataaaaatgttttattgaatacactgtgcttaaaaaaaaaaaaaaaaaa

SEQ ID NO: 945 - DNA, 3211 bp, human
gggagcgagccggtgctgctgcaggctgaggctgcggcagaggcggcgaggcgcgggcggtgaggacggacagtcaccgacttagtccagttccctgtgatctcaaaacaattgttgcagcaggctcctggcagtctcaagcagttcatcttcttggtgtactggtttcctattgtgattttatcatggaaaatcaattggctaaatcaactgaagaacgaacatttcagtaccaggattctcttccatcactgcctgttccttcacttgaagaatcattaaaaaaataccttgaatcagtgaaaccatttgcaaatcaagaagaatataagaaaactgaagaaatagttcaaaaatttcaaagtgggattggagaaaaattgcaccagaaattgcttgaaagagcaaaaggaaaaagaaattggctggaagagtggtggctgaatgttgcctatctggatgttcgtataccatcacaattgaatgtcaactttgcgggtcctgcagctcattttgaacactactggcctccaaaggaagggactcaattagaaagaggaagtataactctttggcataacttgaactactggcagctattaagaaaagaaaaagtgcctgttcataaagttggaaatactcctctagatatgaatcaattccgaatgctattttctacctgcaaggttccaggaattactagagactccattatgaattattttaggactgagagtgaagggcgttccccaaaccacattgtagtgctgtgtcgaggccgagcttttgtctttgatgtaatacatgaaggatgtttggtcaccccgccagagcttctcagacaactgacatatatccacaagaagtgccatagtgaacctgatggacctgggattgcagcattaactagtgaggagcgaactcgatgggctaaggcacgagaatatctgattggtcttgatccagagaacttggctttgttagaaaaaattcagagtagtttactggtatattccatggaggatagcagtccacatgtaacaccagaggattattctgagattattgcagccatccttattggagatccaacagtacgctggggtgacaaatcctataacttgatttccttttctaatggagtatttggctgtaattgtgatcatgctccttttgatgcaatgattatggtgaacatcagttattatgtggatgagaaaatttttcagaatgaaggaagatggaagggttcagagaaggtacgagatataccacttccagaagagctcattttcattgtggatgagaaagttttaaatgacatcaaccaagctaaagcccagtatctcagggaggcatctgatctacagattgcggcttatgcctttacatcttttggcaaaaagctaaccaagaacaagatgcttcacccggatacgtttattcagcttgcacttcagctggcctattacagacttcatggacaccctggttgttgctatgaaacagctatgacaagacatttttatcatggccgtacagagactatgcgatcatgcacagttgaagcagtgaggtggtgccagtccatgcaggatccttctgtcaatcttcgtgagcggcagcaaaagatgttacaagcttttgcaaagcataataaaatgatgaaagattgttcagctggaaaaggatttgatcgtcaccttttaggtctcttactcatagcaaaagaggaaggtcttcctgttccagaactctttacggacccacttttttccaaaagcggaggaggtggaaattttgttctctcaacaagtctggttggctatttacgagtccagggagtggtagttcccatggtacacaatggttatggatttttctaccatatcagagatgacaggtttgttgtggcctgttcagcctggaaatcctgtcccgagactgatgcggaaaagctagttcagctgactttttgtgcttttcatgatatgatacagctgatgaactctactcatctttagagatgaatcatctattaagcacttaccaaaacatatcattaaactgagtgctgggagtgagttggtaatatgagatgggaaggaatgttgacttgctaacattcctttaacaagttaagaaaacttgttaaatgtagaaattagtagaatcatgctctctaaatttattctgccatagaaggtagaaatatttttaagctcctctgatgcagcagcaatgcaaattatgacatagtgaatatagaactatgcagtatttaagcctcaacaatccaaatctacaaactttaacaatgcaagtcttactctaatttttaagtatttttgttggtacttacatgggttataaatcctctctctggacatcaatgtagagtccatctttcaagcactttaatttttttagctgccaaagggtatgaattacattattgtatgctaatttccctgaaatcaatgccttctatgttcaccacagggatacaagcctgttatgtttgatgggaaagaccactacaatctaatggtgatctaaaataacttttttgggctgggtgcagtggctcatgcctataatcttagcactttgggaggccaaggtaggaggattgcttgaagctaggagtttgagaccagcctgggcaacagggtaaggtcctgtctctacaagatcaaaaacttagccgggtatggtggtgcatgtgtgcctgtagtccaagctacttgaaggctgagacaggaggatcggttgagcccaggaggttgtggctgcagtgagctgtgatgtgcccttatgctatagcctgggcaagagcgtgagaccctgtctcaaagaagaaaaaaagagaaaaataactcttttgaacaaacagacaaattagctagtagtatggagatgtataccctctattacacacataaaaccgtaacaaaattcattgtggtgtattataattagttttgtgaatagaaaaataaagcacttatgtttaaatttgttacagtgacttttaaaggattaatgttgaatcacattgtcagaattttttcctcctcgctgttcaattttgtagtttttactctcaaaaaatgaaattctcaaaattatatagctttttgttttgtttgaataaatgattcattcctgttaaaaaaaaaaaaaaaaaaaaaaaaaaaaaaaaaaaaaa

SEQ ID NO: 946 - DNA, 2279 bp, human
tccggctctcctttgtttattttctaatctatatttttactggaagatttcctctttattctctcccgccctcctacaagcgctcttgctggccgtctgggtgcacacaccgctccctcgatcaccccagcccccttcctggtctcccgagcgcggggtttgaaggtcacctcctttccagtccccgtgcgagccgcgctgccgccgcctcctccagccagagtcggtgggactggctgcgctgccctgaagtggttctccaagcagcgcggagggtggcggacggcggacggagcccaggggccgcgtcgggtggggaaacccgaactcgcggaggggaatccctcccccttcgccccagccccccagcagcacccgcggtggggcgggggcgctctgccagccccgggaacagcagaggcggcggcactggctggacccacgcgcgcgcctccggggctgaagaaggaaggagtgagccgagccgagcaccccacatctggaggggacagccagccgtgggccccgccccggcgtccggagcaggagaattccgagcttcttgcccaggcagagagagcaggagcggaccgcgcgcccgggattgagagtccttgcgctccagacccccacccagtggccgccaggtcccgcctgtccggaccctcgccgcgcccaggcaggcgcgccagggcggggctgacctgcccgcgaagttgcggacagtgcgtgagaaaccagcacccccttccgccgcctccagcttatggtgagtgtggctgggggtgcagagagcgcacgggaattcgggggtctggggccgagaacgtgaccgcagccgggctcgccgggagttctaggaaactggtcaaagaactcatgcaagtggaacttacagcttccttgatcggactcagcattcagatatcaaagcagactgcaatacctgcgtggaaatagaagacagaaaggtttcaagacaacagatgaattgtgaaagagagcagctaaggggtaatcaggaagcagccgctgcccctgacacaatggctcagccttacgcttcggcccagtttgctcccccgcagaacggtatccccgcggaatacacggcccctcatccccaccccgcgccagagtacacaggccagaccacggttcccgagcacacattaaacctgtaccctcccgcccagacgcactccgagcagagcccggcggacacgagcgctcagaccgtctctggcaccgccacacagacagatgacgcagcaccgacggatggccagccccagacacaaccttctgaaaacacggaaaacaagtctcagcccaagcggctgcatgtctccaatatccccttcaggttccgggatccggacctcagacaaatgtttggtcaatttggtaaaatcttagatgttgaaattatttttaatgagcgaggctcaaagggatttggtttcgtaactttcgaaaatagtgccgatgcggacagggcgagggagaaattacacggcaccgtggtagagggccgtaaaatcgaggtaaataatgccacagcacgtgtaatgacaaataaaaagaccgtcaacccttatacaaatggctggaaattgaatccagttgtgggtgcagtctacagtcccgaattctatgcaggcacggtcctgttgtgccaggccaaccaggagggatcttccatgtacagtgcccccagttcacttgtatatacttctgcaatgccaggcttcccgtatccagcagccaccgccgcggccgcctaccgaggggcgcacctgcgaggccgcggtcgcaccgtgtacaacaccttcagggccgcggcgcccccgcccccgatcccggcctacggcggtgttgtttaccaggatggattttatggtgcagacatttatggtggttatgctgcataccgctacgcccagcctacccctgccactgccgctgcctacagtgacagttacggacgagtttatgctgccgacccctaccaccacgcacttgctccagcccccacctacggcgttggtgccatgaatgcttttgcacctttgactgatgccaagactaggagccatgctgatgatgtgggtctcgttctttcttcattgcaggctagtatataccgagggggatacaaccgttttgctccatactaaatgacaaaaccataaaaaccttccaatgtggggagaaaggaagctttccgaggcctgagtattgcaatacatgcagtagtacatcattttagcaactct

SEQ ID NO: 947 - DNA, 2710 bp, human
gtgatggcctccctgaaattaaacatttctattagtggcttcccgttaatctcatccttcttagatcaaacctcgttatatctcctgcctatctcttttgcattccaaagttcagttttattaaatcccagggtctaagattttttctttgagaatttatctccagtgtttctatggaaattaaaaaagaaaattaggataattcaatgtcgaaatgttgcatgcatcttttgagaaatttatattttgtaggttgaaggacttgctttttgggcagcgtatttttggaggtggaatgtagttattttaataaccatgtcctaattatttatagcttcctgcctgacacagctcacttcaagaagtgcacaatgtcagaacgtggaattaagtgggcttgtgaatattgtacgtatgaaaactggccatctgcaatcaagtgtactatgtgtcgtgcccaaagacctagtggaacaattattacagaagatccatttaaaagtggttcaagtgatgttggtagagattgggatccttccagcaccgaaggaggaagtagtcctttgatatgtccagactctagtgcaagaccaagggtgaaatcttcgtatagcatggaaaatgcaaataagtggtcatgccacatgtgtacatatttgaactggccaagagcaatcagatgtacccagtgcttatcccaacgtaggaccaggagtcctacagaatctcctcagtcctcaggatctggctcaagaccagttgctttttctgttgatccttgtgaggaatacaatgatagaaataaactgaacactaggacacagcactggacttgctctgtttgcacatatgaaaactgggccaaggctaaaagatgtgttgtttgtgatcatcccagacctaataacattgaagcaatagaattggcagagactgaagaggcttcttcaataataaatgagcaagacagagctcgatggaggggaagttgcagtagtggtaatagccaaaggagatcacctcctgctacgaagcgggactctgaagtgaaaatggattttcagaggattgaattggctggtgctgtgggaagcaaggaggaacttgaagtagactttaaaaaactaaagcaaattaaaaacaggatgaaaaagactgattggctcttcctcaatgcttgtgtgggggttgtagaaggtgatttagctgccatagaagcatacaagtcatcaggaggagacattgcacgtcagctcaccgcagatgaagtacgcttgctgaatcgtccttctgcctttgatgttggctatactcttgtacacttggctatacgttttcagaggcaggatatgctagcaatattgcttacagaggtgtctcaacaagcagcaaagtgtattccagcaatggtgtgtcctgaactgacagaacaaatccggagagagatagctgcctctcttcatcagagaaagggggattttgcttgctatattctgactgacctggtaacatttacattggcagcagatattgaagatttgcccccaacagtccaagaaaaattatttgatgaggtgcttgatagagacgttcaaaaagaattagaagaagaatctccaattattaactggtccttggaattggctacacgtttggacagtcgactgtatgcactttggaaccggactgcaggagactgcctacttgattcagttctacaagctacctggggcatctatgacaaggactcagtgcttcggaaagccctgcatgacagcctgcatgactgttcacattggttttacacacgctggaaagattgggaatcatggtattctcagagctttggtttacatttttccttgagagaagaacaatggcaagaagactgggcatttatactctctcttgctagtcagcctggagcaagtttggagcagacgcacatttttgtactggcacatattcttagacgaccaattatagtttatggagtaaaatattacaagagtttccggggagaaactttaggatatactcggtttcaaggtgtttatctgcctttgttgtgggaacagagtttttgttggaaaagtccgattgctctgggttatacgaggggccacttctctgctttggttgccatggaaaatgatggctatggcaaccgaggtgctggtgctaatctcaataccgatgatgatgtcaccatcacatttttgcctctggttgacagtgaaaggaagctactccatgtgcacttcctttctgctcaggagctaggtaatgaggaacagcaagaaaaactgctcagggagtggctggactgctgtgtgacggaggggggagttctggttgccatgcagaagagttctcggcggcgaaatcaccccctggtcactcagatggtagaaaaatggcttgaccgctaccgacagatccggccgtgtacatccctgtctgatggagaggaagatgaggatgatgaagatgaatgaaaaaaaaaatcaaacagcagaagaccaaggcatcagatctgtaatgaccctaaagttagtgtggtgctcctaagcagaatatgcagcatggagcgagccataccctgccggatctgctcccaagttatctttctgttccacacacaccttatggagataatgcctctgctgcatgaggagacagagaacttttgttgaactacagttttgta

SEQ ID NO: 948 - DNA, 5556 bp, human
gtcgtgctctcctcggtaggggaggaattggttaggcggcggcggcggcgaagcggcggcggcggctgtaggggagcagcggcagtggcggcgacggcgaggaggtgttcggtttgcgcagcgtagaaacgcccgcagcttcagagaaggagttcttgtgggaccaaattaggcattctgaacccacgccggcttagctgggccgagtccaggcgctgccgcacgtacagttttggtggcggtgacagacactgttcttgactctaggggcctattaggccgacgtctgaggcgcagatcgctggctctcgacgcattactctttacgccttacatttctgtcttccttcctgggtcagtgattcccggaccctggaagagaagagggtggctaatgattaaggctttccttaaagtttcccatgtctcaatggactcctgaatataacgagctctacaccttaaaagtggatatgaagagtgagattccttctgatgcaccaaagacacaggagagtctgaaagggatccttttgcatccagagcccattggggcagccaaaagttttcctgcaggagttgagatgattaatagtaaagtggggaatgaattctctcacctgtgtgatgattctcaaaagcaagagaaggaaatgaatggtaaccagcaagaacaagaaaaaagtctcgttgtgaggaaaaaacgcaaaagccagcaggctggcccttcgtatgtgcagaattgtgttaaagaaaaccagggaatattaggactgaggcaacacctagggacaccaagtgatgaagataatgattcctcttttagtgattgtctttcttctccttcatctagtctgcattttggagattctgatactgtgacttcagatgaggataaagaagtctctgtaagacattcccagaccattttgaatgctaaaagtagaagccatagtgcacggtctcataagtggcctcggactgagacagaatctgtatcgggattgttaatgaaaagaccctgtttacatggcagttcgttacggagacttccatgcagaaagagatttgtaaaaaataattcctcacagaggacacagaaacaaaaagagaggatattaatgcagaggaagaaacgagaagtgttagctcgaagaaaatatgccttgctacctagttctagtagttccagtgagaatgacctcagcagtgaatcctcttctagctcatcaactgaaggagaagaagatttgtttgtttctgccagtgaaaaccaccaaaacaatccagctgttccctcaggaagtattgatgaagatgttgtggtgatagaagcttcctccactccccaggttactgccaatgaagaaattaatgttacctcaactgacagtgaagtggagattgtaacagttggagaaagctatcggtctcgttcaacccttggacactccagatctcattggagccagggttccagttctcatgcaagtcggccacaggagccacggaaccgcagtaggatttctactgttatacagcccttgaggcagaatgcagcagaagttgtggaccttaccgttgatgaagatgaacctactgtagtaccaaccacttctgcaagaatggaatcacaagctactagcgcttccattaacaattcaaatccatctacctctgagcaggcctctgatactgcttcagctgtcaccagtagccaaccttccacagtgtcagagacttcagctactcttacaagcaatagtaccactggcacttctataggagatgactcaaggagaactacatctagtgctgtaacggaaactggccctcctgcaatgccaaggttaccttcctgctgtccccagcactcaccatgtggagggtcgtcacagaaccaccatgcattaggacatcctcatacaagttgctttcagcagcatggtcaccattttcaacatcatcaccaccaccaccatactccccacccagctgtcccagtttctccttcctttagtgatcctgcttgccctgtggaaagacctccacaagtacaagcaccttgtggagcaaatagtagttctggtaccagctatcatgaacagcaggcattgccagtggacctgagcaacagtggtatcagaagtcatggaagtggcagttttcatggagcatctgcatttgacccctgctgccctgtttcttcctcccgagctgcaatctttggccatcaggccgctgctgctgccccaagtcaacctttatcatcaatagatggctatggatcaagcatggttgcgcagccccagccccagccccctccacagccctctctctcatcatgtcgacattacatgccacccccttatgcctctttgacaaggccacttcatcatcaagcttctgcctgcccgcattctcatggaaacccccctcctcagactcagcctccgcctcaagtggattatgttattcctcatcctgtacatgctttccattctcaaatatcttctcatgcaacatctcatcctgtggcacccccaccaccaactcacttagccagtacagctgcaccaatccctcagcatcttcctcctacacaccagccaatttcgcaccatattccagccacagcacctccagcacagagactgcatcctcatgaagtgatgcagaggatggaagttcaaaggaggaggatgatgcagcatccaacgcgggcacatgaacgccccccaccccatccacataggatgcacccaaactatggtcatgggcatcatattcatgtgcctcagactatgtcctcacatcctcgacaggctccagagaggtctgcctgggaactgggaattgaagctggagtgactgcagctacttatacacctggtgcattgcatcctcacttggcccattatcacgcacctcctcgacttcatcacttacaattaggagctcttcctttaatggttcctgatatggcaggctatcctcacatccgttacatttcatcaggattggatggaacatcattcagaggtcctttcaggggcaattttgaggaactgattcatttggaagaaagattaggcaatgtcaatcgtggagcatcccaggggacaattgaaagatgtacatatccacataaatacaaaaagaggaaactgcactgcaaacaagatggggaagaagggactgaggaagacacagaggaaaaatgtactatctgtttgtctattttagaggaaggtgaagatgtgagacgtcttccatgtatgcaccttttccaccaagtgtgtgttgaccaatggttgattaccaataagaagtgccccatatgcagagtggacattgaggcccagctgccaagtgaaagttgacaccatgtttcagaactcttgccctccctctcattcccatccttcctggtactgcagtcaaccaaagatggcatgacttacctgcgcagatttggaagcattgaacttagagtgctggctctgctatatggtacaactaatgctagacctacagtttatgtatacagttgattttgatgtatttataaaagcttttttttctagatttgacatttttctgtatcattttactgtatttttgcatggttccttgtattgcatttctttgcacatattatgggcttgtgaccctaaacttgcaggcaaggttagctgctttagtaagtagaattttgtggtctttttgttttttacatagtaccaagccttgataattatgaattttttatccattactaacctttaatttaatcaatcatgtactttagtttaatgtataaagatcctctagaaaatgataatattgtgtattaagacattccttaattaggacaaaatggctgctgtatatttactatatggagttctgagttaaataccatccttaatactgggaacagaatacaacccatataaatcagatgcaggtggtagtcacatcaccagagtgatcagtataaattttcttggtgtatccttttcctttcaacacagtgcagataagagttgaatattgatatcatacatttagactgctgttctgattgcatttatctttttcctacatcatttagaattttatttccctgattcagtttttgctgctgtgaaacagctctgatgaacactaaatattaatttcaattagctagattgtacatacttgcagatttaacaaaattttagggaaattgaaaaagacatgtagaatttgttgtcttctgctaagcacgaaaagttaagatatctgcttacattgattttgtagacacattaagtcaagatttggaatttaagtcactggcaggtatctgtgcattcatagaacttataaaggtcccaggatcacttttaagggatttttattagtttaaaggtaaataaagtcagctgaatctacatgtctcttgttttatttctctctaaacttgaaaacagtaaatctgcagatactgtgaggcacaaattatactgtcaacctactgttgctatggttatatactcccacttcatacattaccaagagtcgatcactgatttaaaatttttaatttctatagttaagatttactgcataatatagaatataaagttaagttaacatactaacatttctcctttggaggaagttttaatctacttcaggatgcatattattatcaagatactttcatatacaggatagcctaattttatttgtttaaatatgcttaatatgccccagattgcaaatgcatccagtcagtaatatcactgtctgtatgtggaggacatgttcccatggatcatatgtgaagatgtcaataagcttgcattaagccacctgctttgtaagtggattgattaataaataacttatatttctattgtctttgtgtttcataattagtttttataaaaacagtttacattaaacatcttggaattcaacaatagtgatctcactcaaattgacatttgcataatttgacatttatattcattcagttatgactacttgcccttttcttcatattagtaaatgttacactgtagtagttgtcaatgttaacaggcttcaacatagtatgtgtgcagatggacgatggatttaaagagcataccttatgattaaaccgaggttatagaaggtcaggggagagtgaaggagtcagtgacctatgtctgccatcttactggggaaaagagcaagtagcctgtcttcctttaagtaagtagcctgtaatggatgtactactttgccactggaataccccgggtctgtgccaagggactgaagaagtgtaagatggggagaactgtatgtcatggagtcctcttgacgttcccccagatacaagtaaagcacaggtggatttctctatttttgaatactacatcagatttagatgcacgactacctgttgacttgttttataattgctactgatttttttaatgtaggcaaagctttgttactttgaaatttatttaataaaagtatttgtgacataaaaaaaaaaaaaaaaaaaaa

SEQ ID NO: 949 - DNA, 1754 bp, human
ccgcgttctggttccgccatggaatccaacaaggatgaagctgagcgctgtatcagcatcgccctcaaggccatccagagcaaccagcccgaccgggcgctccgcttcctggagaaggcacagcggctgtatccgacgccgcgagttcgcgccctgattgagtccctcaaccagaaaccacagactgccggtgaccaacccccacccacagacacaacccatgccacccacaggaaagcaggtgggaccgatgccccctcggccaacggtgaagctggaggagagagcaccaaaggctacactgcagaacaggttgcagctgtgaaaagggtcaagcaatgtaaagattactatgagatcctgggggtgagcagaggggcctcggatgaggacctgaagaaggcctaccgcagactggccctcaaattccacccagacaagaaccacgcacctggtgccactgaagccttcaaagccattggcacagcatatgcggtactcagcaacccggagaagaggaagcagtatgaccagttcggcgatgacaagagccaggcggcccggcacggccatgggcatggggatttccaccgtggctttgaggccgacatctcccctgaagacctcttcaacatgttctttggcggcggcttcccttctagtaacgtccacgtctacagcaacggccgcatgcgctatacctaccagcaaaggcaggaccgcagggacaaccagggtgatggcgggctaggggtgtttgtgcagctgatgcctatcctcatcctgattctcgtgtcagctctcagccagctcatggtctccagtccaccctacagtctgagtccaagaccgtccgtgggccacatccacaggcgagtcactgaccacctgggtgtcgtctactatgtgggagacactttctccgaagagtacacaggctccagcctcaaaacagtcgagcggaatgtggaagatgattatatcgccaacctccggaacaactgctggaaggagaagcagcagaaggaaggcttgctgtaccgggcacgctactttggcgacacagatatgtaccacagagcacagaagatgggcacccccagctgcagccgactgtcagaggtgcaggcctccctgcatggatagtcctgggccagccacaccaccgaggtccaaactatgaaatccctggagaatttttggtgacatgcactgagccaaggtgatggactgtatatttgaggaaagacaaacaaagaaacaaaattaaaatggaattggaggccgaacgctgcacagctgccctctctctcacccagtaaatgcagaaagctcttaggacagacagaaaacctgccatggggctgcttccctccctcgcagggctggcggaggctccgcatcgcctctctcctaggatacagaaaccatggcaacgaaagtagaatgtaaaactcgcagcagatatcagtgggaagggctgggggagggggcacccagctgcctttcctccctcacaggagccaccaccagccacctctcaggagaagccagaggccctggccaaagataggaggaagaaagagaactctccatagaatgtaatttatagatgcgtgtatatgtatatatatctatttatatgtaaataggcatatatgaagatatatatatatatagtctactttttaaactctgcagggatttggttaaaaaaaaaaaaaaaaaaaaaaaaaaaaaaaaaaaaaaaaaaa

SEQ ID NO: 950 - DNA, 2880 bp, human
actccagtctcctgggactttgactcgccgtactcggcgcgctcctgctgagggtcgccggagatgtcgctcggccgccttctaccaggagcctgatccgtgccgcccgccgcccggatgggaccaccagagtgctctaagtctccagtgaatattgaattgctgaggattttgggaaaagacaaatcaaagttcccattccatggatcccttaggtgcaccttcccagtttgtggatgtggatacactaccaagctggggtgactcatgccaagatgaattaaattcctctgatactacagctgaaatatttcaggaagacactgttcgatcaccttttctttataataaggacgtcaatggaaaagtggttctttggaaaggagatgtggcattactgaactgtacagccattgtgaataccagcaatgaaagtctcacagataagaatcctgtgtcagaaagtatcttcatgcttgcagggcctgatttgaaggaagatctccagaaacttaaagggtgccgaacaggtgaagcaaaattgacaaaaggattcaatctagctgcccggttcatcattcacacagtgggacctaaatataaaagccgctatcgcacagcagctgagagttccctttatagctgctacagaaacgtacttcaactagcaaaagagcagtcaatgtcttctgttggcttctgtgtcatcaattctgcaaaacgtggttatcctttagaggatgcaacacacatagcacttcgcactgtaagaagattcctagagattcatggggaaaccattgaaaaagtagtatttgctgtctctgatcttgaagagggtacttaccaaaagctgctacctctctacttcccaaggtcattaaaagaggagaatcgatcattgccctacctacctgcagatattggaaatgcagaaggggagcctgtggtacctgaacgacagattagaataagtgagaaacctggtgctccagaagataaccaagaagaggaggatgaaggcttgggagttgatctctctttcattggctctcatgcttttgctcgaatggaaggagatattgacaagcaaagaaaactgatccttcagggacaattatcagaggcagctctgcagaagcagcatcaaagaaattataatcgctggttatgtcaagcaagatctgaggatctgtctgatattgcttctctaaaagccttataccaaacaggtgttgataactgtggtcggacagtgatggtggtagttggaagaaacattcctgtaacattaatagatatggacaaggctctcttatatttcattcatgtaatggatcacattgctgtgaaggagtatgtattagtgtattttcacaccctgaccagcgaatacaatcacctggactccgacttcctgaagaaactctacgatgttgttgatgtcaagtacaagaggaatttgaaggctgtttattttgtacatcccacatttcgttcaaaggtgtcaacatggttttttaccaccttttctgtctcaggactgaaggacaaaatccaccatgtggacagcctccaccagctgttttctgccatatcaccagaacagattgactttcctccttttgtccttgaatatgatgccagggaaaacgggccttactatacatcatatcccccatcaccagatttgtgacctgccatctttcagtgcttcttggttcccaggatgccacttcctccacgaatagctacctgttgaagtgatattcattgttgctgtacagatccagagagccttttgtccccacctctctggtatttttttattgactgtatattttctggcacataagcaatctaaaaatggtaggccattctgaactgcacacattttaaatttgtatatttatatgaaatggaaatgttcatttttagattgttaatagaaattggggagcaacttttgagtatctttagtttcctgaaggacaccgaattctccattagataaaccaccaagactgttcacatcatctctctaacattgcacgcttcctttgtgtacttaagtgattctcgaaatatacagaaccaatgtatgctaaccagatgcattgtttgcttcagatccatggtgttaataccatgtatattttataaagataatttggctgtgttaaaagagaattacctgagtccaagaatgtggaaatgtatctgacaaaaaacatcaaaatcattagcaaaacataggacttagaatgttaatgtacaagttaagactaaagtttaaggactaaggttccttggattatatgacttgttaagattgccacagttccgatctcaacagtgtggggtgaaacaagaagactgtatcttcagcctttttcctataatcatggatgatttggtcttattcaaaaggaccgcacatattagtactcttaagagcatcttccaagactccagcagtgagcatttagagagtgtgttgtcttccagagtcatgaatgattttgtttagctatcaggtctactacctctaaggacatttcatagcagcatctcttgagttgcctgcatcagtgtggaggaagtgtgtcacagtgaacaaatccagggagctgataattggcaaaagaccacttttaccactcaggctctatttgtgccttagcttggttatgagtaaaaattagaattatgctgcctacctcacagaggtatcatgaagatagcatttagaaagggctttgttgtggtggggtatcttcagttagtttttaaatgggaataaatatatatgagggaatgctacacagcactcctcttgtccttgatccccaaaaaaaaaaaaaaaaaaaaaaaaaaaaa

SEQ ID NO: 951 - DNA, 2016 bp, human
attttcacaacagcctcctgagtcccatcattatcatggtttataggtgaggaaattgagactagggtggtgaagtcacttgcctcaagatgaacagctggtagatcacatgcgtggtggcaccgggtgtggccctggaggactcgtgctagtggatctgtttttctagtgattcttttgttttgtcccttagagtgatgatgcgggtgtgctggttggtgagacaggacagccggcaccagcgaatcagacttccacatttggaagcagttgtgattgggcgtggcccagagaccaagatcactgataagaaatgttctcgacagcaagtacagttgaaagcagagtgtaacaagggatatgtcaaggtaaagcagagtttgaggaagaggcaaagaaccctggcctggaaacacacaggaagagaaagagatcaggcaacagtgattctatagaaagggatgctgctcaggaagctgaggctgggacagggctggaacctgggagcaactctggccaatgctctgtgcccctaaagaagggaaaagatgcacctatcaaaaaggaatccctgggccactggagtcaaggcttgaagatttctatgcaggaccccaaaatgcaggtttacaaagatgagcaggtggtggtgataaaggataaatacccaaaggcccgttaccattggctggtcttaccgtggacctccatttccagtctgaaggctgtggccagggaacaccttgaactccttaagcatatgcacactgtgggggaaaaggtgattgtagattttgctgggtccagcaaactccgcttccgattgggctaccacgccattccgagtatgagccatgtacatcttcatgtgatcagccaggattttgattctccttgccttaaaaacaaaaaacattggaattctttcaatacagaatacttcctagaatcacaagctgtgatcgagatggtacaagaggctggtagagtaactgtccgagatgggatgcctgagctcttgaagctgccccttcgttgtcatgagtgccagcagctgctgccttccattcctcagctgaaagaacatctcaggaagcactggacacagtgattctgcagagcctgagctgctgctgtggtgtggcccactggagcaaactgctggcacctattctgggttgcttgtgaacttctactcatttcctaaattaaaacatgcagctttttcacaaatttattctattattgagtggccacaatgtagagtggctcaaagtacttcaggattaggaatttgggtttgtcatagatgtattctctggtgagggtggctgggatatacctgacccaccatcttcagaaggacccatgtcaggtctgaccattgggagcaaagccatgttcacactgacctaatgcagagtatggaagcattgggctggttatacatttctgtttcttagatttatcctccgcctctgtaggcatggacaacctttaatcagagcatctagagtggcctcttgtttatcctgaagatactgatgggtcttgttttctgttagtctgttttgtaatattcttttcccttccttcatggggaggcttagtttgtccagtccttccatgcccttctatcccagattacctaaatgttcccttctcaggaattctgtctcatcagttcttcacagtgagaaaagaggctagatgatggtgtggggggttggagttttcttctaataccgagggttcctggctgtgaggaaacagccacatgttcgtcatgattgagctgtgaagtcttcttggacctgttgtctgaaaataaagttaatttgtttgaggcatctctcttaagtaggtggaaactattgaagttcagctaacaatcacagcataggttctgatgcatggaaaggtggttggtgaatgaaaaagttgcgtagagccactactttctttttccctgagaataaatttggataaaacagttgtaaaaaaaaaaaaaaaaaa

SEQ ID NO: 952 - DNA, 5695 bp, human
gcggctcaggggcggggacgggggcgtggtcccgccgtataagaacggagggggcggcggcgggacggctcactcggtgccgctgcctaggggctgtagaggtcgcgccgctcctgctggggcctgcccacgccaaggacctgcctctgtcgcctcctcttctattgcccagtttccccagccagaacatcccctgaagatggcagaggagagcagctgtaccagggattgcatgtccttcagcgtgctcaactgggatcaggttagccggctgcatgaggtcctcactgaagttgtacctatccacggacgaggcaactttccaaccttggagataactctgaaggacatcgtccagaccgtccgcagtcggctggaggaggcaggcatcaaagtgcacgacgtccggctgaatggctccgcagctggccacgttttggtcaaagacaatggcttgggctgcaaagacctggacctaatcttccatgtggctcttccaacagaggcagaatttcagctggttagagatgtggttctgtgttcccttctgaacttcctgccagagggtgtgaacaagctcaaaatcagtccagtcactctgaaggaggcatatgtgcagaagctagtgaaggtttgcacggacactgaccgctggagcctgatctccctctccaacaagaacgggaagaacgtggagctgaagtttgtcgactccattcggcgtcagtttgagttcagtgtggactctttccaaatcatcctggattctttgcttttcttctatgactgttccaataatcccatctctgagcacttccaccccaccgtgattggggagagcatgtacggggactttgaggaagcttttgaccatctgcagaacagactgatcgccaccaagaacccagaagaaatcagaggcgggggacttctcaagtacagcaaccttcttgtgcgggacttcaggcccacagaccaggaagaaatcaaaactctagagcgctacatgtgctccaggttcttcatcgacttcccggacatccttgaacagcagaggaagttggagacttaccttcaaaaccacttcgctgaagaagagagaagcaagtacgactacctcatgatccttcgcagggtggtgaacgagagcaccgtgtgtctcatggggcatgaacgcaggcagactctgaacctcatctccctcctggccttgcgtgtgctggcggaacaaaacatcatccccagtgccaccaacgtcacctgttactaccagccggccccttacgtcagtgatggcaacttcagcaactactacgttgcccatcctccagtcacctacagccagccttaccctacctggctgccctgtaactaaccttgagacctgagggtttccacagtgggaaccccaatagggctagggctctcaggtaggggagcctccttctagatgtaggcatttggcttttaaaggggaactcagctctgattctgcttttttttttttttttcctttgtgtacccattggaatgggtctacagtgtatcatgagccaaccctcaaaggacccgtattacagtgccacgttggaaaacgctacaggaagcatgacctatccacatctttccaagatagacactaacatgtcatgtcccaaacattagcacgtgggggttgagctctgtgcagtaatcgagattgggagaatttgggcagcgcgtgagaagtgctaagctacttgttttctcacttgagcccgggtaggctgtgttggccctcacttgggattctcagcagttacatgaaagttgtgctgataatctcttctcttgtaccaattttagtcaggcagaaaatggtaaacatgagggtgctcttgtgacttaatttttgttcaagggactaaattgcttatgtttattccctgtcagcggagtggagaatgtcattcatcaataaaccaaagccaatagctggagaattgagatctggttgaaagtggtttatggtttacatgctgtactatcctgaggaattgcgagatattgctgaggggaaaaaaaaatgaccttttcttgaaatgtaacttgaaaacaaaataaaatgtggaacataatgtttaattagaattgtggtggtggtagtggaaggggataattgtaaataggaaacatgaatgttcatttttttctttaaagaattcttattaaatggctccctgccttttttttcttttttcctcatcagctctttcatggctgaattttgttttattcttcctaagactgaggattgtgctgagtccagagtcattgtggtaactgacatgagggtcttcccatgttttaactggaaacccactttggtcacattccaagtatgacacagctgttcttctggagtactttagctattttttgtttttgttcttttcgttttttttttttccaaaaatagtgacttccttctccaggtgtgtttgacagcaactcaattcaggaatttcggtagaactgagtgacctgtggaactgctttagaatctaacctgctgtcttcgtgctctgtgtgaaggggaagctggggggttagcatgaagtctggccttgtgtgcattggagcttccaaggcactttgaaatcattccagtatatttgggaagaattgagtgaatgagaatgctcttccttattctggtagatttgacttgtttataattctgcactttagaagaaaaacagtgttaatctgtagttgaaagaaagcttagtagatgagagagttctaggctactgtggctttttccagtagatttagatgagattatgtgttttgaaatgttttgtgggatcccttagaaagcatcacttcagggcagagacactcaatattgccagccagcttgggttctaaagtgatttaatcaaattcatgctcctgatcttttttttcccccttcctttggctatgaaaacccaaagcccggagtgattgttttctccttgctttaagcagtgaagttatcctaatgcaaaagagcttagtagaaaatgagtggtttacctttttttctaaaagtatattttcaagtttattctggaatgtgatgtcttggtcctcttaaaagcagatcagccatgactgaaactcaaggcttagctggtatctatgttgtgctacattaggtgactagaagccacttcttagtgtaatcagctcctgtttccctgtgagccttagttatattttaattcagtggctttgagtcaaggccggttctaattgaggggacccagtgtgcttcagtgttaagagtggggcaatgaagagtgaaccccaatgaagagtgatcccaactttggaaactatctggtcattcatgaccttaaaaagctgccatggtggtcaaatggcatgtgtttgcacaaaaatgaccgatgtgtttaaccaaagctttgaaatgtgatgaagccaccaacataagcacttgcctaacagaaatcagtatttcttctacttagaaggcttggggcccagggtaatgaggcaccagatgaagataagatctgcatcaaggaattaaatttccagtttgtccttggggttctttctgcttatgttttttcccccccatctggtaatagtcctcttctgagaatgaaaggaggcacagaagttgcgagaaagacccagtccccagtctttgccaccattgcaccatggttgtctcggagtcccttcacctgacctttttagtcagctcagatctttttgtagtttgagaatagacctattcaagagctatcagggttaaaagctgcactgaccaaagctgtacttttaaaacacaacccctgggctagtgatgtctctacttgctctatgagccttttgccagcctcagaataggcgaggtaaccttgaatttcagggccctggaaactctagctgaaacctgcctttcctaatgctcacacaagcaccaggtaccctgagcttatactgagtccagtggttcctattttatgtgtgtgtgtatgtgtgtgtgttgagtaacatgaaacttggcagtagcagagagcactgaagttcacatgcaagttctaatctaaagttaagcagtctcttatttgtttcgggactctgatttgactctttttctgatgctttcggcatgtctgcagcctgttctcctagcctgctgcttggagtcaggttgagcatcagtgagatgaagacagtaccttttcctctcacattggcagaatagcacgcactagatgcctgaccttgagctctagtctcccctttaaatcttaccttggcagtaacacattattcctcattcaataatttcaatgctgaaactgaactctattactaatgccttccaatcagagttcctgatggggatgcctgtgggatggcccacacctgggggacctggcagatggggtgagttgggtaaggaagatgatgcttagttcctgatagatgctacagatgtagtttggcatttcagtttttgtccagtttgattttcactggggtttgagtcacagcaagctgtgtatgaacttgtgttttgtggtgacacattaataatcaaattgctaaaaccctgaatctgcttattcttcagcttcacctctgcactaaccccttacccttatggtacgtcaggattttaactagtactgctttgttgactttgggaaatggtgccactcaaaagcaacttcctaacttgaggaataactcctttgtagtttactttctggtactggttggtgccttgtattgggatacagctatattcttagctcaaatgtcctctttttgagagcaaagtagttatccaatggtgagacgagaccctgacgctcatagaggccattccttcctgggtgtcggaccagggctctgtgtcagggaaaaccttctgggtggactttgtaagaatccagtttccaaggttagattcacatccttaatcttgcagagactagaatttcacagctcgctttggaacatattccaattcaaccagttaaaatcagaggaccaagtcgtgggggaggggggcggtgttgaggagaggtatttttaaagatctggcaacttttcaggattatttgtggagaactctaaggttaagatcaggaaataaaagactgtgtgtgtgtgtgtgtgtgcgtgtgtgtgttcaagtgcctaaatcttgtttacctatcactttaaaaaaataattgaagtgtaagctaaataaaatgcttggagttttgcctgggctagtgagagttggtgcaaattcttgtgtgtgtttgcataggaaggtgagatgaccatctactaaagaggaagtagctaaatacagatctgtgggtgtttttaaaaaaactcaacctatctggtgttttattttaatggataaaaatgtaatttttctaaggtagcaacttatttccaaattaatatagatgaaaaatagataccaattagactaaattgaaagctttttgttctatatttgcatagcctttgaaatatttcttagtgcctaggaggtctggggattcctctttcgtggtggtcactaaccttacttgatgcagataaaatcacttgtcaatgcaaaatgtgttagaacttgataaagctttgagtttgagaaataaaggtatatttaaaattt

SEQ ID NO: 953 - DNA, 2784 bp, human
gatgccccgcccgcgcccatggcgcagccacacacgacctcggtcccgtacttcgcgcgctctcctgcaccgccgccgccatctcgctcaggagctcctccacaaccgccggcaacactacggccatcgcgccgcaggacacgccctccacgaccggcggaccgccgcgacgctccagctgactgcgcctacctgtggaggatcctgaccccccgccggggcagggcgagacggagtgacgtcggggcgcgtcatcgcgcgtgcggacgcagggatgtcctgctcagtcgtcagggcccggccaatccggagggcgctcggcgcgtggtcgggggccaggagcgcgtctggcctgcagtgcgcagaggacgcggcgggagcatgttccggctcctgagctggagcctgggccgaggcttcctgcgggccgcggggcggcggtgccggggctgctccgcgcgcctgctcccggggctggcaggaggtccggggcccgaggtgcaggtgccgccatcccgagtcgcgccgcacggccggggcccaggcctgctgccgctgctggcagcgctcgcctggttctcgaggcccgctgcggcagaggaggaggagcagcagggagccgacggggccgctgccgaggacggggcggacgaggccgaggcagagatcatccagctgctgaagcgagccaagttgagcattatgaaagatgagccagaagaggctgagttaattttgcatgacgctcttcgtctcgcctatcagactgataacaagaaggccatcacttacacttatgatttgatggccaacttagcatttatacggggtcagcttgaaaatgctgaacaactttttaaagcaacaatgagttacctccttggagggggcatgaagcaggaggacaatgcaataattgaaatttccctaaagctggccagtatctatgctgcgcagaacagacaggaatttgctgttgctggctatgaattctgcatttcaactctagaggaaaaaattgaaagagaaaaggaattagcagaagacattatgtcagtggaagagaaagccaatacccacctcctcttgggcatgtgcttagacgcctgtgctcgctaccttctgttctccaagcagccgtcacaggcacaaaggatgtatgaaaaagctctgcagatttctgaagaaatacaaggagaaagacacccacagaccattgtgctgatgagtgacctggctactaccctggatgcacagggccgctttgatgaggcctatatttatatgcaaagggcatcagatctggcaagacagataaatcatcctgagctacacatggtactcagtaatctagctgcagttttgatgcacagagaacgatatacacaagcaaaagagatctaccaggaagcactgaagcaagcaaagctgaaaaaagatgaaatttctgtacaacacatcagggaagagttggctgagctgtcaaagaaaagtagacctttgacaaattctgtcaagctctaaatccatttttgtgtagggagaataatgtctagtaatgtggaagaatagctatcattcctgtctctgtggcacccgatcaatggcttaaatctgtcgtttttgatattcaggtttcctcaatttagccttagtgaaggaggggttgtacacactgccatttttgtattttaaaggaaaaatgactttcattcccaactgattatgacctttcaggatgtcgtcaagtgatgctttcagttgtaacacgtgacttggtgctgtccctgctggtctaagtagaactgtagattcatatgggctggtgttcctgtgcgctgtgggtgtggtgattcagcctggcatttctaccataagtttttggtctgctgatttgctgccctgtcttctcttactttactttatcaatacctggcaaactgaccagaattaccttcctcatggcaaagggggattatggtgaattgttgttcttatagtctgtttcatgaagcacaagtggaatttaatacataaaagagaaaaatatcttagtttgctaccagcatccagcatgaagttgtaaagtggggattaggcacgtgacagtatagcacccatttgaatttaaataaaagtgaaccatatttatctggttatataaaactaaaaatgggggtgtttatataaaactaaaaactaagaatgatgtaaccttttgtctgtgttatctgaacactctacttcctttgcagccttagtcacacaactgagtcatctcaagtactctttaaggacacacagcccaggctgttctgagtcagaataggcccctacaggtatattttaaaactcttcgtaattctaatgtgtactgctggtatagctgaactactgacctggatcttagtcctagcctttttgcttttgcaatttcagtatcttcatctctaaactagggaaacactgggattctttcttagctgtgggggaaggtatttggttagatgactttgaatgaatagactgctgtgctgaaagagctttatcacactgtctcaaagtatgtaaagatacataggtggatgctcttactgcagcagtcatgaatacatttttagccatttacctaaggaaaaagacagtttttctaggtaccatgaaggaagattgaccctgttggtatgcctgtgggggtgggatgtgagtgggactgataaactgatacttttggttcgtatgtacatactggaagaatcttcataataaatgagactacacaac

SEQ ID NO: 954 - DNA, 1654 bp, human
gtcggctgtgtagactgttgggtaggctgcgtgctagcttcggcgcggatccctgggcgtccgtacgtcggagtccttcgtcctccagggtccctgttctttgcgccagcgggaaccactatctctgcactcctggggttttgttacatggctgctttcctcaaaatgagtgttagtgtcaatttcttcagacctttcaccaggtttttggtgccatttacccttcataggaagagaaataacttaacaattttgcagagatacatgtcttccaaaataccagctgttacttatcctaaaaatgagagtacacccccttctgaagagctagagttggataagtggaaaactaccatgaaatctagtgtgcaagaagaatgtgtttcaacaatctcaagcagtaaggatgaagatcctctagctgccaccagagagttcattgagatgtggagattgcttggcagagaagtaccagaacacatcactgaagaagagctcaaaacccttatggaatgtgtttctaacacagcaaaaaaaaaaaatatttaaaatatttatatacgaaggaaaaagtgaaaaaagctaggcaaataaaaaaggaaatgaaagcagcagcaagggaagaagcaaaaaatatcaagctgctagaaaccactgaggaagataaacagaaaaactttctatttttacgactttgggataggaatatggacatagcaatgggctggaagggtgcccaggccatgcagtttggacaacctttggtttttgacatggcttacgaaaattatatgaaacgaaaagaattgcagaatactgtttcccagcttttagaaagtgaaggatggaacagaagaaatgttgatcctttccatatttatttctgcaatctaaaaatagatggtgctttgcacagagagttagttaaacggtatcaagaaaaatgggacaaattgcttttaacatcaacagaaaagtctcatgtagatttatttccaaaggacagtattatctatttaactgcagattctcccaatgttatgactactttcaggcatgacaaagtttatgtaattgggtcttttgttgataagagtatgcagccaggcacatccctagccaaggcaaaacggctgaacctggcaactgaatgccttccattagataaatatttacaatgggaaattggtaacaaaaatctcaccttagatcaaatgatacgtattttgttatgtctgaaaaacaatggtaattggcaagaggctctgcaattcgttcccaagagaaaacatactggttttctggagatttctcagcattctcaagagtttatcaacagactaaagaaggcaaagacttaattcattttcaaaaggttctctgaatgtgcacagaacacgtggctcaaatgagaacatttgatggcttaaaaagtaaatgcgttagaaatacagtcctgttaatgtatttcttcccaaacaattcatttttctcttctaaaggtagtctttcccaactgactgtagggttgtgtcttttcccaattaagtatctgcagaactttgggattatactttgtttactgtagaaagataataaaaagagttgtccaaaaaaaaaaaaaaaaaaaaaaaaaaaaaaaaaaaaaaaaaaa

SEQ ID NO: 955 - DNA, 1246 bp, human
ggaaaggccttggaaagcagtcgttgcgccagacagcccagggaagagcggcagcctgaggacctagggccacctgctgttccctgggattcatgtccttctggggaggagggaggacccaggacaatggctgctgttcatgatctggagatggagagcatgaatctgaatatggggagagagatgaaagaagagctggaggaagaggagaaaatgagagaggatgggggaggtaaagatcgggccaagagtaaaaaggtccacaggattgtctcaaaatggatgctgcccgaaaagtcccgaggaacatacttggagagagctaactgcttcccgcctcccgtgttcatcatctccatcagcctggccgagctggcagtgtttatttactatgctgtgtggaagcctcagaaacagtggatcacgttggacacaggcatcttggagagtccctttatctacagtcctgagaagagggaggaagcctggaggtttatctcatacatgctggtacatgctggagttcagcacatcttggggaatctttgtatgcagcttgttttgggtattcccttggaaatggtccacaaaggcctccgtgtggggctggtgtacctggcaggagtgattgcagggtcccttgccagctccatctttgacccactcagatatcttgtgggagcttcaggaggagtctatgctctgatgggaggctattttatgaatgttctggtgaattttcaagaaatgattcctgcctttggaattttcagactgctgatcatcatcctgataattgtgttggacatgggatttgctctctatagaaggttctttgttcctgaagatgggtctccggtgtcttttgcagctcacattgcaggtggatttgctggaatgtccattggctacacggtgtttagctgctttgataaagcactgctgaaagatccaaggttttggatagcaattgctgcatatttagcttgtgtcttatttgctgtgtttttcaacattttcctatctccagcaaactgacctgcccctattgtaagtcaattaataaaaagagccatctggaggaaataaaaaaaaaaggaagactctatgaagaaacagagaagtctcagaaaaggctaacaattttatatagaggacaaaacagcattaaactcatcagttgcaaagattgcctataaaaggaccttaggatttaaggaaggggcttcttaatgtagaaagggaa

SEQ ID NO: 956 - DNA, 2050 bp, human
gcgggtgggaagccgtgtctcgcagtcgtggactcgtgcagctggggcgtccgcagccgctcgtcacccgcgtgatgctgtttctggcgttgggcagcccgtgggcggtcgaactgcctctctgcggaaggaggactgcattgtgtgcggccgccgcgctccgaggtccccgggcctctgtctcccgggcgtcctccagcagcgggccttcggggccggtagccggctggagtacggggccttcgggagccgcgcgccttctccggcgtccgggtcgagcgcagatccctgtttattgggaaggatatgttcgattcttaaatacgccatctgacaaatcagaagatggaaggctaatttatactggcaatatggcccgagcagtgtttggtgtgaaatgtttctcttattctacgagtctgattggccttacatttctgccatacatttttacacaaaataatgctatttctgaaagtgtgcctctgcctattcaaatcatattctatggcatcatgggaagctttacggtgatcaccccagtgctgcttcactttattacaaaaggctatgtcattcgattgtaccatgaggccacaacagacacttataaagccattacctacaatgctatgcttgcagaaacgagtacagtgtttcaccagaatgatgtgaagattccagatgctaaacatgtatttaccacattttatgctaaaacaaaatcactgttagttaatccagtgctctttccaaaccgtgaagactatatccatctaatgggttatgacaaagaagaatttattttgtatatggaagaaaccagtgaagagaaacggcataaagatgacaaatgagcctatttgttagtgttcgtgctcaaatgtgatttacgttttaatgtataataataaaattgccttttgcattccgttagtgactgattgttaaaaataatttgaaattatcaaagcttttaatttccagagaatgatgtttgtttataataaaacaagctatgtttgaaaaccaaaatgtagtatctaccattcgtgttttagaaaggtatgtgaataaatatgttcatgctagtataagagttctgtgttactgtggttgactctaaactggggatctgatgtcagtagcaaatgggagagttgctttattctttgtgtatggatttttctaagtgtataaatattttccgacattaaaagacattttctctttgaggaagacacagtcataggtggtgcggagctgtggtccacctgctcctgctcctgactcactgctctttgctgttgcctgaggaccaagtctgtcaggaagctggctaggaagccttgcagcagccatggcttttaaacataccagaaaaacacccgtggagtcagaggtggcaattcaccgaattcatatcactctaacgagttgcaacgtaaaatccctggataaggtgtgtgctgacttgatctgaggagcaaaggaaaagaatcagtgaaaggaccagtttgaatgcctaccaagactttgagaatcactacaagaaaaacttacggtgaaggttctaaggcatgggatcgtttccagatgagaatccacaagcgactcattgacttgcgcagtcctcagatagttaagcagattacttccatcagtattgagccaggagttgagatggaagtcaccattgcaaatgcttaagtcaactgttttcataaattgattaccagttgttaaaaaattttcaaaaaaccgcaaaatttcaagaaattcacaaattatgggagcagttttaagtcttctttggttcagaacacaggtttttgcctaacccctggcatgattgcccataagaacatacatgtacagttgaactggtggttagctatacgggaaatggtaagtagtgttgtcttcagtatcttaatttgtttctgcaactgtgcactcctcccttggtggcaccctatgggtgtaggaaaaccactgttattaaacaggtgaaaaataaaaaatttttcaaaaaaaaaaaaaaaaaaaa

SEQ ID NO: 957 - DNA, 2495 bp, human
gttgagctcctgcagccgccgccgctgcagtggtcgtccctgccctccccggccccggggtgcaccccgcaaggctcccgctggtgtccctggagcatgggaggctgctgagcgtgagtggcggtgtctggcaggagctgcgtggcagggagggcgtccatggctgcagccaacaagggtaagtgccttcctggcgtggtaggacttgcacaagctcttccggtgggccctggtaggagggccattgctgcaggcaacaagcccagagtccggagtatccgctttgcggcaggccacgatgcagaaggatcccacagccacgtccactttgatgagaagctgcatgactcggtggtcatggtcacccaggagagtgacagcagctttctggtcaaggttggcttcctgaagatcctgcacaggtatgagattaccttcactctgcccccagtgcacaggctgagcaaggatgtccgcgaggcacctgtccccagcctgcacctcaagctcctcagcgtggtgcccgtccctgaaggtgcgtcccctcctccagcagggcctggatgggtgtgggagtgagaacatggggtgctcccttacttccaactagggtggatgggcagctcagcaagtcggggatgtggcacctctttgtgagcttgcactgtggcagcatggcaggtcccacactccaggccttgctccctgtcctgaacagaagtccatgagctcatacttccctgtacctgcccatggtgtgatggttacctccgtggggcagtaaccaagatgggagctgctgaggaactggtttgaagcctccagccttccctcctgcctccctaaccctctagaaaaacctgctggagctacacacaccgtgtggataactcctagcacccaccagtcccagaccttgggtttcaggctgctgctcctatcaggctcacttcaggccctgccccatgccccactcccagcctggcagaggctagggtgtcagtttcgtggagctccagcttcagtttcatgtccccgtcaccagcctcctcatgaccttgcccttcaatggattgacacccctcaggcctttacctcttgccatcggatctgctcaaagcctaccctgccctgcccccctcactcctcatcaccgcctctccctgccttccttttgggagaaaacagccagaccttcttttggaagcctgaatcggaccctacttcattcactcttggagccacattggggtggcccacaggctggaggcatgtccagctcactgaagaatgggtttttgagacctgtgcacccctgctagggggaatgggtctctgggctccagaagggccatccctgcccctttcttgggggggcttagcatgcagtccccccatggtggtgggtaggggcccgtgagtgccaggggcaggatcggggaggctgggggaggtgctgaccaattgcccctgtccccgggcaggttatagtgtcaagtgtgagtactcggcgcacaaagagggcgtcctcaaagaggagatactgctagcctgcgaaggtggcactggcacctgtgtgcgcgtgacggtgcaggcccgcgtcatgggtgggagcgtgaggctcctggttggaggagggatgcacaagctcgactgcgagggtttctgtcctcctcagggaaccaaggctgaacaagggatccttgcccggctcaggggttctcaacctccttggcaggtccctacctccagctgatccctgagggaaggggaggggtccccttagtgggccgcatgggtggggccgggggccagcatggcactgacttgcaccctgccttgcagaccggcaccacggcacgcccatgctgctggatggtgtcaagtgtgtgggcgccgagctggaatacgactcagagcacagcgactggcacggctttgactgaggcccgaggccccgcctgccccgggcccctcagccttaaaccccgccttgtccccccgacatgctgcgtgatggtgtggcttcctcgcccctctctggggtgggtgtgggggtggagtggccttgcccacgcctctcacctctgccttcatttgtgctgccaccctgcccctccctcgtcctcctctcccgcttcctcctctctgtgtgcctcagtctcctgccggaagaaatgggttgagcccgaaaggaggctgtctgaggaagggagagggagggcctggggtgggtcccccactccccaccccaagccacaggggctcccaccagggtctgggagaggacggagctggctctgtggcgtcgtggccccattactgctgccttgcttcagccacctctcctgcccctccctagtccccactgctgtccaccatgagtaggagggaggtgcagtccccagcccccacccctcaggtctgtgttacttggtttttaagcgactggttgggatagaaccctaaagaaataaacttccagtggataccgg

SEQ ID NO: 958 - DNA, 1208 bp, human
acagttcggcacgtaggacggagggtagtgcgtctagagacacatattccccacggatttgacgatggtgttcggtcttgaatggaaatgtagtcttaggccagtcttaggtttttgaacaggatagtaggtatccggagtcgattgagggccagagcaggcactggggttcggatcctgggcaaagtttcccacgttgagggtctcgaggacgcctagatctctttcccagggccatggcgaacccgaagctgctgggaatggggctaagcgaggcggaggcgatcggtgctgattcggcgcgatttgaggagctgctgctgcaggcctcgaaggagctccagcaagcccagacaaccagaccagaatcgacacaaatccagcctcagcctggtttctgcataaagaccaactcctcggaagggaaggttttcatcaacatctgccactccccctctatccctcctcccgccgacgtgaccgaggaggagctgcttcagatgctagaggaggaccaagctgggtttcgcatccccatgagtctgggagagcctcatgcagaactggatgcaaaaggccagggatgtaccgcctacgacgtagctgtcaacagcgacttctaccggaggatgcagaacagcgatttcttgcgggagctcgtgatcaccatcgccagggagggccttgaggacaaatacaacttgcagctgaatccggaatggcgcatgatgaagaaccggccattcatgggctccatctcgcagcagaacatccgctcggagcagcgtcctcggatccaggagctgggggacctgtacacgcccgcccccgggagagctgagtcagggcctgaaaagcctcacctgaacctgtggctggaagcccccgacctcctcttggccgaagttgacctccccaaactggatggagccctggggctgtcgctggagatcggggagaaccgcctggtgatggggggcccccagcagctgtatcatctagacgcttatatcccgctgcagatcaactctcatgagagcaaggcagccttccaccggaagagaaagcaattaatggtggccatgccgcttctgccggtgccttcttgatcagggtgtctccttgtgcttctgagatgtggagaagaggctgctggcttccctaaaagttgaaataaaagatttttgcctttaaaaaaaaaaaaaaaa

SEQ ID NO: 959 - DNA, 5817 bp, human
ggaggcggccacggccgtagtcgctgcctgagagttgttgtttcctcctcctcctcctccgcctccgccgccgttgcttgaatggtggagccgaagctcggctcgtgaacacacactgacagctatagggcaggcggcggcaccgtccccgcttcccctcggcggcggggtgtcccgtcggcggccctgaagtgacccataaacatgtcttgtgagaggaaaggcctctcggagctgcgatcggagctctacttcctcatcgcccggttcctggaagatggaccctgtcagcaggcggctcaggtgctgatccgcgaggtggccgagaaggagctgctgccccggcgcaccgactggaccgggaaggagcatcccaggacctaccagaatctggtgaagtattacagacacttagcacctgatcacttgctgcaaatatgtcatcgactaggacctcttcttgaacaagaaattcctcaaagtgttcctggagtacaaactttattaggagctggaagacagtctttactacgcacaaataaaagctgcaagcatgttgtgtggaaaggatctgctctggctgcgttgcactgtggaagaccacctgagtcaccagttaactatggtagcccacccagcattgcggatactctgttttcaaggaagctgaatgggaaatacagacttgagcgacttgttccaactgcagtgtatcagcacatgaaaatgcataaacgaattcttggacacttgtcatctgtgtactgtgtaacttttgatcgaactggcagacggatatttactggttctgatgactgtcttgtgaaaatatgggcaacagatgatgggaggttgttagctaccttaagaggacatgctgctgaaatatcagacatggctgtaaactatgagaataccatgatagcagctggaagttgtgataaaatgatccgagtctggtgtcttcgaacctgtgcacctttggctgttcttcagggccatagtgcatctattacatcactacagttctcaccattgtgcagtggctcaaagagatatctatcttctactggggcagatggcactatttgtttttggctctgggatgctggaacccttaaaataaacccaagacctgcaaaatttacagagcgccctcggcctggagttcaaatgatctgttcttcttttagtgctggtggaatgtttctggcgacgggaagcacagatcatattattcgggtttatttttttggatcaggtcagccagagaaaatatcagaattggagtttcatactgacaaagttgacagtatccagttttccaacactagtaacaggtttgtaagtggcagtcgtgatgggacagcacgtatttggcaatttaaacgaagagagtggaagagcattttgttggatatggctactcgtccagcaggccaaaaccttcaaggaatagaagataaaatcacaaaaatgaaggttactatggtagcttgggatcgacatgacaatacagttataactgcagttaataacatgactctgaaagtttggaattcttacactggtcaactaattcatgtcctgatgggtcatgaagatgaggtatttgttcttgaaccacacccgttcgatcctagagttctcttttctgctggtcatgatggaaacgtgatagtgtgggatctggcaagaggagtcaaaatacgatcttatttcaatatgattgaaggccaaggacatggcgcagtatttgactgcaaatgctctcctgatggtcagcattttgcatgcacagactctcatggacatcttttaatttttggctttgggtccagtagcaaatatgacaagatagcagatcagatgttctttcatagtgattatcggccacttattcgtgatgccaacaattttgtattagatgaacagactcagcaagcacctcatcttatgcctcccccttttttggttgatgttgatggtaaccctcatccatcaagatatcaaagattagttcctggccgtgaaaattgcagggaggagcaactcatccctcagatgggagtaacttcctcaggactgaatcaagttttaagtcagcaagcaaaccaggagatcagcccactggacagcatgattcaaagactacaacaggagcaagacctgagacgttctggtgaagcaggtatcagtaataccagccgtttaagtagaggctccataagttctacctcagaggttcattcaccaccaaacgtaggactaagacgtagtggacaaattgaaggtgtacggcaaatgcacagcaacgcaccaagaagtgaaatagccacagagcgggatctggtagcttggagtcgaagggtggtagtacccgagctatcagctggtgtagccagtaggcaagaagaatggagaactgcaaagggagaagaagaaataaagacttacaggtcagaagagaaaagaaaacacttaactgttccaaaagagaataaaatacccactgtctcaaagaatcatgctcatgagcatttcctggatcttggagaatccaaaaagcaacagacaaatcaacacaattatcgtacaagatctgcattggaagagactcctagaccctcagaagagatagaaaatggcagtagttcttcagatgaaggcgaagtagttgctgtcagtggtggaacatccgaagaagaagagagagcatggcacagtgatggcagttctagtgactactccagtgattactctgactggacagcagatgcaggaattaatctgcagccaccaaagaaagttcctaagaataaaaccaagaaagcagaaagcagttcagatgaagaagaagaatctgaaaaacagaagcaaaaacagattaaaaaggaaaagaaaaaagtaaatgaagaaaaagatggaccaatatcaccaaagaaaaagaagcccaaagaaagaaaacaaaagagattggctgtgggagaactaactgaaaatggtttgacattagaagaatggttgccatcaacatggattacagataccattccccgaagatgtccatttgtgccacagatgggtgatgaggtttattatttccgacaaggacatgaagcctatgtcgaaatggcccggaaaaataaaatatatagtatcaatcccaaaaaacaaccatggcataaaatggagctacgggaacaagaacttatgaaaatagttggcataaagtatgaagtgggattacctaccctttgctgccttaaacttgcttttctagatcctgatactggtaaactgactggcggatcatttaccatgaaataccatgatatgcctgacgttatagatttcctagtcttgagacaacaatttgatgatgcaaaatacaggcgatggaatataggtgaccgcttcaggtctgtcatagatgatgcctggtggtttggaacaatcgaaagccaggaacctcttcaacttgagtaccctgatagtctgtttcaatgctacaatgtttgctgggacaatggagatacagaaaagatgagtccttgggatatggagcttatacctaataatgctgtatttcctgaagaactaggtaccagtgttcctttaactgatggtgagtgcagatcactaatctataaacctcttgatggagaatggggtaccaatcccagggatgaagaatgtgaaagaattgtggcaggaataaaccagttgatgacactagatattgcctcagcatttgtggcccccgtggatctgcaagcctatcccatgtattgcacagtagtggcatatccaacggatctaagtacaattaaacaaagactggaaaacaggttttacaggcgggtttcttccctaatgtgggaagttcgatatatagagcataatacacgaacatttaatgagcctggaagccctattgtgaaatctgctaaattcgtgactgatcttcttctacattttataaaggatcagacttgttataacataattccactttataattcaatgaagaagaaagttttgtctgattctgaggatgaagagaaagatgctgatgtgccaggaacttctactcgaaaaaggaaggaccatcagcctagaagaagattacgtaatagagcccagtcttacgatattcaagcatggaagaaacagtgtgaagaattgttaaatctcatatttcaatgtgaagattcagagcctttccgtcagccggtagatctccttgaatatccagactacagagacatcattgacactccaatggattttgctaccgttagagaaactttagaggctgggaattatgagtcaccaatggagttatgtaaagatgtcagacttattttcagtaattccaaagcatatacaccaagcaaaagatcaaggatttacagcatgagtttgcgcctgtctgctttctttgaagaacacattagttcagttttatcagattataaatctgctcttcgttttcataaaagaaataccataaccaaaaggaggaagaaaagaaacagaagcagctctgtttccagtagtgctgcatcaagccctgaaaggaaaaaaaggatcttaaaaccccagctaaaatcagaaagctctacctctgcattctctacacctacacgatcaataccgccaagacacaatgctgctcagataaacggtaaaacagaatctagttctgtggttcgaaccagaagcaaccgagtggttgtagatccagttgtcactgagcaaccatctacttcttcagctgcaaagacttttattacaaaagctaatgcatctgcaataccagggaaaacaatactagagaattctgtgaaacattccaaagctttgaatactctttccagtcctggtcaatccagttttagtcatggcactaggaataattctgcaaaagaaaacatggaaaaggaaaagccagtcaaacgtaaaatgaagtcatctgtactcccaaaggcgtccactctttcaaagtcatcagctgtcattgagcaaggagattgtaagaacaacgctcttgtaccaggaaccattcaagtaaatggccatggaggacagccatcaaaacttgtgaagaggggacctggaaggaaacctaaagtagaagttaataccaatagtggtgaaattatacacaagaaaaggggtagaaagcccaaaaagctacagtatgcaaagccagaagatttagagcaaaataatgtgcatcccatcagagatgaagtacttccttcttcaacatgcaattttctttctgaaactaataatgtaaaggaagatttgttacagaaaaagaatcgtggaggtaggaagcccaaaaggaagatgaagacacaaaaattagatgcagatctcctagtccctgcaagtgtcaaagtgttaaggagaagtaaccgaaaaaagatagatgatcctatagatgaggaagaagagtttgaagaactcaaaggctctgaaccccacatgagaactagaaatcaaggtcgaaggacagctttctataatgaggatgactctgaagaggagcaaaggcagctgttgttcgaagacacctctttaacttttggaacttctagtagaggacgagtccgaaagttgactgaaaaagcaaaagctaatttaattggttggtaacttgtaccaaaatattttacttcaaaatctataaagcaggtacagttaaggaataagtagaactaaggcttctgcttccttgctgctgtggtggagtagggaatgttatgatttgatttgcaaaaaaaaaaaaaaaaaaaaaaaaaa

SEQ ID NO: 960 - DNA, 2248 bp, human
aacaatgtgccacgtcttctaagaagggggagtcctgaacttgtctgaagcccttgtccgtaagccttgaactacgttcttaaatctatgaagtcgagggacctttcgctgcttttgtagggacttctttccttgcttcagcaacatgaggcttttcttgtggaacgcggtcttgactctgttcgtcacttctttgattggggctttgatccctgaaccagaagtgaaaattgaagttctccagaagccattcatctgccatcgcaagaccaaaggaggggatttgatgttggtccactatgaaggctacttagaaaaggacggctccttatttcactccactcacaaacataacaatggtcagcccatttggtttaccctgggcatcctggaggctctcaaaggttgggaccagggcttgaaaggaatgtgtgtaggagagaagagaaagctcatcattcctcctgctctgggctatggaaaagaaggaaaaggtaaaattcccccagaaagtacactgatatttaatattgatctcctggagattcgaaatggaccaagatcccatgaatcattccaagaaatggatcttaatgatgactggaaactctctaaagatgaggttaaagcatatttaaagaaggagtttgaaaaacatggtgcggtggtgaatgaaagtcatcatgatgctttggtggaggatatttttgataaagaagatgaagacaaagatgggtttatatctgccagagaatttacatataaacacgatgagttatagagatacatctacccttttaatatagcactcatctttcaagagagggcagtcatctttaaagaacattttatttttatacaatgttctttcttgctttgttttttatttttatatattttttctgactcctatttaaagaaccccttaggtttctaagtacccatttctttctgataagttattgggaagaaaaagctaattggtctttgaatagaagacttctggacaatttttcactttcacagatatgaagctttgttttactttctcacttataaatttaaaatgttgcaactgggaatataccacgacatgagaccaggttatagcacaaattagcaccctatatttctgcttccctctattttctccaagttagaggtcaacatttgaaaagccttttgcaatagcccaaggcttgctattttcatgttataatgaaatagtttatgtgtaactggctctgagtctctgcttgaggaccagaggaaaatggttgttggacctgacttgttaatggctactgctttactaaggagatgtgcaatgctgaagttagaaacaaggttaatagccaggcatggtggctcatgcctgtaatcccagcactttgggaggctgaggcgggcggatcacctgaggttgggagttcgagaccagcctgaccaacacggagaaaccctatctctactaaaaatacaaaagtagccgggcgtggtgatgcgtgcctgtaatcccagctacccaggaaggctgaggcggcagaatcacttgaacccggaggcggaggttgcggtaagccgagatcacctccagcctggacactctgtctcgaaaaaaagaaaagaaacacggttaataacatataaatatgtatgcattgagacatgctacctaggacttaagctgatgaagcttggctcctagtgattggtggcctattatgataaataggacaaatcatttatgtgtgagtttctttgtaataaaatgtatcaatatgttatagatgaggtagaaagttatatttatattcaatatttacttcttaaggctagcggaatatccttcctggttctttaatgggtagtctatagtatattatactacaataacattgtatcataagataaagtagtaaaccagtctacattttcccatttctgtctcatcaaaaactgaagttagctgggtgtggtggctcatgcctgtaatcccagcactttgggggccaaggagggtggatcacttgagatcaggagttcaagaccagcctggccaacatggtgaaaccttgtctctactaaaaatacaaaaattagccaggcgtggtggtgcacacctgtagtcccagctactcgggaggctgagacaggagatttgcttgaacccgggaggcggaggttgcagtgagccaagattgtgccactgcactccagcctgggtgacagagcaagactccatctc

SEQ ID NO: 961 - DNA, 2729 bp, human
ctggatggactagccggggccatggccggcgcggcggcggagtcagggcgggagctgtggaccttcgcgggttcccgggacccgagcgcaccgcggctagcctacggctacggcccgggcagcctgcgcgagctgcgggcgcgcgagttcagccgcctggcaggaactgtctatcttgaccatgcaggtgccaccttgttctcccagagccagctcgaaagcttcactagtgatctcatggaaaacacttatggtaatcctcacagccagaacatcagcagcaagctcacccatgacactgtggagcaggtgcgctacagaatcctggcgcacttccacaccaccgcagaagactacactgtgatcttcactgccgggagcacggctgctctcaaactggtggcagaggcctttccatgggtgtcccagggcccagagagcagtgggagtcgcttctgttacctcaccgacagccacacctccgtagtgggtatgaggaacgtgaccatggctataaatgtcatatccatcccggtcaggccagaggacctgtggtctgcagaggaacgtggtgcttcagccagcaacccagactgccagctgccgcatctcttctgctacccagctcagagtaacttttctggagtcagataccccctgtcctggatagaagaggtcaagtctgggcggttgcgccctgtgagcacgcctgggaagtggtttgtgctgctggatgcagcctcctacgtgagcacctcgcctttggacctgtcagctcaccaggccgactttgtccccatctccttctataagatcttcgggtttcctacaggcctgggcgctctgctggtccataatcgtgcggctcctctactgaggaagacctactttggaggagggacagcctctgcgtacctagcaggagaagacttctacatcccgaggcagtcggtagctcagaggtttgaagatggcaccatctcattccttgatgttatcgcgctaaaacatggatttgacaccctagagcgcctcacaggtggaatggagaatataaagcagcacaccttcaccttggctcagtatacctacatggccctgtcctctctccagtaccccaatggagcccctgtggtgcggatttacagcgattctgagttcagcagccctgaggttcagggcccgatcatcaattttaatgtgctggatgacaaagggaacatcattggttactcccaggtggacaaaatggccagtctttacaacatccacctgcgaactggctgcttctgtaacactggggcctgccagaggcacctgggcataagcaacgagatggtcaggaagcattttcaggctggtcatgtctgtggggacaatatggacctcatagatgggcagcccacaggatctgtgaggatttcatttggatacatgtcgacgctggatgatgtccaggcctttcttaggttcatcatagacactcgcctgcactcatcaggggactggcctgtccctcaggcccatgctgacaccggggagactggagccccatcagcagacagccaggctgatgttatacctgctgtcatgggcagacgtagcctctcgcctcaggaagatgccctcacaggctccagggtttggaacaactcgtctactgtgaatgctgtgcctgtggccccacctgtgtgtgatgtcgccagaacccagccgactccttcagagaaagctgcaggagtcctggagggggcccttgggccacatgttgtcactaacctttatctctatccaatcaaatcctgtgctgcatttgaggtgaccaggtggcctgtaggaaaccaagggctgctatatgaccggagctggatggttgtgaatcacaatggtgtttgcctgagtcagaagcaggaaccccggctctgcctgatccagcccttcatcgacttgcggcaaaggatcatggtcatcaaagccaaagggatggagcctatagaggtgcctcttgaggaaaatagtgaacggactcagattcgccaaagcagggtctgtgctgacagagtaagtacttatgattgtggagaaaaaatttcaagctggttgtcaacattttttggccgtccttgtaatttgatcaaacaaagttcaaactctcaaaggaatgcaaagaagaaacatggaaaagatcaacttcctggtacaatggccaccctttctctggtgaatgaggcacagtatctgctgatcaacacatccagtattttggaacttcaccggcaactaaacaccagtgatgagaatggaaaggaggaattattctcactgaaggatctcagcttgcgttttcgtgccaatattattatcaatggaaaaagggcttttgaagaagagaaatgggatgagatttcaattggctctttgcgtttccaggttttggggccttgtcacagatgccagatgatttgcatcgaccagcaaactgggcaacgaaaccagcatgttttccaaaaactttctgagagtcgtgaaacaaaggtgaactttggcatgtacctgatgcatgcatcattggatttatcctccccatgtttcctgtctgtaggatctcaggtgctccctgtgttgaaagagaatgtggaaggtcatgatttacctgcatctgagaaacaccaggatgttacctcctaaaaaaaatttttagcatacattaaagtttctcttttacagtg

SEQ ID NO: 962 - DNA, 1734 bp, human
attgtgggaagggcggccggtgcagccgcagctgccatcttaggggcgcctggcgctacgggtttctcgttggaggcggccttcgtggcagctgtagacgccgggaaaaggcataaagtccgttggccgacacctttctttcctccggcctcggtagaaccgccagcccgcgtccgaaggcggaggcgaggggaactggccgcgtgaggggcctgaggcgagcggttagagcgtctcccggaaggatgggccggtctcggagccggagctcgtcccgctccaagcacaccaagagcagcaagcacaacaagaagcgcagccggtcccggtcgcgatcccgggacaaggagcgcgtgcggaagcgttccaaatctcgggaaagtaaacggaaccggcggcgggagtcgcggtcccgttcgcgctccaccaacacggccgtgtcccggcgcgagcgggaccgggagcgcgcctcgtccccgcccgaccgcatcgacatcttcgggcgcacggtgagcaagcgcagcagcctggacgagaagcagaagcgagaggaggaggagaagaaagcggagttcgagcggcagcgaaaaattcgacagcaagaaatagaagaaaaactcatcgaggaagaaacagcacgaagagtagaagaattggtagcaaaaagggtggaggaagaactggagaaaaggaaggatgaaattgaacgagaagttctccgaagggtggaggaagccaaacgcatcatggaaaagcagttgctcgaagaactcgagcgacagagacaagctgagcttgccgcacaaaaagctagagaggaggaagaacgtgcaaaacgtgaggagctagagcgaatactggaagagaataaccgaaaaattgcagaagcacaagccaaactggccgaagaacagttgagaattgttgaagaacaaagaaagattcatgaggaaaggatgaaactagaacaagaacgacaacgtcaacagaaagaagaacaaaaaattatcctgggcaaggggaagtccaggccaaaactgtccttctcattaaaaacccaggattaaattgcaaactctgaactttttacaaagaaaaatggaaaaactttgtatggtagcttcatgttgaagtggttttttgtttttgtttttgtttttttaatttgtaaaatctggaaagttagcttgttctaataggggctatgctctgcaattcccttttttttttttttttccttccactaagtcaaatccttatcagatcattgttgtattctaaggagtgacgtatttttcacctgtttggattctatattagtggtctgaggaagagcagatcacattgtaaaactatggatggtctgataaggcttttactgaccccactgacttcagagttatactctgcttgctacatcataatgctggttttgctgactttttgtttttttatatatttataaaaaaagaaaaagttggtgattgcattgggaaattcccagggtattactggacctatgtggtgtattgttaaaccagtgtccttgtgatactgtcgctcttgatgttcctgatacaggtaaggaaacagttggtcaactctgatacaaagtatatatacagttcagtattgtctctgttcattttgtttttatttcattgacaaaatcaaaccagcattccccattgtgtaaataaatgattttgctgaataaagtaaagtcttaaattc

SEQ ID NO: 963 - DNA, 1497 bp, human
gttggacgtgttcgcttgggttcctgctgcggcagccacctcgcaatctctctgcatcgatcgccgctcgcaagctactgaccgtactcgggcgtattaggagccgcgttccagcctcacaccccacggtgctgttttcgacttcagaaaggatctagcctcagcacagaagcgcctcaggcgcggcgcaaagctcgagcggacggcgggggcggccggagcctctctcgggggagccgcgcctgaggaggcggaagaacccccctgacgcgactggcgtgtgcttctgcccgccaccgcccctcccgctctcacccgggccgtccctggccactgcccctgccgcggaggcagcggcggcagcggctctcctttccacagccggcgctccgcgacccgcttggctcctgagcccgtcgggtaggctctcctcgagttcccgctcttcaccccttccctcaccctcttctttcgtcacccgtccccgaccccacccgagcccggcgcctcagctgcccccggccatggcgtgcggagccactctgaaaaggactctggatttcgacccgctgttgagcccggcgtccccgaagcgcaggcgatgtgcgccattgtcggcgcccacctcggccgctgcctccccgttgtcggcggccgcggccaccgccgcctccttctccgctgcggccgcctcgccgcagaagtatctccgaatggagccatcccccttcggcgacgtctcctcccgcctcaccacagaacaaattctgtacaacataaaacaagagtataaacgaatgcagaagagaagacatttagaaacgagtttccaacagacagatccgtgttgtacttctgatgcacagccacatgcatttctcctcagtggaccagcttcaccagggacttcatctgcagcatcctcaccattaaaaaaagaacagcccttatttactctacggcaggttgggatgatctgtgaacgtttgttgaaagaacgtgaagagaaagttcgagaagaatatgaagaaatattgaacacaaaacttgcagaacaatatgatgcgtttgtgaagtttacgcatgatcaaataatgcgacgatatggagaacagcctgctagctatgtttcatgaatcacgtatcctgcatttgtgggctgccttgttccttgttgagttgttgcaagaggtcccaattatgacatgcagcaatgccaataccccttctgtgaatacaggttatttcaagctttcgtcagtggcaaccactcttaggcagcagcaactggttttggaaatttccctgatgtcagtaccacctggatgtggacctttgctacctgtattaataccagtggcctcattttgctgtatcattacaatttggcttcttatattaatgtttgaaaaggattaaagctggtattctagaacatgcccttcactggttgtgtaaataaaactgtagaatgacaaaaaaaaaaaaaaaaaaaaa

SEQ ID NO: 964 - DNA, 1892 bp, human
gggagccggtaccgaggcccgagccgcgggagtcgagcgaagacagcgccgaggccgcggtttccccctgggcctccccagcagcgccatgggcatcaaatttttagaagttatcaaaccattctgtgcagttctaccagaaattcagaaaccggaaaggaaaatccagtttagagagaaggttctgtggactgctataacgctcttcattttcttagtgtgttgtcagatcccactgtttggaatcatgtcatcagattctgcagatcctttctactggatgagagttattctggcttccaatagaggaactttaatggaattgggtatctccccaattgtaacatctggtttgattatgcagttgttagctggtgccaaaatcattgaagttggagatacaccgaaagatagagctttattcaatggagcccagaaactgtttggtatgatcattaccattgggcaagccattgtgtatgtcatgacggggatgtatggggaccctgcagaaatgggtgccggaatctgtctcctgatcatcattcagttgtttgttgctggtttgattgtgctgctgttagatgagctgctacagaagggttacggcttggggtctgggatttccctctttattgccaccaacatctgtgagaccattgtctggaaggcctttagtcccactaccattaacactggcagaggtactgagtttgagggtgcagtcatagctctgttccatttgttggccaccaggacggacaaagtccgagctttacgggaggctttttatcggcagaacttacccaatctcatgaacctcattgctacagtttttgtgtttgctgttgttatatatttccaaggatttcgcgttgatctgcccattaagtcggcccgttaccgaggacagtacagcagctaccccatcaaactcttctacacctccaacatccccatcatcctccagtcggccctggtgtccaacctgtatgttatttcccagatgctgtctgttcgatttagtggcaactttttagtaaatttactaggacagtgggccgatgtcagtgggggaggacccgcacgttcttacccagttggaggcctttgttactatctttctcctcctgagtccatgggcgccatctttgaggatcctgtccatgtcgttgtttatatcatcttcatgttggggtcatgtgcattcttctctaagacatggattgaagtgtctggttcctcagccaaagatgtagctaaacagctgaaagaacagcagatggtaatgaggggccaccgagatacctctatggttcatgagcttaataggtacatccccaccgcagctgcgtttggcggtttgtgcattggcgccctgtcagtgctggctgacttcctgggggccattggatctggcactggaattctgctagcagtcactattatttaccagtattttgaaatatttgttaaagaacaggccgaagttggtgggatgggtgctttgtttttctaaatgttcaaatatttcattttgtgcgtgtgaaagggaaaacactttgacggatcgtttttgtcagatgacactggtggctccccttttctcccctcacagtttcttgtttcgagtgctgactgacccgtttctgaaatgggcaccgagctaagtctgtgtgcagcattagtacccgctgccttaaaactcaagtttacattattcattaaaaaaagtacatctagtgttgcctgtaatgctggaaaccagtgtatctaccttgctgtgttaaatcatgacagtgagacggtgagatggattcgttttgcacacaacattcaaaacacttcatattgcccccacttgttgaaaaataaatgtagttcaaattgcc

SEQ ID NO: 965 - DNA, 2001 bp, human
gaagggcggcgcgcttaggcaggcggtggcgcggctggagtgccgcggggagggctgtgccggttgctttctgcagccgcatctcggccagctctcctcgccgtccccggggcgctgtgcgtctccagtccgggaccgaagccgcctgccgtagcgggcggccagatccgcgtcccgcctcagcggccggaggacatgcgggagagagaatgagccagagggacacgctggtgcatctgtttgccggaggatgtggtggtacagtgggagctattctgacatgtccactggaagttgtaaaaacacgactgcagtcatcttctgtgacgctttatatttctgaagttcagctgaacaccatggctggagccagtgtcaaccgagtagtgtctcccggacctcttcattgcctaaaggtgatcttggaaaaagaagggcctcgttccttgtttagaggactaggccccaatttagtgggggtagccccttccagagcaatatactttgctgcttattcaaactgcaaggaaaagttgaatgatgtatttgatcctgattctacccaagtacatatgatttcagctgcaatggcaggttttactgcaatcacagcaaccaaccccatttggcttataaagactcggttacagcttgatgcaaggaaccgcggggaaaggcgaatgggtgcttttgaatgtgttcgtaaagtgtatcagacagatggactaaaaggattttataggggcatgtctgcttcatatgctggtatatcagagactgttatccattttgttatttatgaaagtataaaacaaaaactactggaatataagactgcttctacaatggaaaatggtgaagagtctgtgaaagaagcatcagattttgtgggaatgatgctagctgctgccacctcaaaaacttgtgccacaactatagcatatccacatgttgtaagaacaagactacgtgaagagggaacaaaatacagatctttttttcagactctatctttgcttgttcaagaagaaggttatgggtctctttatcgtggtctgacaactcatctagtgagacagattccaaacacagccattatgatggccacctatgaattggtggtttacctactcaatggatagcagcacgaggactgctgtactgcaaaaaaagaagaccaaaagattacagtggaccatgggatacagaagccagcatggcagacagaagaaaaatagtttgggaacatgtaactattctaagtggaagttttgttgtaggaattatagtaatcacaccacattacttggcctttcggtaatgtgaaaaaaaaaaaaaaacctcagagcctccaaggaaatgcctttagaagcactcctctctcaaaattgccattttctctaccatgtcccccagacacagttgggttttgttgatttatggcagtcttctaaacaaagccatccttaattttacatactgtattgtaactatccaaagatagtattggcagtcataaatttataacttctggcctttgtttaattccagtaaaataacagcaatgacaatgagatcgtcagtattattttcacatttccctgagaggacctggcacaatattttaaatttaattatttggcagtagtcactgtttttgacaaccaatgaaatagcgtctaaatatcttgtatattttttagcatcaaaatgttttggtttccactgctgacaggtgcttgttgtttagcctaatgtggatatttaaattgttaacataccaaacacacatggtaatagtttgggacaaaataactagtaaaatgttgatttctcggctatttcactgactgcggcatgtcctcgtgtcttctctgattttgtggtacatgaatgaatgcatttatctttttagtgacttactagttacgaacttgaattatcacctctttgtcatacttaagtatcatttacataaagtgtaaaagattttttcacttt

SEQ ID NO: 966 - DNA, 2944 bp, human
atatgatccgctcggcttcctgggtctggctgctgccgcccgccggtgtccgcccgtgtcgcgccggggcaccaaggagccgttggagggtccgggcggaggcccgctcgtgtggaagtcgtcgacgccgccgctcgtccgtcctcccgtccgttctcgctcccggccgccatcatgctggcgctcatctcccgcctgctggactggttccgttcgctcttctggaaggaagagatggagctgacgctcgtggggctgcagtactcgggcaagaccaccttcgtcaatgtcatcgcgtcaggtcaattcagtgaagatatgatacccacagtgggcttcaacatgaggaaggtaactaaaggtaacgtcacaataaagatctgggacataggaggacaaccccgatttcgaagcatgtgggagcggtattgcagaggagtcaatgctattgtttacatgatagatgctgcagatcgtgaaaagatagaagcttcccgaaatgagctacataatcttctagataaaccacagttacaaggaattccagtgctagtgcttggaaacaagagagatcttcctaatgccttggatgagaaacagctaattgaaaaaatgaatctgtctgctattcaggatagagaaatttgctgctattcaatttcttgcaaagaaaaggataatatagatatcacacttcagtggcttattcagcattcaaaatctagaagaagctgaagcatctcttgaagtcttccagtccttcttggctataatcctagaattattgtccgttcctctgaagtaattcccagaatacggtccttcctaaaccccagaaattgcctttttcagagtctatttctcatgtgcactgctgaagatgaatatccctaatccttcataaagaatcagctagagttgtcatgataaagtcagcacacacaaaaaggcttcttacacataccaaaaaaaatgtcttaaaccatgtgtagagctttaaaaacagaaaaaaaaccccatatacttatgaccatcttaaatcaagaaaattgcatatttccattctggtctttctgggccagatttttatattggttttcagtaaatgtctatctataatatttcattatagagtccagtagcttaatactgacactgacttgatacagcacgaagtttctagtgccacacacagtatttagaaaacctttaggcgtgaatgactcatgtgggatatatgtaaacataatgtttattttatctcacaaatgcatgtgaaatgtataattacatcttaggaatccaaaatggtctgcagagagtgagcggaggcaccagatcaatgttggttctttgcactggtgagattctgcctgatgaatattaaagatatcctgctttctgagaactctatcaccagatggcagttgggatatgggaggaactaaagcatcctgttttgtatctgtccagatcattatttctgtctcttgttttttcttcctggttcaggatacttttttaaggggttgagaattgaagattttccaaaagcgttcatgaatttagagcattccacccaatataataaaacctgttaagaatgtcagtctttgttcaaacatctgtttgttctatctccagtcattaaatcagtgctgctgcatgacactcttaactcctgactttttatatccagtcataaagttgactttcagcacaaaagatacttataaacaaataaaaaatttttatttttctctcttactgatgtaagctttggcactcttttgactggtgccattagacatcttgattattgtgacaactctagacctgcctgctttatctaatgtaatcatgctcaatgtctacaggttgtttaataatcagtcacacagagaactgaggaactgatgctgtttgtttgcttctatgatacagagatgtctaaaaacttcaaatggacatgttttgtagtttagcgacttccgtatacataaagggacatattaatactggttcatttgtaaattattattcatatagaccactgtagtagataaaactctatggtacacctgcttatgtgttgcctcacactgtgtgtgattttgtttcttttgttaagcagcacttatgtagactgcatttccaaatgtgttgagcactcggagtgtagtcaacagtaagttcttttaatgaatatcagttttaatttatagactgccatggccttaaaaatattctgtacaatatactgcactgtgttgcacagacactacttgcttttctccattcatatttttatgagtagaatctgggcttttaaatttctcttcttattctttgaagcatgttgcatactaccctggtgggatggatggttctgtaaatgaagggatatttaaacttgctactgttgttcaacaccattaatggtcagtgtgaaccattacaaagaatgtggcaacttgcttgtgcctaaaaggaggaattggaactagaatgtgtgactctgtggggactgcataggtttgttaattgacctatagctaaaccttaatgtgtttgtgtgtctatacattgctttccgcatttcaagacatccagacgctattaccaacattttcctgtgcattaacctctgcatgtgaaaacttttaacagttactgaactatgtaaatatgtgaatttttttatttaggtggatgcattttttgtctgtttactgctcttctcagctttattcaataaacttgcattttaagggttgtattggcaattttaacttaaaatgtgcatcatgatggaaggtgcagacttttttggaagtttccgagaggagggtctatagaccatttgtcagaaatcagatcagccctcaaagaatggggtctgtgggctagttaaaatagaaataaacttttaaaatatccacag

SEQ ID NO: 967 - DNA, 2611 bp, human
accggctcgcggcgcgtggaggctgctcccagccgcgcgcgagtcagactcgggtgggggtcccggcggcggtagcggcggcggcggtgcgagcatgtcgtggctcttcggcattaacaagggccccaagggtgaaggcgcggggccgccgccgcctttgccgcccgcgcagcccggggccgagggcggcggggaccgcgggttgggagaccggccggcgcccaaggacaaatggagcaacttcgaccccaccggcctggagcgcgccgccaaggcggcgcgcgagctggagcactcgcgttatgccaaggacgccctgaatctggcacagatgcaggagcagacgctgcagttggagcaacagtccaagctcaaaatgcggctggaagccctgagcctgctgcacacactagtctgggcatggagtctctgccgtgccggagccgtgcagacacaggagcggctgtcaggcagtgccagccctgagcaagtgccagctggtgagtgctgtgctctgcaggagtatgaggccgccgtggagcagctcaagagcgagcagatccgggcgcaggctgaggagaggaggaagaccctgagcgaggagacccggcagcaccaggccagggcccagtatcaagacaagctggcccggcagcgctacgaggaccaactgaagcagcagcaacttctcaatgaggagaatttacggaagcaggaggagtccgtgcagaagcaggaagccatgcggcgagccaccgtggagcgggagatggagctgcggcacaagaatgagatgctgcgagtggaggccgaggcccgggcgcgcgccaaggccgagcgggagaatgcagacatcacccgcgagcagatccgcctgaaggcggccgagcaccgtcagaccgtcttggagtccatcaggacggctggcaccttgtttggggaaggattccgtgcctttgtgacagactgggacaaagtgacagccacggtggctgggctgacgctgctggctgttggggtctactcagccaagaatgccacgcttgtcgccggccgcttcatcgaggctcggctggggaagccgtccctagtgagggagacgtcccgcatcacggtgcttgaggcgctgcggcaccccatccaggtcagccggcggctcctcagtcgaccccaggacgcgctggagggtgttgtgctcagtcccagcctggaagcacgggtgcgcgacatcgccatagcaacaaggaacaccaagaagaaccgcagcctgtacaggaacatcctgatgtacgggccaccaggcaccgggaagacgctgtttgccaagaaactcgccctgcactcaggcatggactacgccatcatgacaggcggggacgtggcccccatggggcgggaaggcgtgaccgccatgcacaagctctttgactgggccaataccagccggcgcggcctcctgctctttgtggatgaagcggacgccttccttcggaagcgagccaccgagaagataagcgaggacctcagggccacactgaacgccttcctgtaccgcacgggccagcacagcaacaagttcatgctggtcctggccagcaaccaaccagagcagttcgactgggccatcaatgaccgcatcaatgagatggtccacttcgacctgccagggcaggaggaacgggagcgcctggtgagaatgtattttgacaagtatgttcttaagccggccacagaaggaaagcagcgcctgaagctggcccagtttgactacgggaggaagtgctcggaggtcgctcggctgacggagggcatgtcgggccgggagatcgctcagctggccgtgtcctggcaggccacggcgtatgcctccgaggacggggtcctgaccgaggccatgatggacacccgcgtgcaagatgctgtccagcagcaccagcagaagatgtgctggctgaaggcggaagggcctgggcgtggggacgagccctccccatcctgagtccacagggagatccacagctcacggagcctggccgcggacccctcccacccctgccttgccggcccctgcacatttaggatatgctcctggatggggactgggctgtgcccagggcctctgtcccccaggatgtcttgtggtggcggtcggtcgttctgccccccagggcaccccctgttgtaggcactggctagggaggggcaggcctccttcctgcccctcgagacactcttgggagatgcattttccgtctggctcacagggggagggtgaggctttgcaccccagcccctgcccaggccactgtgagggtgggtgctggctgagcccccggggcagcaggagccaggcaggtgatgtctttgttctcggctcccacagcagagccaggtgagggggcgcctgccagggccagacccaggtggggcagcctgaaccctgcttccccctgtggccggcatgccccgatctttcacacactggtgaccctgagagaggagggaggagggaacctggcgggggtgtctgaggccgcactgtcagctggccggtccaagcctgtggctggagctggggtctgtttacctaataaagtcccacaggtgcctc

SEQ ID NO: 968 - DNA, 2836 bp, human
ccgagcgggctgggggaggggagcgtggggccgacagttttgggggtgaaaaggcaaaaggcgggtgaaaggctgcctcccgagactctccttgcttggaattctgcccactctgcggagttagcagtcacgacctccagcacaggatgtggtaccacagattgtcccacctacacagcaggcttcaggacttgctgaagggaggagtcatatatccggcccttccacagcccaacttcaaaagcttacttcctttagctgtccattggcaccatacagcctccaagtctctgacttgtgcttggcagcaacatgaagatcattttgagctgaaatatgctaataccgtgatgcgctttgattacgtctggcttcgagaccactgccgctcagcatcgtgctacaactctaagactcaccagcgcagcctggatactgccagtgtggatttatgtatcaagccaaagaccattcgtctggatgagaccacactctttttcacttggccagatggtcatgtgactaaatatgatttgaattggctggtgaaaaacagctatgaagggcagaaacaaaaagtcatccagcctagaatactatggaatgctgaaatctaccagcaagcccaagttccatcggtagattgccagagcttcttagaaaccaacgagggactgaagaagtttctgcaaaactttctgctctatggaattgcattcgtagaaaatgtccctcccactcaagagcacacagagaagttggcagaaaggatcagcttaatcagagaaaccatttatgggaggatgtggtatttcacttcagacttctccagaggtgacactgcgtacaccaagctagctctggatcggcacactgacactacctattttcaagagccctgtggcattcaagtgtttcattgtcttaaacatgaaggaactggtggcaggacactgctagtagatggattctatgcagcagaacaggtacttcaaaaggcacctgaggaatttgaactcctcagtaaagtgccattgaagcatgaatatattgaagatgttggagaatgtcacaaccacatgattgggattgggccagtcttaaatatctacccatggaataaagagctgtatttgatcaggtacaacaactatgaccgggctgtcatcaataccgttccttatgatgtcgtccatcgctggtatacagcacaccggactctaacgatagagttgaggagacctgagaatgagttttgggtcaaactaaagcctggcagggtcctatttatagacaactggcgtgtcctacatggcagggaatgcttcactggctaccgccaactgtgtggctgctatttaacaagagatgatgtattaaacactgctcgcctcttggggcttcaggcttaaaattgacagcatctggattatgaatacacctggcaccctggctaccagaatttcatatgggcagaataatattgtgtcaaactctacttcagattgtctccttatcccatcccacaaaacagaatctgtccgtttctctagtaagggagacttgttggagaggcgggactctgagttatctaatgtcagacatctagtggggcagctctcttcctcatgttataacatggatccacttgttttatttaaaccttttaatataattttggtcagtctccttcagaaatataatctccatattgataggaaagcaataattgccatgaggtaacgatttttttcccaagtagatcagttagaaagaaatgcattctagaaataacaaaaatcctgataaagcaacaatttgcaaaatgtttggtcttaggacaccttaacactcttaaaagttattgaaggccccaaggagttcttgggtgtgggttctatctattgatactaattattttaggtattaagactgagaaatatttaaagctcaagaagaacacagaagcacacatccctcagctatgagagagatgacataaccatatgtcatgtagcctctggaaaagtcctctgtatcctcatgagataacgagagggggaaaaaaagctactactgcctttgtaacttccacttagcctactacagggctatgcacatcttagtttccaaaagtctgcttaatttcaaaagaaaaatgcctaattgaatgtaactcatcttggtgttattatacaaaataatttttaatctgcagacccacgaaaagggtctcagggactcctccaggggtcttcagaccatactttgagaacccatgggctagcgactaccttgagacagtcctttacctaggcctgtggattaaagggtttagctgaaaccctagattcttctctgtagtctaatagaactccaaacattgtaagaattgcttggtagcataagctcagggataaggtgggaattgagttcaaatatagtgttttatcttccacacaaatcatctctataggagttaaattaggaagtcacaacagcgcctgttgaacaaactcatcagtgtggtaatcctatgagggataattgcagaaaggttttagagacttgtgaggttccatatgataattctttacacctcccccccccaagagaaagtacacagggctattctgtaatattgttcagggaaatcagcatgatagatgctgtgcctccagagagttctctggagattactacccaaatgtgtattttggcaatttggtggtatttaggatgtaatatgttttcctccatttctgctaattttctctctctctctctcataacatactatacatgctaattgccaagatttgaatgagtcaaattt

SEQ ID NO: 969 - DNA, 2338 bp, human
aaaaggaggacgtagaaaaggggacaccggaaactcactcttcacccggaaatggttattgaggaacatggcgttgctggtgcgagtccttaggaaccagactagcatttctcagtgggttccagtatgcagccgattgatacctgtgtctcctacccaaggacagggggacagggctctgtctcgcacttcccagtggccccagatgagccagtcccgagcatgtggtggatcagaacagattcctggaatagacatacagctgaataggaagtatcacaccacacgtaagctttctactaccaaagattccccacagcctgttgaggagaaggttggtgctttcacaaagataatagaagccatgggattcacgggacctttgaaatacagtaaatggaagattaagattgcggccctgcgcatgtatactagctgtgtggagaaaactgacttcgaggaattctttctaaggtgtcagatgcctgatacattcaattcatggtttcttataaccctactccacgtctggatgtgtctagtccgaatgaagcaggaaggccggagtgggaagtacatgtgtcgtatcatagttcattttatgtgggaggatgttcagcagcgcggcagagtcatgggggttaatccctatatcctgaagaagaacatgatcctcatgacaaatcatttctatgcagcgatcttgggatatgatgaggggatcctttcagatgatcatgggctggccgctgccctctggagaaccttcttcaaccggaaatgtgaagaccctcgacatcttgaattgctggtagagtatgtgaggaaacagatacagtacctggactccatgaacggggaggatctgcttctgacaggggaggtgagctggcgccctctagtggagaagaatcctcagagcatcctgaagccccattctccgacttacaacgacgagggactttgatgggctgggccctccgcacggcccgccagctggcttcgaggaacctccaggagagaagtgcctgttggtccaggaccctgcagaaagtggcctgaactgacctctgaacagcatctgtcaaatacctggccccatttgtgttgagtttcctcttagtgtgcccaggagtctgatctgctggggtacagggctgggagaacccctagctctcccggggtgtcctctcccttaggggaagccccgagtgagagtcccccagcacacactccccaaccccctccagcaactacatgtgactgatagcttttcccaaaggccaaggaagggatggtgtaggttcaaaagggaaaccccccagggcctgctgtggcctaggagcagattgtaatgctgccgagtccggtcggtgaccacgcgttgtccctcggctttcagccatggggttgagttggccattaaaagaaacagagacttctctctgccatggcccttctttattccagggacttagaaacttgcctgagatggtggacgcagtaatgagggcaccgcgcagctcagttagagacggagaaagggaagaggctgggatggtctctgctgctcttgcctctagttcatggagatgtgtctctgttcaggccaagatacagccagccaggcctgtcgtctgggacccaggaggcctctgatgaccaagggctttcacatcctaagtcatttggaaggaggccttgagaacaaagtcacctttgtcactcccagtgaactgaatgaggaacatgctgtctcctgtcttggcctcccctttcatgagatactggggagaagagaacattcctcctggcttagttgtagcagacccagacctgtgcccagctttggtcccccttcccaacttctgaagcacgtgctgcagagccaccttggtctgagcacctgaggaccagcccctcctccctcagtgcgggtcatctcttgggggattttcttaaagtgaagaaagggggtggggaaccatattgcccctccctcccccatcaaacttccttcatttaacttgctataaaatgagtcatataaagaaactctatatgggtgaggtatatcccacttctgtgaaaacattacaaatcaaaccgcttctctcagtttatttaagatgcttttgttgcgagcggagctctagagtgaagcctcctgtgtgtgtgtgagataataacaccttgtaactcattacagctgggcactatttacataaaccagagctgagccaggcaggaatttgctgattaatttatttttaatggagtgaagtataccatgcaccaaaataaactttactgtgtgtacctaaaaaaaaaaaaaaaa

SEQ ID NO: 970 - DNA, 7030 bp, human
gggaaaagcagcgcagggcagagcaggcagggagggcggccggagcccggacacgggagcctcccagtcagttcaagacccgacatgagggaaaagggacgtaggaagaagggcaggacctgggcggaggccgccaagacggtcttagaaaaataccccaatacacccatgagtcataaagaaattcttcaagttatccagagagaaggactaaaagaaatcagaagtgggacttctcctcttgcatgcctgaatgcaatgcttcacacaaactccagaggtgaagagggcatcttctataaggttccaggtagaatgggagtatatactttgaagaaagatgtgccggatggggtgaaagagctgtcagaaggttcagaagaaagcagtgatggtcagtcagattcccagagttctgagaacagcagcagcagcagtgatggtggcagcaacaaggagggaaaaaagagcaggtggaaaaggaaagtatcgtcgtcctccccgcagtcaggctgcccatcacccaccattccagcaggtaaagtcatttctccatcacagaagcacagcaagaaggcactaaagcaggcgctaaagcagcaacagcagaagaagcagcagcagcaatgcaggccaagcatatccatctcctccaaccagcatctctcactaaagactgtcaaagcagccagtgactctgtacctgccaaacctgcaacatgggaaggaaagcaatctgatggacagacaggcagccctcaaaactcaaactccagcttttcttcctcagttaaagtggaaaatactttactaggcttggggaagaagtcattccagagatctgagagactccataccagacaaatgaaaagaactaaatgtgctgacattgacgttgagacaccggactccattctggttaatacaaatctgcgagcactgatcaacaagcacacattttcagtccttcctggagattgccagcaacgactgcttttactactcccagaggtagatcgacaggttggtccagatggtttaatgaagttaaatggctcagcccttaacaatgaattcttcacttcagcagcccaaggctggaaggaaagactctcagaaggtgagtttacacctgagatgcaggtgagaattcgacaagagattgagaaggagaaaaaagtggagccatggaaagaacaattctttgaaagctactatgggcagagttctggcctgagccttgaagattctaagaaattgacagcttctcccagtgatcccaaagtaaagaaaaccccagctgaacaaccaaaatccatgcctgtgtcagaggcctctcttatcagaatagttccagtagtctcccagtcagagtgtaaagaagaagcattgcaaatgtcatcaccaggcagaaaagaagagtgtgaaagccaaggtgaagtgcagccgaacttctccacatcttcagagcccctgctttcctcagctctcaatacacatgagcttagcagcattcttcccatcaagtgcccaaaggatgaggatctcttggagcagaagccagtcacctctgctgaacaggaatctgagaagaaccatctcaccacagcttctaattataacaaaagtgaaagccaagaatctttagttacatcgccaagcaaacccaagagtcctggggttgaaaaaccaatagtgaagcccacagcaggagcgggtccacaggagactaatatgaaagaacctctagcaactcttgttgatcagagcccagaaagcctcaagaggaagtcttccctcacccaagaagaggcccctgtgagctgggagaagaggccacgtgtcactgagaatcgccagcaccagcagccatttcaggtctcaccacagccctttctcaatagaggggacagaatccaggtgcgaaaagtaccacctctcaagatcccggtctccagaatctcccccatgccgtttcatccatcgcaggtctctcccagggctcgttttccagtctccatcactagtcctaacagaacaggagccagaactcttgcagacatcaaagcaaaagcccaactggtcaaagcacagagggcagcagctgccgctgccgccgcagctgctgcagccgcctcagttggagggaccattccaggacctggcccagggggtggacaaggtccaggagagggtggtgaagggcagactgctagaggaggcagtccaggctcagacagagtcagtgaaactggaaagggccccacactggaactggcaggaactggaagcaggggaggtacgagagagcttttaccctgtggtccagagactcagccccagtctgagaccaagaccaccccaagccaggcacagcctcatagtgtctctggagcacaactacagcaaacccccccagtgcctccaacacctgccgtcagtggagcatgcacaagtgtcccatcaccagcccacatagagaaattggataatgaaaaactgaaccccaccagagcaacagccacagtggcctctgtcagccatccacaagggcccagtagttgcagacaggagaaagcaccttctccaacaggtcctgctctaatctcaggtgcctcacctgttcattgtgcagctgatggcacagttgagctcaaagcaggtcctagtaagaatatacctaacccttcagcctcatcaaagacagatgctagtgtgccagtggctgtaactccctcccctttaacatctttattgaccacagccactttagaaaagcttcctgtaccccaggtcagtgcaactacagcacctgctggatcagctccaccctcgagcactttgccagcagcttctagccttaaaaccccaggaacttctttaaacatgaatggacccactttaagaccaacctctagtatccctgctaataatcctttagtgactcagctgcttcaaggcaaagatgttcccatggagcaaattctgcctaaacctctcaccaaagttgaaatgaaaacggttccactgactgcaaaagaggaaagggggatgggagcgctcatagctaccaacacaacagaaaatagcaccagagaggaagttaatgagagacagtcccatccagctacgcagcagcagctgggcaaaaccttgcaaagtaagcagctcccccaggttccaaggccccttcagctcttttcagctaaggagctgagggactccagcattgacacacaccaataccacgaaggactaagtaaagcaacccaagatcagatccttcagactctcattcagagggttcggaggcagaatcttctctcagttgtgccgccctcacagttcaacttcgctcactcaggtttccagctggaagacatctccacaagccagaggttcatgctgggttttgctggcagaaggacatccaaacctgcaatggcagggcactacttactgaatatttctacctacggccggggctcagagagctttaggaggacccattctgtaaaccctgaagatcgtttttgtctaagcagccccactgaagccttgaaaatgggatatacagactgtaaaaatgcaacaggagagagtagcagcagcaaagaagatgacactgatgaggaaagtactggtgatgagcaggaatctgtcacagtgaaagaggagccccaggtttcccagagtgctggcaagggtgacacaagttcaggacctcacagcagggaaactctatctaccagtgattgcttagctagcaagaatgtgaaggctgagataccattgaatgagcaaaccactttaagtaaggagaattacctgttcactagaggccaaacatttgatgaaaagaccctagccagagatttaattcaggcagcacagaagcagatggctcatgcagtgagaggtaaggcaatccgtagcagccccgagcttttcagttctactgttcttcctctgcctgcagacagccccacccaccagcccctactccttccacccctgcaaaccccgaagttgtatggaagccccacccagatagggccaagctatagaggcatgatcaatgtctccacctcatctgacatggaccataactctgctgtaccaggtagccaggtatctagcaatgtaggtgatgtcatgtcattttcagtgactgtcactaccatccctgctagccaagctatgaatcccagcagccatggccagaccattcctgttcaggcgttctccgaagagaacagcatagagggcacgccttcgaaatgttactgccgcttgaaagccatgatcatgtgcaaaggctgtggcgctttctgccatgatgattgcatcggcccctccaaactgtgcgtctcctgccttgtcgttcggtaatgagactagaaagagatacactgtaaaggagggggaagggaagggttgaccagttgggttttttgcgtccttttggaatcacagaaataaacaagtaggtttcagttgtcttcagagacaaatgttacttaatcaggaatacaaagtacagattttttacattttagaggaagagcaccttgtatagtaagtctaagtcaagcaagactttgtgaatttgtgacaagtttgcacttacaaaatcatgtaaatatgtcacattttgtttaacattatttttccaagtgtttaggtaataatgtattactttgaattcagattaatgttctactacttgtgactgagaaaagtttaatgccggcatggtaaaaggaagctgtctcccttctgacatttcctaggaagctaggaaaaggaaagtgaaggaatggtctaaagaaatgaccattcacactgattttgtctggacagtctggccgcaggttattcatagattattcagcctttgcaggacttggattcagggttttactcagtccctttaccttaggtggaatcttcttaaattgaaatttttggtaaggaattcatttcacaggtagtgtttcagactctgaaagccctgacttggttcttggcttctactgtactagttactagttactggtactgttgccaagcaatctgcttggaatttgtggatccctgctgttccctaatcccaccccctgccctgagacagtgaatgtagtccgtgaagggagtgcctctctgggaccccctgtgttgttacaggctgtgcagtgcaacaattccagcaaaaataccctatccccgcacttagtcattcgtggtaactaacaattttgaaatactcatataaaatgaacaggaaagtgttagtgattgggtgatttgagctacatcttgttgagcaaggggagtgaaaccacagaaactgttaaattgaacgtaaataactttggaaaacagttttgacactagaacaaggtcgcttctcttttcctcttctctcccaacctgttaacctagtgctagatagtcagctgctgttgcaggtagaaaagctcaccaatgccacatttgttcattctgttcaacctgttttgacctcccaggcatctgaacaggatgacatcatcttattatatcttactttacacatacgtgtatgtacacacacacacacaatacaagacatttttcctgttttagaaaatatagcccttgtttggattactgctgtctgagcactagaaatttctaatggaaagaggcctctgaatggctaagggaacatctggaaaggaaggaaaatgagccctaaaggttttttggttgcttgtttttgtttctttttctttcttgtttccttttttgtttttaaatccttctctagtgactgaagaaattgtgagtacataatatttaggtcatggttaaggaacattaaaataaacctgcagtttaacagaattttgtattaaatgggggagtgtcaatttgcatcatttgcatattgatttcaagtctcctaatttggaatgggtaaagtacaaatgttaatgcaacatagtacagttgtatttgtccttcatattcaggatgtgatatttacaaaatgcagaacagtttaaacttgttaagtcacattccagattaggagaaaatgggcaataatcatctctgttttgcccccattctactacccaccactgcccaccccacccccacatcacacactcttcgatgctttcccacagcccctgctccgctcctctccgtaagaaactcacttcactgtttttcacttttcacttctggcttttttgtggcccaaggccaatataggattaatatctgtgttccagcttcagccagaacgatatgtctgtccatctttctcctttcttccagcacacacagctaagagataagaaggctgcaaggattggggataaggagtatattttcaagccaagaaccagtagaaaacagaaataatggtgctcccaaatattcagtaccttgggcaatccaggaagggtttaaagagacctgttgctgcatagaactctccctgccctaccccttaactccaccttagtgccagggccgagggctggtctgcatgctggaagaggttgagagttttggaattgattccatgctaaatgtcagttaccagtttggattgatgaaagtgatttttctgctttacctttttcctgtcagaaaggttttcctctgtgctacccttaacttagggatgaacagactataactaggaaaggaggaaaggtatcagggatttttaagtccgtttagagagcaaaccatattgtgcctcttcatcttgacccaggctcttatagataggtcctaaacattgctgttcactagattatcttaacaaataatactcagctaaatatttgcatttaggaatactcctaaaacagatattgccaactagatacactgcctcaatcttgaccagacaagagaacagttaagttctctcagttgggtagtaacttgaataccagtctatttatcagttggtttcaacacagaggtttcaagtggaaagccattcatcttaaaagctgaacag

SEQ ID NO: 971 - DNA, 1923 bp, human
cttcctcctcctggccgcttagtctcacacccgccgggccgttgttcccgagacgttgttgagtcccctgtgtcctcttctgggtggaggaactgcaatgtctggtggagaacagaaaccagagaggtactatgtgggtgtggacgttggaacaggcagtgtccgtgcagctctggtggaccagagtggggtcctgttggcttttgcagaccagccaattaagaattgggagccccagttcaaccaccatgagcagtcctccgaggacatctgggctgcgtgctgtgttgtcacaaagaaagttgtacaagggattgatttaaaccaaattcgaggacttgggtttgatgccacgtgttctctggttgttttggataagcagtttcacccattaccagtcaaccaggaaggggattcccatcgaaacgtcatcatgtggctggaccatcgagcagtcagtcaagttaacaggatcaatgagaccaagcacagtgtcctccagtacgtcgggggggtgatgtctgtggaaatgcaggccccgaaacttctgtggctgaaagagaacttgagagagatttgctgggataaggcgggacatttctttgatctcccggacttcttatcgtggaaggcaacaggtgtcacagcacggtctctctgctccctggtgtgtaagtggacatattcagcagagaaaggctgggacgacagtttctggaaaatgattggtttggaagactttgttgcagataattacagcaaaataggaaaccaagtgctacctcctggagcttctcttggaaatgggctcacaccagaggcagcaagagaccttggccttctccctgggattgcggtcgcagcttcactcattgatgcccatgcaggaggactaggagtgattggggcagatgtgagagggcacggcctcatctgtgaggggcagccagtgacgtcacggctggctgtcatctgtggaacgtcttcttgtcacatggggatcagcaaagacccgatttttgtaccaggcgtctgggggccttatttctcagccatggtacctgggttctggctgaatgaaggtggtcagagcgttactggaaaattgatagaccacatggtacaaggccatgctgcttttccagaactacaagtaaaggccacagccagatgccagagtatatatgcatatttgaacagtcacctggatctgattaagaaggctcagcctgtgggtttccttactgttgatttacatgtttggccagatttccatggcaaccggtctcccttagcagatctgacactaaagggcatggtcaccggattgaaactgtctcaggaccttgatgatcttgccattctctacctggccacagttcaagccattgctttggggactcgcttcattatagaagccatggaggcagcagggcactcaatcagtactcttttcctatgtggaggcctcagcaagaatcccctttttgtgcaaatgcatgcggacattactggcatgcctgtggtcctgtcgcaagaggtggagtccgttcttgtgggtgctgctgttctgggtgcctgtgcctcaggggatttcgcttctgtacaggaagcaatggcaaaaatgagcaaagttgggaaagttgtgttcccgagactacaggataaaaaatactatgataagaaataccaagtattcctgaagctggttgaacaccagaaggagtatttggcgatcatgaatgatgactgaacagggcttgcaggtgctgatgccagaagcttctgtgccattgcattaaagacttctgtcatttgatccatgttcaagacccttgaggtattgtttcatcatttctgtattgtctttcaataaagaaaacaaacatgtgcaaccaaaaaaaaaaaaaaaaaaaaaaaaaa

SEQ ID NO: 972 - DNA, 3244 bp, human
agtgacaattaaagatggctgcgcccatgtaacatcactagcgaccggtgacctctttttcccccttgcctggctcctgtggtggcaggctgggcacgaggaccatgctgggccggagcctccgagaagtttctgcggcactgaaacaaggccaaattacaccaacagagctctgtcaaaaatgtctctctcttatcaagaaggccaagtttctaaatgcctacattactgtgtcagaagaggtggccttaaaacaagctgaagaatcagaaaagagatataagaatggacagtcacttggggatttagatggaattcctattgcagtaaaagacaatttcagcacttctggcattgagacaacatgtgcatcaaatatgctgaaaggttatataccaccttataatgctacagtagttcagaagttgttggatcagggagctctactaatgggaaaaacaaatttagatgagtttgctatgggatctgggagcacagatggtgtatttggaccagttaaaaacccctggagttattcaaaacgatatagagaaaagaggaagcagaatccccacagcgagaatgaagattcagactggctgataactggaggaagcccaggtgggagtgcagctgctgtatcggcgttcacatgctacgcggctttaggatcagatacaggaggatcgaccagaaatcctgctgcccactgtgggcttgttggtttcaaaccaagctatggcttagtttcccgtcatggtctcattcccctggtgaattcgatggatgtgccaggaatcttaaccagatgtgtggatgatgcagcaattgtgttgggtgcactggccggacctgaccccagggactctaccacagtacatgaacctattaataaaccattcatgcttcccagtttggcagatgtgagcaaactatgtataggaattccaaaggaatatcttgtaccggaattatcaagtgaagtacagtctctttggtccaaagctgctgacctctttgagtctgagggggccaaagtaattgaagtatcccttcctcacaccagttattcaattgtctgctaccatgtattgtgcacatcagaagtggcatcgaatatggcaagatttgatgggctacaatatggtcacagatgtgacattgatgtgtccactgaagccatgtatgctgcaaccagacgagaaggatttaatgatgtggtgagaggaagaattctctcaggaaactttttcttattaaaagaaaactatgaaaattattttgtcaaagcacagaaagtgagacgcctcattgctaatgactttgtaaatgcttttaactctggagtagatgtcttgctaactcccaccaccttgagtgaggcagtaccatacttggagttcatcaaagaggacaacagaacccgaagtgcccaggatgatatttttacacaagctgtaaatatggcaggattgccagcagtgagtatccctgttgcactctcaaaccaagggttgccaataggactgcagtttattggacgtgcgttttgtgaccagcagcttcttacagtagccaaatggtttgaaaaacaagtacagtttcctgttattcaacttcaagaactcatggatgattgttcagcagtccttgaaaatgaaaagttagcctctgtctctctaaaacagtaaacatatcttacaaattaaaatgacttttaggctgggtgcagtggctcacacctgtaatcccagcactttgggaggccaaggcgagcggatcatgaggtcagaagatctagaacagcctggtcaacatggtgaaaccccgtctctactaaaaatacaaaaattagccaggcttagtggcgggcatctgtagtcccagctactcaggaggctgaggcaggagaatcacttgaaccctggaggtggaggttgcagtgagccgagatcatgccactgcactgcactccagcctgggtgacaaagcaagactgtgtctcaaaataaataaataaaataaaataaaatgacgtacagagattctatattctagagagtcaaatggtcttgctcaattcttgtaattaggttcttgttaatacagtcattccatggaattactttttaaaattcctgtgacaattaataataaataacgtgtcagcatttagtaagcatccactaagtgtacaatacttctacaataacacaagatacctgttcctcaaagacaatgcattctgccataatgttcattaaagagtttacagtaaaaataagattagggataaacttctcaaaaattgtacatctgtgtaactaaagcactaacaaaaacatgaatagtccttctagaggtaacttggatagcctaggcaggcaacttatcatgtggtgaaggccgcctcaggggttgttaaaaatgcacagaaacaattgagtgcgattattggcttctgagcgctgagcagagcaggtggaagaggaactttgagcacaggaggaaatgcaaccagtcagggcccagaatcatgcaaatctcaggggtatgcctctctggggaggagctccacttgcagggactccttttatttccctaagaaagagctgaaatgactgagaactttcctttcctccttagagttacaattttacttctgctattccggagcccatgcctagaagccagaacaactccatgttacactgagttcatgctcctatttactgatcacaaatgagctcattaatgtcatcgaaacatttattgtaacctaacagaccatcacagattggaaacttggtagatagcagagcatggtattagtgaaaaaggttcaaaatacacaagtaacatacactctgaaaaacatgcagataatttgctgatgaagcagaagaggggatgcgcatggcaagaacttgccttaccccagattctctatatctcatggtttccttttcctcttgactgtctttacgagtgttttttatttgggaccctcgagcccagagatattaatggatatctgtattcaatatttgacaaaatctaatggaaaccatccatttactcatgataaggcttcatcactggatttctgtgtcttcactagaacaccattgtcatctcatattgatcaggtattttaatctagcacttacatattgttgataaatgaaagctgaattgttacttaataaattcactttgtttagcaaaaaaaaaaaaaaaaaaa

SEQ ID NO: 973 - DNA, 1250 bp, human
atggcggcaaccaagaggaaacggcgtggcaggctttgcagttcaggcgaagaagccaaaaagaaacgaaatagatgcggaccgccagctaagcggcacgtgacagcagaggaggtggaggaagaagagagggaccggatcccaggccccgtttgcaagggaaagtggaaaaataaggaacggattctcatcttttcttccagaggaataaattttagaacaagacatttaatgcaggacttgagaatgttgatgcctcattctaaagcagatactaaaatggatcgtaaggataagctatttgtgattaacgaggtttgtgaaatgaagaactgtaataaatgcatctattttgaagctaagaaaaaacaggatctctatatgtggctttcaaattcacctcacggaccatctgctaaattccttgttcaaaatattcataccctcgctgaactgaagatgactggaaactgtttgaaaggttctcggccccttttgtcttttgaccctgcttttgatgaattaccacattatgctttgttaaaagaactcttaattcagatctttagtacaccacggtatcatcccaaaagccaaccatttgtggaccacgtgtttactttcaccattttggataataggatatggtttcggaactttcagatcatagaagaagatgctgctcttgtagaaataggacctcgttttgtcttaaatctcataaagattttccagggaagttttggaggaccaactttatatgaaaatcctcactaccagtcaccaaacatgcatcggcgtgtcataagatccatcacagctgcaaaatacagagagaaacagcaagtgaaagatgtgccgcaaaaactgagaaagaaagagccgaagactcttcttccacatgatcccactgcagatgtttttgtaacaccagctgaggagaaaccaatagaaatacagtgggtaaaaccagagccaaaagttgatttgaaagcaagaaagaaacggatttacaaaaggcaaagaaaaatgaaacagaggatggacagtgggaaaacaaaataagtcaatggaaacctgatttgtttttcagttactttatatttattttgtattcaatgtgtaaatacttttattatctaatactatcttacgtctaattagtgtagcatttacaagaaagaaaaattaagatcttaaaatcagtgattatctttttctaaataaaatatcaccagaattcatcagtt

SEQ ID NO: 974 - DNA, 2547 bp, human
accgctacacatgcgccttgcaaggaagggcgagatttcgggggcggggcggggggcgggcctaggccggggtctcacagcgactgcgcggacgggttcctgagtggaacatggcgacttgcgccgaaatcctgcggagcgagttccccgaaattgacggacaggtcttcgactacgtgaccggcgtcttgcacagcggcagcgcggacttcgagtctgtggatgacctggtggaagctgtaggggaactattgcaagaggtgtccggggacagcaaggatgacgcgggcatcagggccgtgtgccagcgcatgtacaacactctgcgtctggctgagccacaaagccagggaaatagccaggtgctactggacgcccctatccagttgtcaaagataacggagaactacgactgtggaaccaaacttccaggactgctaaagagggaacagtcctcgacagtgaatgcaaagaagttagagaaggccgaggctcgacttaaggcaaagcaggagaagcgctcagagaaggacacgctcaagaccagcaaccctctagtcttagaagaggcatcagccagccaggcaggcagcagaaaggagagtcggttggaatcatctggcaagaacaaatcctatgatgtgcgaattgagaactttgatgtgtcttttggcgatagagtactgctggctggagcggatgtgaacctggcatggggccgccgttacgggctggtggggcggaatgggttggggaagacaacgttactgaagatgctggccacccggagtctgcgggttccagcccacatttccctgctgcacgttgagcaagaggttgctggagatgacactcctgccctgcagagtgtgctggagagtgacagtgtgcgagaggatttgctacggagggagcgggagctcactgcccagattgctgctggcagggcggagggctctgaagctgcagagctggcagaaatctatgccaaactggaggagattgaggctgacaaggcacctgccagggcatcagtcattctcgctgggcttggctttacccctaaaatgcagcagcagcccacccgggagttctcaggtggctggaggatgaggctggccctggcccgggccctctttgctaggccagatcttctgctgttagatgaacctacaaacatgctggatgtcagggccatcctgtggctggagaattacctgcagacgtggccctccaccatcctagtcgtctcccacgaccgcaacttcttgaatgccatcgccacagacatcatccacctgcacagccagcggctagatggttaccggggagactttgagaccttcatcaagagtaagcaggagcggctgctcaaccagcagcgtgaatatgaggcgcagcagcagtatcgccagcacatccaggttttcattgaccggtttcgctacaatgccaacagggcctctcaagtgcagagtaaactcaagatgctggagaagctgcctgagctgaggcctgtggacaaggaatcagaggtcgtaatgaagttccctgatgggtttgagaagttctcgccgccaattctgcagctagatgaggtggatttctactacgatccgaagcacgtcatcttcagtcgcctctctgtgtctgctgatctcgagtctcgcatctgtgtggttggagagaatggggctgggaagtctaccatgctgaagctgcttttgggggacctggcacctgttcggggcatcagacacgctcacaggaatctgaagattggctatttcagccagcaccatgtggagcagctggacctaaacgtcagtgctgtggaactgctggcacgcaagtttcctgggcggcctgaggaggagtaccgtcaccagctgggtcggtatggcatctccggagaactggccatgcgtcctcttgccagcctgtctgggggccagaagagccgagtggcctttgctcagatgactatgccctgccccaacttctacattctggatgaacccacaaaccacctggacatggagaccattgaggctctgggccgtgccctcaacaatttcaggggtggtgtgattctggtgtcccacgatgagcgctttatcaggctggtgtgccgggagttgtgggtgtgcgaaggaggcggcgtcacccgtgtggaaggaggatttgaccagtaccgcgccctcctccaggaacagttccgccgcgaaggcttcctctagggccaccaggctgaggactcgcccaggacatggactggtctctcagacccctgggccaccatgtaggccaccactccaggccgtggacttcccccaacttggggacagccttattcccaaatgtctctatccttttgactggagcatcttctgcacaaccttgggagcccatccaagggttggtgaggactggtctcccgggggtgggggtctggggggtaccctctggggttatagattcccccactgccccagctctgactggaccccaagtggctgctatgtaaattaaatctctccccgcgtc

SEQ ID NO: 975 - DNA, 2162 bp, human
agcgggccgcggccacccgctcctcccgctccggtcccgactgtcgggctctcggccgagtcgccccggacaatcacaaagagtgtgtaggccagccccggtcacagagtgcaccgtatcctgtcacttctggatgtgagggagaagtgagtcatctcattcccctccgtggatcagaggacttggactagatagaagcatgtggtgtctcctacgaggcctgggccggcctggagccctggcacggggagccctggggcagcagcaatccctgggtgcccgggccctggccagcgcaggctctgagagccgggacgagtacagctatgtggtggtgggcgcgggctcggcgggctgcgtgctggctgggaggctcacggaggaccccgccgagcgcgtgctgctgctggaggccgggcccaaggacgtgcgcgcggggagcaagcggctctcgtggaagatccacatgcccgcggccctggtggccaacctgtgcgacgacaggtacaactggtgctaccacacagaggtgcagcggggcctggacggccgcgtgctgtactggccacgcggccgcgtctggggtggctcctcatccctcaatgccatggtctacgtccgtgggcacgccgaggactacgagcgctggcagcgccagggcgcccgcggctgggactacgcgcactgcctgccctacttccgcaaggcgcagggccacgagctgggcgccagccggtaccggggcgccgatggcccgctgcgggtgtcccggggcaagaccaaccacccgctgcactgcgcattcctggaggccacgcagcaggccggctacccgctcaccgaggacatgaatggcttccagcaggagggcttcggctggatggacatgaccatccatgaaggcaaacggtggagcgcagcctgtgcctacctgcacccagcactgagccgcaccaacctcaaggccgaggccgagacgcttgtgagcagggtgctatttgagggcacccgtgcagtgggcgtggagtatgtcaagaatggccagagccacagggcttatgccagcaaggaggtgattctgagtggaggtgccatcaactctccacagctgctcatgctctctggcatcgggaatgctgatgacctcaagaaactgggcatccctgtggtgtgccacctacctggggttggccagaacctgcaagaccacctggagatctacattcagcaggcatgcacccgccctatcaccctccattcagcacagaagcccctgcggaaggtctgcattggtctggagtggctctggaaattcacaggggagggagccactgcccatctggaaacaggtgggttcatccgcagccagcctggggtcccccacccggacatccagttccatttcctgccatcccaagtgattgaccacgggcgggtccccacccagcaggaggcttaccaggtacatgtggggcccatgcggggcacgagtgtgggctggctcaaactgagaagtgccaatccccaagaccaccctgtgatccagcccaactacttgtcaacagaaactgatattgaggatttccgtctgtgtgtgaagctcaccagagaaatttttgcacaggaagccctggctccgttccgagggaaagagctccagccaggaagccacattcagtcagataaagagatagatgcctttgtgcgggcaaaagccgacagcgcctaccacccctcgtgcacctgtaagatgggccagccctccgatcccactgccgtggtggatccgcagacaagggtcctcggggtggaaaacctcagggtcgtcgatgcctccatcatgcctagcatggtcagcggcaacctgaacgcccccacaatcatgatcgcagagaaggcagctgacattatcaaggggcagcctgcactctgggacaaagatgtccctgtctacaagcccaggacgctggccacccagcgctaagacagttgctgctggaggatgaccagggaagccccctgataagccaagagggccagcacagcccttgctcccaggctcctgcctgaaactatctagcacactaggacccaggtggtaccctactcagtggctgagaattggataaagtcttgggaaatgagacaaaaaaaaaaaaaaa

SEQ ID NO: 976 - DNA, 556 bp, human
ggccacgaggggaaattgacgaacacgtgacgcggtcgggcggaccactgcagactgagcggtggaccgaattgggaccgctggcttataagcgatcatgtttctccagtattacctcaacgagcagggagatcgagtctatacgctgaagaaatttgacccgatgggacaacagacctgctcagcccatcctgctcggttctccccagatgacaaatactctcgacaccgaatcaccatcaagaaacgcttcaaggtgctcatgacccagcaaccgcgccctgtcctctgagggtcccttaaactgatgtcttttctgccacctgttacccctcggagactccgtaaccaaactcttcggactgtgagccctgatgcctttttgccagccatactctttggcatccagtctctcgtggcgattgattatgcttgtgtgaggcaatcatggtggcatcacccataaagggaacacatttgacttttttttctcatattttaaattactacaagattattaaagataaaatgattttgaaaaacaaaaaaaaaaaaa

SEQ ID NO: 977 - DNA, 1967 bp, human
agcgaggcagcagtgcagctttcagagggtccgggctcagaggggttatgattcggagggttctgccgcacggcatgggccggggcctcttgacccggaggccaggcacgcgcagaggaggcttttctctggactgggatggaaaggtgtctgagattaagaagaagatcaagtcgatcctgcctggaaggtcctgtgatctactgcaagacaccagccacctgcctcccgagcactcggatgtggtgatcgtgggaggtggggtgcttggcttgtctgtggcctattggctgaagaagctggagagcagacgaggtgctattcgagtgctagtggtggaacgggaccacacgtattcacaggcctccactgggctctcagtaggtgggatttgtcagcagttctcattgcctgagaacatccagctctccctcttttcagccagctttctacggaacatcaatgagtacctggccgtagtcgatgctcctcccctggacctccggttcaacccctcgggctacctcttgctggcttcagaaaaggatgctgcagccatggagagcaacgtgaaagtgcagaggcaggagggagccaaagtttctctgatgtctcctgatcagcttcggaacaagtttccctggataaacacagagggagtggctttggcgtcttatgggatggaggacgaaggttggtttgacccctggtgtctgctccaggggcttcggcgaaaggtccagtccttgggagtccttttctgccagggagaggtgacacgttttgtctcttcatctcaacgcatgttgaccacagatgacaaagcggtggtcttgaaaaggatccatgaagtccatgtgaagatggaccgcagcctggagtaccagcctgtggaatgcgccattgtgatcaacgcagccggagcctggtctgcgcaaatcgcagcactggctggtgttggagaggggccgcctggcaccctgcagggcaccaagctacctgtggagccgaggaaaaggtatgtgtatgtgtggcactgcccccagggaccaggcctagagactccgcttgttgcagacaccagtggagcctattttcgccgggaaggattaggtagcaactacctaggtggtcgtagccccactgagcaggaagaaccggacccggcgaacctggaagtggaccatgatttcttccaggacaaggtgtggccccatttggccctgagggtcccagcttttgagactctgaaggttcagagcgcctgggccggctattacgactacaacacctttgaccagaatggcgtggtgggcccccacccgctagttgtcaacatgtactttgctactggcttcagtggtcacgggctccagcaggcccctggcattgggcgagctgtagcagagatggtactgaagggcaggttccagaccatcgacctgagccccttcctctttacccgcttttacttgggagagaagatccaggagaacaacatcatctgagcatgtgtgctctgcactggctccactggcttgcatcctggctgtgttcacagccttgtttgctgcttccatcttccccagtactgtgccaggccttctccccctccccagtgtcctctcctctcaggcaggccattgcacccatatggctgggcaggcacaggcagtgaggccgaggccaatagcgagtgatgagcgggatcctaggactgatctgtagcccatgctgatgtcacccaccagggcaatccatctggaggcctgagcaccctggcccaggactggcttcatcctggcactgaccaggaaagactgcctctgaccctcttagcagacagagcccaggcatgggagcactctggggcagcctggctcaggtttattgattttcgtctgtttaccctatccattaatcaatacatgtaattaactccttccctccaaaaaaaaaaaaaaaaa

SEQ ID NO: 978 - DNA, 3077 bp, human
tcgagcggccgcccgggcaggtgcagcactgagccgccgacggggcgggtgggctttgctgccgagcaggcggcgccgtcttggggcctagcggcgaggcgacccgcacaggtgggcggtggcggtaggtgggtggccagcgactggcaacgcggtggcttagacgcgcgagatccggccagggtcagagtactgtaagattgatgttaaaggcatggtgttcaccccacttcatcagcgtacataagttatctcttcttttggacccttattttatgccataatgcaacaagctttagaactagctttggatcgtgcagagtatgtcattgaaagtgcccgacagagacctcctaaaaggaaatacctatcaagtggaagaaaatctgtatttcaaaaactttatgacttgtatattgaagaatgtgaaaaagaacctgaagttaagcagaaattaagaagaaatgtgaacttgttagagaagcttgttatgcaagagactttgtcatgtttagtggtcaatctatacccaggaaatgagggatattctctgatgctcaggggaaaaaacggatcagattccgagaccattcgactgccctatgaagaaggagagttgcttgaatatttggatgcagaagaattacctcctattttggttgatctcctagaaaaatctcaggttaatatttttcattgcggatgtgtcatagcagaaatacgtgactacaggcagtccagtaacatgaaatctcctggttaccaaagtcggcacattctcttacgtccaacaatgcagactttaatttgtgatgtacattcaataacaagtgataaccacaaatggacccaggaagacaaacttttgcttgagagccagctcatcctagctacagctgaaccactctgtcttgatccttctatagcagtcacctgcactgcaaacagactgctctataacaagcaaaagatgaacactcgcccaatgaaacggtgtttcaagaggtattccagatcctctctgaatcggcagcaagatctatctcattgtccacctcctcctcagctgaggttacttgatttcttacaaaaaagaaaggaaagaaaagcaggtcagcattatgacctcaaaatttctaaggcaggaaattgtgtagatatgtggaaacggagtccctgtaatttggccataccttctgaagtagatgtggagaaatatgctaaagtggaaaagtctatcaaatctgatgactcacagccaacagtctggccagcccatgatgtaaaagatgattatgtatttgaatgtgaagctggtactcagtatcagaaaacaaagctgaccatcttgcagtcgcttggagatccactttactatggtaaaatacagccatgtaaagcagatgaagaaagtgacagccagatgtctccatcacactcgtccacagatgatcattcaaattggttcattattggatcaaagaccgatgctgagagggtagtcaatcagtaccaagaattagtccagaatgaagccaaatgtccggtcaagatgtcacacagctccagtggctcagccagtctgagtcaggtttctccagggaaagaaacagatcaaactgaaaccgtgtcagttcagtcttcggtattggggaagggtgtaaaacatcgacccccaccaatcaaacttccctcaagctcaggaaatagttcctcaggtaactattttacaccacaacagacaagcagctttctcaaatctccaactcctcctccttcttctaagccatcaagtattcctcggaaatcatctgtggatctcaatcaagttagcatgctttctccagctgccctatcacctgccagctcatcacaaagaaccacggccacccaggtcatggcaaactctgctggacttaacttcatcaatgtagtgggctctgtttgtggggcccaggctttgatgagtggttcaaaccccatgctgggctgtaacactggtgccataactcctgcaggaataaacctgagcggccttctaccctcaggaggtctgctaccaaatgcactgcccagtgcaatgcaggcagcttctcaagcaggtgttccatttggtttaaaaaatacttcaagtctcaggcccttaaatctactccagcttccaggtggttcacttatttttaacactctgcagcagcagcaacagcagctctcccagtttacaccacaacaacctcagcagcccacaacttgtagtcctcaacagccaggggagcagggttctgagcaaggttcaaccagtcaagaacaggccttatctgctcagcaagctgctgttattaaccttactggagtaggaagttttatgcagtcacaggcagctgcagttgcgattcttgcagcatcaaatggctatggcagcagcagcagcacaaacagctcagctacatcatcatcggcatacaggcagccagtcaaaaagtaaaatgaagagaggcacgccaaccactccaaaattttgagtcttgcattactttttgttccttttttaaaaacacaagagcactgaatcaaaagaattgagtttctactttttgttttttttaatgtgtcagtattttacattgctagatgtacaaactttatacagaagcacaaccttatcatttttaaataaaaacagggaaatggtttaacaaaaaaaaagacctccccagcccctagcccaggagagagaaagccaggcaggtagccagggggactagcccctgtggagactggggggcttgaaattgtccccgtggtctcttactttcctttccccagcccagggtggacttagaaagcaggggctacaagagggaatccccgaaggtgctggaggtgggagcaggagattgagaaggagagaaagtgggtgagatgctggagaagagaggagaggagagaggcagagagcggtctcaggctggtgggaggggcgcccacctccccacgccctcccctcccctgctgcaggggctctggagagaaacaataaagagattcacacaaaaaaaaaaaaccggaattaagcc

SEQ ID NO: 979 - DNA, 1091 bp, human
gccacctgagcgccgctccctctcaggatgaaggtgacggtgggcccagacccttccctggtctaccgacctgatgtggacccagaggtggccaaagacaaggccagcttccggaactacacgtcaggtcccctcctggaccgtgtcttcaccacctacaagctcatgcacacgcaccagacagtggacttcgtcaggagcaagcatgcccagtttgggggcttctcctacaagaaaatgacagtcatggaggccgtggacctgctggatgggctggtggatgagtcggacccggacgtagatttccccaactccttccatgccttccagacagcggagggcatccggaaggcccacccagacaaggactggttccacctcgtcgggctcctgcacgacctggggaaggtcctggccctgttcggggagccccagtgggctgtcgtcggcgacaccttccccgtcggatgccgtccgcaggcctccgtggttttctgcgactccaccttccaggacaaccctgacctccaggatcctcgatacagcacagagctcgggatgtatcagccccactgtgggctcgacagggtcctcatgtcctggggccatgatgagtacatgtaccaggtgatgaagtttaacaagttctcactgccccctgaggctttctacatgatccggttccactccttctacccctggcacacgggccgcgactaccagcagctgtgcagccagcaggacctggccatgctgccctgggtgcgggagttcaacaagttcgacctctacaccaagtgcccggacctgccggacgtggacaagctgcggccctactaccaggggctcattgacaagtactgccctggcatcctgagctggtgaccctcctgccacccaagctgctgctggacctaggcctggccctccgcctgcctggagaggcctggccctgggcaaacagccgccatcagggttcacctcggtgggggaccccactcacccccttagggtcgccacccctcacggcaacttgtgcctggcgtcaataaagacctggaaggatgttgtgcttctgaaaaaaaaaaaaa

SEQ ID NO: 980 - DNA, 2945 bp, human
ggaagccagaccagagagcgtgcgtgtttttcccagggtgccccgcgctgctgttatggccgcctccttgaggtagtatccgcacatggaattctagggccgcaggtgtatttacggtaactgtcgccactagatttcagcgcctttggactctcctgttttcactttcttttgttgactcccgtgtggccctcgtgggagcctgttttggctgcagcggtgtctggggtgatgtggaccccggagctggcaattctgaggggattccccactgaggctgagcggcagcaatggaaacaggagggggtcgtcggttcagagagtggatctttcctacaattgctgctggaagggaactatgaagccatattcttaaattcaatgactcaaaatatttttaattcaacaacaaccgctgaagaaaagattgatagctacctggagaagcaggtagtaacattcctggattactcaacagatttggacacaacggaaagacaacagttgatatttctacttggtgtgagcagtttgcaactttttgttcagagcaactggacggggccccctgttgacttacaccctcaggactttttgtcatctgttttgttccagcaattcagtgaggttaaaggactggatgcatttgttctgagcctgctcactctagatggtgaatcaatctacagcctgacctcgaagcctatactactgttattagcacgcattatcctagtgaatgtaagacataaactgacagctattcagagcttgccatggtggactttgagatgtgtgaatattcatcagcatttgcttgaggaacgctcacctctgctttttactcttgccgaaaactgtattgatcaagtgatgaaactacagaatctgtttgtagatgattcaggtcgatatttggctattcaattccatctggaatgtgcatatgtgtttttatattattatgagtacagaaaagcaaaagatcagttggatattgctaaggacatcagccaattacaaattgatttgacaggtgctttgggaaaaagaacacggttccaggaaaattatgtggcacaactgattctagatgtaagaagggaaggggatgtcctttcaaattgtgaattcactccagcacccactcctcaggaacatttaaccaagaatcttgagctcaatgatgacaccattctgaatgacataaagttagcagattgtgaacagttccagatgccggatctgtgtgctgaagagatcgctattattcttggaatctgcactaattttcaaaagaataacccagtgcacacattaactgaagtggagcttctggcatttacatcatgtttgctttcacaaccaaagttctgggccattcagacatcagccttgatcctccggacaaaacttgagaaaggaagtactcgccgagtggaacgggcaatgaggcagacacaggctcttgcagaccaatttgaagataaaactacatctgtattggaacgcctgaagattttctattgctgtcaagtaccacctcactgggccattcagcgccaacttgcaagtttgctctttgagttgggatgtaccagttcagcccttcagatatttgaaaagctagaaatgtgggaagatgttgtcatttgttatgaaagagccgggcagcacggaaaggcagaagaaatccttagacaagagctggagaaaaaagaaacgcctagtttatactgcttgcttggagatgtcctcggagaccattcttgctatgacaaggcctgggagttgtcccggtaccgcagtgctcgtgctcagcgctccaaagccctccttcatcttcggaataaggagtttcaagagtgtgtagagtgcttcgaacgctcggttaagattaatcccatgcagctcggggtgtggttttctctcggttgtgcctatttggccttggaagactatcaaggttcagcaaaggcatttcagcgctgtgtgactctagaacccgataatgctgaagcttggaacaatttgtcaacttcctatatccgattaaaacaaaaagtaaaagcttttagaactttacaagaagctctcaagtgtaactatgaacactggcagatttgggaaaactacatcctcaccagcactgacgttggggaattttcagaagccattaaagcttatcaccggctcttggacttacgtgacaaatacaaagatgttcaggtccttaaaattctagtcagggcagtgattgatgggatgactgatcgaagtggagatgttgcaactggcctcaaaggaaagctgcaggagttatttggcagagtgacttcaagagtgacaaatgatggagaaatctggaggctgtatgcccacgtatatggaaatgggcagagtgaaaagcctgatgaaaatgaaaaggcattccagtgcctctcaaaggcatacaagtgtgacacccagtccaattgttgggagaaagatattacatcatttaaggaagttgttcaaagagccttaggacttgcacatgtggccataaaatgcagtaaaaacaaatccagttcccaagaagctgtacaaatgctttcttctgttcgactcaatttacggggcttgttatctaaagcaaagcaactttttacagatgtggcaactggagaaatgtccagggaattagctgatgacataacagctatggacaccttagtgacagagctccaagacctaagcaaccagtttcgaaatcagtattgattctgctggaagcagattctggaaaaggtgctttcacctgctgttaaaagatacatctgtatatctgaaatgcaagatattgatttttaaaataaatttgttttatgacttaaaaaaaaaaaaaaaaaaaaaaaaaaaaaaaaaaaaaaaaaaaaaaaaaaaaaaaaaaaaaaaaaaaaaaa

SEQ ID NO: 981 - DNA, 5534 bp, human
gtgggccgttgaatgtggctgctcgcggtcggcgtgccccgacgtacagcgggccgggaaaagtggcactgaggctctggaacttctgcccagctctccttgtaaaatgaatgaaagtaaacctggtgactcacagaaccttgcttgtgttttctgtcgaaaacatgatgactgtcctaataaatacggagaaaagaaaactaaggagaaatggaatctcactgtacattactactgtttgttgatgtcaagtggaatttggcagagaggcaaagaagaagaaggagtttatggttttctaatagaagatatcaggaaggaagtgaatagagcttctaaactgaaatgctgtgtttgcaagaaaaatggtgcttcaattggatgtgttgcaccccgatgtaaacgaagttatcatttcccatgtggacttcagagagaatgtattttccagtttactggcaattttgcgtcattttgttgggaccatcgacctgttcaaataattacatctaataattatagagagtccttaccatgcaccatttgcttggaatttattgagcctattccaagttataacatattacgaagtccttgttgtaagaacgcttggtttcatagagactgtttacaggttcaagcaataaatgcgggagtgtttttctttaggtgtacaatatgcaataatagtgacatctttcagaaagagatgttgagaatgggaattcatattcctgaaaaagatgcttcctgggaattagaggaaaacgcttatcaagagcttctgcagcactatgagcgttgtgatgttcgaagatgtcgttgcaaagaagggcgagactataatgcacctgatagcaaatgggaaataaagcgctgtcagtgttgtggttccagtggcacacatttagcctgctcctcattacggtcatgggagcaaaattgggagtgtttggaatgtaggggtattatctacaattcaggagagttccaaaaagccaaaaaacatgtattacccaattctaataatgtggggattacagattgtttgttggaagagtcatcacctaaattacccagacagtcacctggatcccagagtaaagatctactgaggcaaggcagcaaatttagaagaaatgtatcaacactattaatagagttaggattccaaattaaaaaaaaaactaaaagattgtatatcaacaaagccaatatctggaatagtgccttagatgcattcagaaatcgaaactttaatccttcatatgcaattgaagtagcatatgttattgaaaatgataattttggaagtgagcatcctggatcaaagcaagaatttctgagtctcttaatgcaacatcttgagaactcatcattgtttgaagggtccttgtcaaagaacttgtctctaaattctcaagctctgaaagagaatctttactatgaagctggcaaaatgcttgccatttctttagttcacggtggtccttcacctggtttcttttctaaaaccttgtttaactgccttgtttatggaccagaaaatacccagccaattttagatgatgtttcagactttgatgtggcacagattataatcaggataaatactgcaacaactgtagctgacttaaagtcaataataaatgaatgctataactaccttgagttaattggatgtctcagacttataacgacattaagtgataaatatatgttagtaaaagacatacttggctaccatgtaattcagagagtccacacaccctttgaaagttttaagcagggtctgaaaacccttggtgttttggagaaaattcaggcttatccagaagcattttgtagcatcctgtgtcataaacctgagagtctttctgcaaaaatccttagtgagctttttacagtacacacattacctgatgtgaaagctttggggttttggaacagttacttacaggctgttgaagatggtaaatctacaacaacaatggaagacattcttatttttgcaactggttgcagttccattcctccagctggatttaaacccactccttcaattgagtgtctgcatgtggattttcctgttggaaacaagtgtaataactgtttagcaattcccatcaccaatacatataaagagtttcaagaaaatatggacttcaccataagaaacactctaagactagaaaaggaagaaagttctcattacattggacattaaaatgtttccttgaacaaagagaagcttctttaaaagctgctattgataactctcttttatttcactaaccttttcatcatcactttgaacaaactagttagcttcttgacctaataaaatttatgatatgaatataaaggaatattatagccacttaggctaaaaaaaggttttttttgttaaagcatactagtcaaaattggtgataatttctcattttcttgatatagatacttcataaacctcaatataaatactctcaaaatggttgtatggattttatttaggtatggtagcatggttaataaaagtaaaaactgttttactcacattttttgtaaattaggattacatatagaatgccacaatttctctaggtttattcaattttcaaattattcctcattttattttaaagcattaaatagaaaagctaattggttaaattttgttatataaatcagagtcatatattctgggatttgtgttactatgcatacttttctaggatgtcaccaaattagttgtttaaaatgtttttagattactgatttatattaagatgacccacactgcaattagattatgcctagtgggaagtattatataaaaagcagaattaagctgggcacatgtgcttgtaatctcagttataagggaggctgaggtgggagaatcgagatactcagccagcctggcaatgtagcaaagactccatctcaaaaaaaaaaaacagaattgcacaaattttctggaatctatggacattccatgagcttaaacacttttgaggtggataacatttagttgaaaatacctaagaaagtgtgtcttctttaaagccttggctttaatcatgggaaattgttgttgttgttgttgttgtttgtatcctatgtttggtattctgtatgtctgatccataatcattttagatatttgaatgatctctgtggattggtaggtttggccatttgaccattatttattatcaagttggttgtatgctaaggtaagttgacgccatagcattatacagttatcttcattgctcttgaatgatatctgttatataagcaatgtataaataaagtaaaaaggatagaatgaaaaacccattctaatgtcaccactcagagataagtaccgtatttctgtgtatccttctataaactctttacttctgtttcctttattttttaactttaataatgctactaaaagacaatacctaaaagtaactgtactaacaaagtgctaacaatgtgaaaatatatagtcccatagtcatgtccccatatttatactcccacagaagaaaaaattggaaaacaaagtctgatgtccttaatctattaacatatttaaatgatataatggttcagttttccatgaaagtaaatcattatgggaagtaaaatgttttaaccatatttttcttaatacacaaagcaggtgtcagctgttgtattctcacccttcttaagaaaaatcattacattattgatattttttaagtaacagaatagatttgaaagagataatatatctcttaataccaaaggaaaactaaaacataattctagtgtacttttctttgttccctcatgtctttttcaatctgtacactaacatacctagcaaatttgttttactttaacttgaaatatttaagaacattaaacaagacatttctttggctttggttgaatttttttgtctcaccaatagtaattgaaagatcaattatcaaagagtttgaatagctaatataaaccccaaagtcaccatacagtttttattccaaatatgttgataaaaagatatttgtttctttatccaccttatttttattacagctaaaaaccaatacaaaccaataaaacctagttaaagctattttctggtttttagttgcaattaatttcccctagggtagaaattaaagctgattaagtcacacacacatactttgttggggtgggggtggcaggtggagaggcagtgtacttgggttagctacaattaaaaacagtatttcaattcctcatttgacttattttatatatagacagggccttagtgataagatggtgtaaataatttaggatattcatgttttaaagtgaagcataaatatttattttgcaaaatgttttctagtttgaaggatgttccattattaccatttttagattaatctgtatggtcaaggaatatcagagaaacctgtaggttatttattttctgcagtgtcattttgtcaaatggttggtattataattgttcttttcttattaattttataaccagtgcataattcttacattagattttaaaaaagaattatgctataaatctttataaatgtgtacatatatttcttaaatattgcaattgcctaaatgttgtatattttaaggctgttttctcttgctcttaatgttgaggaaaactataaattgatctataatgcatctactgttaatggttttggttagtttgatattcattgtttttaaacactttccaatatggaaactttaacaccttttatacaattctctactattcaagatattctttaaaatatctcaccagaaacttacaattttatactttgtaatttttagtttctgtaatttgaggaagtgactttttttgtttgggttaagtaaaaagcctttgattgattaccagcatgagaattcaccttggtttctattttatgcatttgtaaatttttcccctaattatatggaagctattggaacttttgtattcagtgctaaatactaagtcaaggggagtatattaggtaagttttttcagtgactgtgcctttagcattcagtcattataagaaaatgatcagaacaaaatcattacattataaacatgtaattcttttatatagtgattatcatgtactgcattgttactttaaaataagctattaaactagtttttatggttcaagtaatgcaatacaaagtttcatgcttcaagtaatgcaatacaaaacataacccatttaatgatgaattacttgaatgtatattatctgtggtttaggaaaatttggattgtcttgaagagacttagttttcaagttctgattttgaccattatctcttctaattcataaacatatcccagtacctacactatgccaggtattatgctaggtgatcgtttatatgtcagcctatttcccccccttttaaagactgccagattaaccaaaaagcgtgacatttataacaatgttttataaataaataaatgtgtttatgccactaaaggt

SEQ ID NO: 982 - DNA, 3477 bp, human
acatccaagatggcgtccccaggagctgggagcgggtgaccggcggcggggaagcggcctgggttggccctcagattgcggggtctgggggcatctcgccgggcaaacccttggcccgcctacaaggacttcccccggccagagcaatggccgctgagaacagcaagcagttttggaagaggagcgctaagctgccggggagcattcagcctgtatatggagcacagcatcctcctcttgacccacggctcaccaaaaatttcattaaagaacgatcaaaagtcaacacagttcctctgaagaataagaaggcctccagttttcatgagtttgcacggaataccagtgatgcttgggacattggcgatgatgaggaagaggacttttcctcaccttctttccaaactctgaactcaaaagttgctttggcaactgcagcccaagttctagaaaaccacagcaagctgagagtaaaaccagaacggtcccagtcaacgacatcggacgtccctgccaactacaaggtcataaagtccagcagtgatgcccagctgtccagaaactctagtgatacatgcctgaggaacccactccacaaacagcaatcactccctctccggcccatcatccccctcgttgcccggatctcggatcagaacgcttctggggcccccccaatgactgtccgggagaaaacccgcctagaaaaattccgtcagcttctctccagccagaacactgacttagatgaactgaggaagtgtagctggccaggggttcccagggaggttcgacctataacctggagactcctgtcgggctatctcccagcaaacactgagaggaggaagttgaccctgcagcggaagcgggaggaatattttggcttcattgaacagtattatgactctcgaaacgaggaacatcaccaggatacctacagacagattcacattgacattccaaggacgaatcctctcattccgttgttccagcaaccacttgtacaggagatctttgaaagaattctatttatttgggccatccgccaccctgccagtgggtatgtccagggaattaatgacctggtcactccattctttgtcgtcttcctctcagaatatgtggaagaggatgtggagaactttgacgtgaccaacttgtctcaagacatgctgcgaagcattgaggctgacagcttttggtgcatgagcaagctgctggatggaatccaggataactacacctttgcacaaccaggaatccagaagaaggtgaaggcactggaagagcttgtcagccggattgatgagcaggtacataatcacttcaggaggtacgaggtagaatacctgcagtttgccttccgctggatgaacaacctgcttatgcgggagcttcctcttcgctgcaccatccgcctgtgggacacatatcagtctgaaccagaagggttctcccactttcatctctacgtgtgtgcagccttcttgatcaagtggaggaaagagatcttggatgaggaggattttcagggtctcctcatgctgctacagaacctacctacaatacactggggcaacgaagaaattgggctgcttctcgccgaggcatacagactcaagtacatgtttgccgatgccccaaatcactaccgccgataggtgctgtctcctccggggacccagactgccttcatctctgatggcagtctgatcactgtggccactgtgcgagccgtggaccccggccaggaaccactcctgttgtacaaagctcacacccaccgcccaggtcttaactttctggcatccaccactccatgtctctggatgtgtcacttggaccactgtcagtattccatgccgcgtggatgggcccagttctgggagaggacagaaaaggtggtacagggttgtctgcccctttaaaagaaactggacaaagaaggggaaggctcagggtctcacctcacattgtccctacaaggacaggccccaactgataaccgttgcttttttttttttgtgaacatagtttgatttgatcacaggtcaaaaacgccttatattttcgaaagactcctggcccctcttccctcttcctggtttcctagccgttccccttctgccccagtctgagccagtgaggggtagctttttaaaaccattattctagatggaggaggcactgatgcttgtaactctggaaagaggcctacacccaagggctaggaattttatttttccttttctcaccaggtgtctgcatgtgtgtgtgggtgtgaatgtgtatacatgcccatcagcatttagtcacatgtctgaatttctgtgtccagacgagccccatcaaactagttgggaagggccccagtgaccaagtgtataagcatcccttgaagagggattggggcaggggaggcagaaggggctctccagaccccttttccatgatgacccactccaagatattatgtgtaaattgtgttattatgtatatgggtaaagatgtacaaatatatgtcctctttgtagcagatatgattttatatttataatgtgcatcaacatgtgaaagcaatctaggtcactagcacagaggaagttgccaggaaggtggcttcagcacctccaggttggttctgggtgtcctgctgtgaggggtagaacgggaggctgctgaagtgagtagctgagcagctggagccatcccaagcatcagtgtctcagagtcctcctcgcccctttcttcaccccgccccccaacccccagactttcctggagcatctgccctttgctcctagcagcctccccaggaagggactgcagaggcgggcaagccctctctatgtgtttttatccccaccttccccggaatctggggagggcttttgtttttacgttttcaagttcagcattgtattcggacagaagctgtgactgaagactcagtgccaaggaaaggggcttcttgtgtgtccctcgggtttggggctcttctcagagagcagcactccatatcccttactgtcaccttcactccccacacagctcatgagatgtgtgacccctgtttgagttttggtatttggtagtggagggtggggggatgggggccagcagctgtcatcctcctgggaagccgagcagtgtccctggtgggtaacaccctcaagtctctttgccagtgaggccccaccacatcggtgtgagttaggtttctcatctggagctgtttctcaggcattcttcccaaccctcttccttttccccttcggtgtgcctcagtggtctccttcatagagtgagagggcttgagaccctccctcaaccggactaattaaagaaagacacttgtgttcccaagtggtggttttatttttttagtttttatgtttgtatgggaaattgtggataaagtgaaaagaattgtaaataaatggtgtatttcctcctccaaaaaaaaaaaaaaaa

SEQ ID NO: 983 - DNA, 2907 bp, human
atgaggccggggacgggagctgagcgtggaggcctcatggtgagtgaaatggagagccatcctccctcgcagggtcctggggacggggagcggagattgtccggctcaagcctctgctccggctcttgggtctctgctgacggcttcctgaggagacggccctcgatggggcaccctggcatgcattatgccccaatgggaatgcaccctatgggtcagagagcgaatatgcctcctgtacctcatggaatgatgccgcagatgatgccccctatgggagggccaccaatgggacaaatgcctggaatgatgtcgtcagtaatgcctggaatgatgatgtctcatatgtctcaggcttccatgcagcctgccttaccgccaggagtaaatagtatggatgtagcagcaggtacagcatctggtgcaaaatcaatgtggactgaacataaatcacctgatggaaggacttactactacaacactgaaaccaaacagtctacctgggagaaaccagatgatcttaaaacacctgctgagcaactcttatctaaatgcccctggaaggaatacaaatcagattctggaaagccttactattataattctcaaacaaaagaatctcgctgggccaaacctaaagaacttgaggatcttgaagcaatgatcaaagctgaagaaagcagtaagcaagaagagtgcaccacaacatcaacagccccagtccctacaacagaaattccgaccacaatgagcaccatggctgctgccgaagcagcagctgctgttgttgcagcagcagcagcggcagcagcagcagcagctgcagccaatgctaatgcttccacttctgcttctaatactgtcagtggaactgttccagttgttcctgagcctgaagttacttccattgttgctactgttgtagataatgagaatacagtaactatttcaactgaggaacaagcacaacttactagtacccctgctattcaggatcaaagtgtggaagtatccagtaatactggagaagaaacatctaagcaagaaactgtagctgattttactcccaaaaaagaagaggaggagagccaaccagcaaagaaaacatacacttggaatacaaaggaagaggcaaagcaagcttttaaagaattattgaaagaaaagcgggtaccatcgaatgcttcatgggagcaggctatgaaaatgattattaatgatccacgatacagtgctttggcaaagttaagtgaaaaaaagcaagcctttaatgcctataaagtccagacagaaaaagaagaaaaagaagaagcaagatcaaagtacaaagaggctaaggaatcctttcagcgttttcttgaaaatcatgagaaaatgacttctacaaccagatacaaaaaagcagagcaaatgtttggagagatggaagtttggaatgcaatatcagaacgtgatcgtcttgaaatctatgaagatgttttgttctttctttcaaaaaaagaaaaggaacaagcaaagcagttgcgaaagagaaattgggaagccttaaaaaacatacttgacaacatggctaatgtaacatactctaccacttggtctgaagcccagcagtatctgatggataatccaacttttgcagaagatgaggagttacaaaatatggacaaagaagatgcattaatttgctttgaagaacacattcgggctttagaaaaggaggaagaagaagaaaaacagaagagtttgctgagagaaaggagacgacagcgaaaaaatagggaatctttccagatatttttagatgaattacatgaacatggacaactgcattctatgtcatcttggatggaattgtatccaactattagttctgatattagattcactaatatgcttggtcagcctggatcaactgcacttgatcttttcaagttttatgttgaggatcttaaagcacgttatcatgacgagaagaagataataaaagacattctaaaggataaaggatttgtagttgaagtaaacactacttttgaagattttgtggcgataatcagttcaactaaaagatcaactacattagatgctggaaatatcaaattggctttcaatagtttactagaaaaggcagaagcccgtgaacgtgaaagagaaaaagaagaggctcggaagatgaaacgaaaagaatctgcatttaagagtatgttaaaacaagctgctcctccgatagaattggatgctgtctgggaagatatccgtgagagatttgtaaaagagccagcatttgaggacataactctagaatctgaaagaaaacgaatatttaaagattttatgcatgtgcttgagcatgaatgtcagcatcatcattcaaagaacaagaaacattctaagaaatctaaaaaacatcataggaaacgttcccgctctcgatcggggtcagattcagatgatgatgatagccattcaaagaaaaaaagacagcgatcagagtctcgttctgcttcagaacattcttctagtgcagagtctgagagaagttataaaaagtcaaaaaagcataagaagaaaagtaagaagaggagacataaatctgactctccagaatccgatgctgagcgagagaaggataaaaaagaaaaagatcgggaaagtgaaaaagacagaactagacaaagatcagaatcaaaacacaaatcgcctaagaaaaagactggaaaggattctggtaattgggatacttctggcagcgaactgagtgaaggggaattggaaaagcgcagaagaacccttttggagcaactggatgatgatcaataaattataccaaatatatgtttacagtatgatttaaagtctgattcagaccagggactctattttaagttcaactgaaataacactggg

SEQ ID NO: 984 - DNA, 3527 bp, human
agtgaccgccctttgccactccccctgcctcctctccgcctttaacttctcgggaagatgaggcagtttggcatctgtggccgagttgctgttgccgggtgatagttggagcggagacttagcataatggcagaacctgtttctccactgaagcactttgtgctggctaagaaggcgattactgcaatctttgaccagttactggagtttgttactgaaggatcacattttgttgaagcaacatataagaatccggaacttgatcgaatagccactgaagatgatctggtagaaatgcaaggatataaagacaagctttccatcattggtgaggtgctatctcggagacacatgaaggtggcattttttggcaggacaagcagtgggaagagctctgttatcaatgcaatgttgtgggataaagttctccctagtgggattggccatataaccaattgcttcctaagtgttgaaggaactgatggagataaagcctatcttatgacagaaggatcagatgaaaaaaagagtgtgaagacagttaatcaactggcccatgcccttcacatggacaaagatttgaaagctggctgtcttgtacgtgtgttttggccaaaagcaaaatgtgccctcttgagagatgacctggtgttagtagacagtccaggcacagatgtcactacagagctggatagctggattgataagttttgcctagatgctgatgtctttgttttggtcgcaaactctgaatcaacactaatgaatacggaaaaacacttttttcacaaggtgaatgagcggctttccaagcctaatattttcattctcaataatcgttgggatgcctctgcatcagagccagaatatatggaagacgtacgcagacagcacatggaaagatgcctgcatttcttggtggaggagctcaaagttgtaaatgctttagaagcacagaatcgtatcttctttgtttcagcaaaggaagttcttagtgctagaaagcaaaaagcacaggggatgccagaaagtggtgtggcacttgctgaaggatttcatgcaagattacaggaatttcagaattttgaacaaatctttgaggagtgtatctcgcagtcagcagtgaaaacaaagttcgaacagcacactatcagagctaaacagatactagctactgtgaaaaacataatggattcagtaaacctggcagctgaagataaaaggcattattcagtggaagagagggaagaccaaattgatagactggactttattcgaaaccagatgaaccttttaacactggatgttaagaaaaaaatcaaggaggttaccgaggaggtggcaaacaaagtttcatgtgcaatgacagatgaaatttgtcgactgtctgttttggttgatgaattttgttcagagtttcatcctaatccagatgtattaaaaatatataaaagtgaattaaataagcacatagaggatggtatgggaagaaatttggctgatcgatgcaccgatgaagtaaacgccttagtgcttcagacccagcaagaaattattgaaaatttgaagccattacttccagctggtatacaggataaactacatacactgatcccttgcaagaaatttgatctcagttataatctaaattaccacaagttatgttcagattttcaagaggatattgtatttcgtttttccctgggctggtcttcccttgtacatcgatttttgggccctagaaatgctcaaagggtgctcctaggattatcagagcctatctttcagctccctagatctttagcttctactcccactgctcctaccactccagcaacgccagataatgcatcacaggaagaactcatgattacattagtaacaggattggcgtccgttacatctagaacttctatgggcatcattattgttggaggagtgatttggaaaactataggctggaaactcctatctgtttcattaactatgtatggagctttgtatctttatgaaagactgagctggaccacccatgccaaggagcgagcctttaaacagcagtttgtaaactatgcaactgaaaaactgaggatgattgttagctccacgagtgcaaactgcagtcaccaagtaaaacaacaaatagctaccacttttgctcgcctgtgccaacaagttgatattactcaaaaacagctggaagaagaaattgctagattacccaaagaaatagatcagttggagaaaatacaaaacaattcaaagctcttaagaaataaagctgttcaacttgaaaatgagctggagaattttactaagcagtttctaccttcaagcaatgaagaatcctaacaatagagattgctttggtgaccatgataggaggaaacgaaacttgtaagattggaacagttgttatttttatgaaattactttaaatatgaattgtactaactgtacctaaatagcaaagccctgtgtagattctggtaatgatctgtctcagggtatgtgtatttttgaagagtgttatgtccttagttttaattttgagtaaagaaaaggctaaaatcatgaattagttacaagcaacagtaccaacttatgtgacccctgaggggtggggctgtgagctcttaatttgtttttgattctgaaaaactctgcttcctggcatccaggagttagagattgagcctttcatcttctttctcaaaactagtttttgatgctttctttcatgggaatagtcacttttttatttagtaaatcgcattgctggaaccaccaaggagtgtggaatgtccttgagtgtattatttatgcaagtcacagtcacgttgccatcatggcagctatgtgaaacactaataaatgtgtttttactttttattcccgttaaaactgatgtaaaacaggataaaggcttgttatagtcacttataagtatctgggtctaagtaatttccttagatgtttctaaagaaacattttcagctttgctcccattatgattccaataaggaacgctttcctagtgcaattttaggagtaaagtttgaagagataaaaatagccaaagataggagacgtctgaattttgaatgataaacagtgatgttttaaaaaagctgttgttcttcaggaggcatttgcctaggatattgctggattataccccattggaggcttttaattttatttgtatgaattttccaggatttcattaaaaattattattgtattttttaccttaatgaaagattttgggttcaaatatctttctatattaaaagctgattgagtctgtacatatgtaaattatgcctagtggaggttctgttgactttcttccccactgtggaagaggccagttttgcctccatttgcacattcatttcagttatttctgatccataaatataacatttacaaaattcttccttgagctggtggaaatgcctcaccagtttcctctttaatgaatcaaataaaatctttaactgatgttaaaaaaaaaaaaaaaa

SEQ ID NO: 985 - DNA, 2950 bp, human
ggtgcttctaggaagtagaacgccggctcgcatgcctgcccgcccgccagcctgccgggtacggccttttccgccggggcttccaggtcaaagaattcgcctttgccgctaccgctttcttaccctccgcacccgttaagttctccggtcgggcggcagtctctgaacacttagccgcgccatccggggtcacaccgcctggaaggaggtgacgggggcggcgcggggcgcggacactccccgctgagagtccgcctgccatggactcggaatattacagcggcgaccagtcagatgatggtggtgctaccccagtacaggatgaacgggattcagggtcagacggtgaggatgatgtaaatgagcaacactccggatcagacactggaagtgtagaacgtcattcagagaatgaaactagtgatcgagaagatggcctccccaaaggacatcatgtgacagactctgagaacgatgagcccttaaatcttaatgctagtgactctgaaagtgaggagcttcacaggcaaaaggacagcgactctgaatctgaggaacgtgcagagcctcctgcaagcgattctgaaaatgaggatgtcaatcagcatgggagcgactctgagagtgaagagaccaggaaattacctggtagtgactctgaaaatgaggaacttcttaatgggcatgcaagtgactcagaaaacgaagatgttgggaagcatcccgccagtgattctgagattgaggagctccagaagagtcctgctagtgactctgaaacagaagatgctctaaaacctcaaatcagtgactctgagagtgaggaacccccaaggcaccaagccagtgactccgaaaatgaggagcctcccaaacctcgaatgagtgattctgaaagtgaggagcttcctaaacctcaggtcagtgattcagaaagtgaggaacccccaaggcaccaggccagtgactctgaaaatgaggagcttcccagacctcgtatcagtgactcagaaagtgaggaccctccgaggcaccaggccagtgactcagaaaatgaagagcttcccaaaccccgaatcagtgattcggaaagtgaggatcccccaaggaaccaggccagtgattcggaaaatgaggagctacccaaaccccgagtcagtgactctgagagtgaggggcctcagaaggggcctgccagtgactcagaaactgaggatgcgtccagacacaaacagaagccagagtcagatgatgacagcgacagggagaataagggagaggatacagaaatgcagaatgactccttccattcagacagccatatggacagaaaaaagtttcacagttctgatagtgaggaggaagaacacaaaaagcaaaaaatggacagtgatgaagatgaaaaagagggtgaggaggagaaagtagcgaagagaaaagctgctgtgctttctgatagtgaagatgaagagaaagcatcagcaaagaagagtcgtgttgtctctgatgcagatgactctgacagtgatgctgtatcagacaagtcaggcaaaagagagaagaccatagcatctgacagtgaggaagaagctgggaaagaattgtctgataagaaaaatgaagagaaggatctgtttgggagtgacagtgagtcaggcaatgaagaagaaaatcttattgcagacatatttggagaatctggtgatgaagaggaagaagaatttacaggttttaaccaagaagatctggaagaagaaaaaggtgaaacacaggtaaaagaagcagaagattcagattctgatgataacataaagagaggaaaacatatggactttctgtcagattttgagatgatgttgcagcgaaaaaagagcatgagtggcaagcgcagacggaaccgcgatggtggcacctttattagtgatgcagacgacgacgtgagtgccatgatcgtcaagatgaatgaagctgctgaggaagacagacagttgaacaatcaaaaaaagccagcactgaaaaaattaactttactgcctgctgtagttatgcaccttaagaagcaggaccttaaagaaacattcattgacagtggtgtgatgtctgccatcaaagaatggctctcacctctaccagataggagtttgcctgcactcaagatccgggaggagctgctgaagatcctgcaagagctgcctagtgtgagccaggagaccctgaagcatagtgggattggacgagcagtgatgtatctctataaacaccccaaggagtcaaggtctaacaaggacatggcagggaaattaatcaatgagtggtctaggcctatatttggtcttacctcaaactacaaaggaatgacaagagaagaaagggagcagagagatctagaacagatgcctcaacgacgaagaatgaacagcactggtggtcagacacccagaagagacctggaaaaggtgctgacaggagaggagaaggctcttagacctggagatcctggattctgtgcccgtgcaagggtcccaatgccttcaaacaaggactatgttgtcaggcccaaatggaatgtggaaatggagtcatccaggtttcaggcgacctccaagaagggtatcggtcgactggataaacagatgagaaagttcacagatataaggaaaaaaagcagatctgcacacgcagtgaaaatcagcattgagggcaacaaaatgccattgtgaccttgcctggaatgtgtccccatctctactctaagaaatgcgcaatggactctttggagaaagaagatattttaaaacatttttagtgtgtctgtaaatggttcagcgtgtatcagatgttgtcataggactcacatttctctcagttatatttaaaaccgttgtgtactttgtacaaaggaatactagtcatacttctataaactttacacaataaaatttcattctgg

SEQ ID NO: 986 - DNA, 3107 bp, human
gactcgagtaacatggccgctgtctcgtgagtcccgctagtgccgggcgggagttgttaagcggccagggtcaggtgtgctggagcggggtccgggcccgggttccagggcgaggcggcggagcgtggcaggcaagcctagagcggcgtggtccatgcgccggcgccgggggcagagcggagccgcagactcccctggccccggcgcggccccggcagccgcgggctaaggagtcgcgaggttcccccagctgccaccatgaaccccgagaaggatttcgcgccgctcacgcctaacatcgtgcgcgccctcaatgacaagctgtacgaaaagcggaaggtggcagcgctggagatcgagaagctggtccgggagttcgtggcccagaacaataccgtgcaaatcaagcatgtgatccagaccctgtcccaggagtttgccctgtctcagcacccccacagccggaaagggggcctcatcggcctggccgcctgctccatcgcactgggcaaggactcagggctctacctgaaggagctgatcgagccagtgctgacctgcttcaatgatgcagacagcaggctgcgctactatgcctgcgaggccctctacaacatcgtcaaggtggcccggggcgctgtgctgccccacttcaacgtgctctttgacgggctgagcaagctggcagccgacccagaccccaatgtgaaaagcggatctgagctcctagaccgccttttaaaggacattgtgactgagagcaacaagtttgacctggtgagcttcatccccttgttgcgagagaggatttactccaacaaccagtatgcccggcagttcatcatctcctggatcctggttctggagtcggtgccagacattaacctgctggattacctgccggagatcctggatggactcttccagatcctgggtgacaatggcaaagagattcgcaaaatgtgtgaggttgttcttggagaattcttaaaagaaattaagaagaacccctccagtgtgaagtttgctgagatggccaacatcctggtgatccactgccagacaacagatgacctcatccagctgacagccatgtgctggatgcgggagttcatccagctggcgggccgcgtcatgctgccttactcctccgggatcctgactgctgtcttgccctgcttggcctacgatgaccgcaagaaaagcatcaaagaagtggccaacgtgtgcaaccagagcctgatgaagctggtcacccccgaggacgacgagctggatgagctgagacctgggcagaggcaggcagagcccacccctgacgatgccctgccaaagcaggagggcacagccagtggaggtccagatggttcctgtgactccagcttcagtagcggcatcagtgtcttcactgcagccagcactgaaagagccccagtgacccttcacctcgacgggatcgtgcaggtcctaaactgccacctcagtgacacggccattgggatgatgaccaggattgcagttctcaagtggctctaccacctctacatcaaaactcctcggaagatgttccggcacacggacagcctctttcccatcctactgcagacgttatcggatgaatcggatgaggtgatcctgaaggacctggaggtgctggcagaaatcgcttcctcccccgcaggccagacggatgacccaggccccctcgatggccctgacctccaggccagccactcagagctccaggtgcccacccctggcagagccggcctactgaacacctctggtaccaaaggcttagaatgttctccttcaactcccaccatgaattcttacttttataagttcatgatcaaccttctcaagagattcagcagcgaacggaagctcctggaggtcagaggccctttcatcatcaggcagctgtgcctcctgctgaatgcggagaacatcttccactcaatggcagacatcctgctgcgggaggaggacctcaagttcgcctcgaccatggtccacgccctcaacaccatcctgctgacctccacagagctcttccagctaaggaaccagctgaaggacctgaagaccctggagagccagaacctgttctgctgcctgtaccgctcctggtgccacaacccagtcaccacggtgtccctctgcttcctcacccagaactaccggcacgcctatgacctcatccagaagtttggggacctggaggtcaccgtggacttcctcgcagaggtggacaagctggtgcagctgattgagtgccccatcttcacatatctgcgcctgcagctgctggacgtgaagaacaacccctacctgatcaaggccctctacggcctgctcatgctcctgccgcagagcagcgccttccagctgctctcgcaccggctccagtgcgtgcccaaccctgagctgctgcagaccgaagacagtctaaaggcagcccccaagtcccagaaagctgactcccctagcatcgactacgcagagctgctgcagcactttgagaaggtccagaacaagcacctggaagtgcggcaccagcggagcgggcgtggggaccacctggaccggagggttgtcctctgacaggcctggcacggaggagggcccaccgagtggtcccatgaaacactaagggtcgtcacgccctcccgaggagctcaaggacctgcctgtcaggaccagggctgggcctgccaacccagggcagtgttggggccggaggctgctgtgtctgcccaagctcctctcagagtccagtccccaggcctccagcgctgtcagctgcaccctggcattctcacagagctggctgcccacccagtggggggctatagcctcagagaccactcatcctctggaatcaacctctttctaataccctcttggaaaaagagcttgcccctcctccagcacactagagctctggccttgtgtgtatatgtatacatacgtgaacacatgcctgtgtgtgtgtgtgtgtgtgtgtacttgtatgcacgtaggcaccagcacaaagatctgaatgatgcaccccacccccaccccaataaagaaataacagaaaaccctcaaaaaaaaaaaaa

SEQ ID NO: 987 - DNA, 2235 bp, human
cacagagcctttcaattcagcttggggtgagctgcacttcaggcatggggatataatagtgtgatgaaccattcttctgaaggttcttctgaaaagctgctggtcttgggatactgtgagagcccctctcattgctctttagaagtaatttaaatttttctgctacattgtctgctcagctcgtattctggtcatagaggaacctgaagccagagaaactagacaaaaaggaacctctttcaggagctataaaagaaagggaggaatcatgtccacaattgcagctttctatggcggcaagtccattctcatcacgggggccacaggctttctgggcaaagtgctaatggagaagctgtttcgcaccagcccagacctgaaagtcatttacatccttgtgaggcccaaggctggccagacactgcagcagagggttttccagatcctagacagtaagctatttgagaaagtcaaagaagtttgtccaaatgtgcatgagaagatcagagctatttatgcagatctcaatcagaatgactttgccatcagcaaagaggacatgcaggagcttctctcctgtacaaacataatatttcactgtgcagccactgtacgctttgacgacactctcagacatgctgtgcaacttaacgtcactgccacccggcagctcttgcttatggctagtcagatgccaaagctggaagcctttatacatatctctactgcctattcaaattgtaacctgaagcacatcgatgaagttatctatccgtgccctgtggagccaaaaaaaatcattgattcccttgagtggttagacgatgctattattgacgagattacacccaagctgatcagagattggcccaatatttatacctacaccaaggccttgggagaaatggtggtgcagcaagagagcaggaacctgaacattgccatcataaggccctccattgtgggagcaacttggcaggagcctttcccaggttgggttgataatataaatggacctaatggaatcattattgcgactgggaaagggtttcttcgggccataaaagctactccaatggctgtggcagacgtaattccagttgatacagtcgtcaatctcatgctagctgtaggatggtatactgcagttcacagacctaagtcaacattagtctaccacattacatctggtaacatgaatccctgcaattggcacaaaatgggagtccaagtcttggcaacctttgaaaaaatcccatttgagagacctttcaggaggccaaatgctaattttaccagcaacagcttcacatcacagtactggaatgcggtcagccaccgggcccctgccattatctatgactgctatctgcggctcactggaaggaagcccaggatgacaaagctcatgaatcggcttttaagaactgtttccatgttggagtatttcatcaaccggagttgggaatggagcacgtacaatacagaaatgctgatgtctgagctgagtcctgaagaccagagagtattcaactttgacgtgcgccagttgaactggttggaatacattgaaaattatgttttgggagttaaaaaatacttattgaaagaggatatggctgggatcccaaaagcaaagcaacgcttaaaaaggctccgaaatattcactacctctttaatactgccctcttccttatcgcctggcgccttctcattgcaagatctcagatggctcggaatgtctggttcttcattgtaagcttctgttataaattcctctcctactttagagcatccagcacgctcaaagtttaagagcatttagccatcgccttttatctggaacctctcagatacctctaaaacagcaaactgtgattctcaagattagaaagtaacaaggaatatgcccaaactgtcaaatgtcacctgttatgtattcgtccctattccttaactatgtatttttatttcagtgagagaaggaaagttgtaaactagcccatagtcacctatattttagggaaaaaaatccaaattgtttcctaacattctattttatgcccttgcgtattaaacgtgaaagtactcccaaaaaaaaaaaaaaaaaaaaaaaaaaaaaaaaaaaaaaaaaaaaaaaaaaaaaaaaaaaaaaaaaaaaaaaaaaaaaaaaaaaaaaaaaaaaaaaaaaaaaaaaaaaaaaaaaaaaaaaaaaaaaaaaaaaaaaaaaaaaa

SEQ ID NO: 988 - DNA, 3246 bp, human
ctacgcgcggggcgggtgctgcttgctgcaggctctggggagtcgccatgcctacaacacagcagtcccctcaggatgagcaggaaaagctcttggatgaagccatacaggctgtgaaggtccagtcattccaaatgaagagatgcctggacaaaaacaagcttatggatgctctaaaacatgcttctaatatgcttggtgaactccggacttctatgttatcaccaaagagttactatgaactttatatggccatttctgatgaactgcactacttggaggtctacctgacagatgagtttgctaaaggaaggaaagtggcagatctctacgaacttgtacagtatgctggaaacattatcccaaggctttaccttttgatcacagttggagttgtatatgtcaagtcatttcctcagtccaggaaggatattttgaaagatttggtagaaatgtgccgtggtgtgcaacatcccttgaggggtctgtttcttcgaaattaccttcttcagtgtaccagaaatatcttacctgatgaaggagagccaacagatgaagaaacaactggtgacatcagtgattccatggattttgtactgctcaactttgcagaaatgaacaagctctgggtgcgaatgcagcatcagggacatagccgagatagagaaaaaagagaacgagaaagacaagaactgagaattttagtgggaacaaatttggtgcgcctcagtcagttggaaggtgtaaatgtggaacgttacaaacagattgttttgactggcatattggagcaagttgtaaactgtagggatgctttggctcaagaatatctcatggagtgtattattcaggttttccctgatgaatttcacctccagactttgaatccttttcttcgggcctgtgctgagttacaccagaatgtaaatgtgaagaacataatcattgctttaattgatagattagctttatttgctcaccgtgaagatggacctggaatcccagcggatattaaactttttgatatattttcacagcaggtggctacagtgatacagtctagacaagacatgccttcagaggatgttgtatctttacaagtctctctgattaatcttgccatgaaatgttaccctgatcgtgtggactatgttgataaagttctagaaacaacagtggagatattcaataagctcaaccttgaacatattgctaccagtagtgcagtttcaaaggaactcaccagacttttgaaaataccagttgacacttacaacaatattttaacagtcttgaaattaaaacattttcacccactctttgagtactttgactacgagtccagaaagagcatgagttgttatgtgcttagtaatgttctggattataacacagaaattgtctctcaagaccaggtggattccataatgaatttggtatccacgttgattcaagatcagccagatcaacctgtagaagaccctgatccagaagattttgctgatgagcagagccttgtgggccgcttcattcatctgctgcgctctgaggaccctgaccagcagtacttgattttgaacacagcacgaaaacattttggagctggtggaaatcagcggattcgcttcacactgccacctttggtatttgcagcttaccagctggcttttcgatataaagagaattctaaagtggatgacaaatgggaaaagaaatgccagaagattttttcatttgcccaccagactatcagtgctttgatcaaagcagagctggcagaattgcccttaagactttttcttcaaggagcactagctgctggggaaattggttttgaaaatcatgagacagtcgcatatgaattcatgtcccaggcattttctctgtatgaagatgaaatcagcgattccaaagcacagctagctgccatcaccttgatcattggcacttttgaaaggatgaagtgcttcagtgaagagaatcatgaacctctgaggactcagtgtgcccttgctgcatccaaacttctaaagaaacctgatcagggccgagctgtgagcacctgtgcacatctcttctggtctggcagaaacacggacaaaaatggggaggagcttcacggaggcaagagggtaatggagtgcctaaaaaaagctctaaaaatagcaaatcagtgcatggacccctctctacaagtgcagctttttatagaaattctgaacagatatatctatttttatgaaaaggaaaatgatgcggtaacaattcaggttttaaaccagcttatccaaaagattcgagaagacctcccgaatcttgaatccagtgaagaaacagagcagattaacaaacattttcataacacactggagcatttgcgcttgcggcgggaatcaccagaatccgaggggccaatttatgaaggtctcatcctttaaaaaggaaatagctcaccatactcctttccatgtacatccagtgagggttttattacgctaggtttcccttccatagattgtgcctttcagaaatgctgaggtaggtttcccatttcttacctgtgatgtgttttacccagcacctccggacactcaccttcaggaccttaataaaattattcacttggtaagtgttcaagtctttctgatcaccccaagtagcatgactgatctgcaatttaaaattcctgtgatctgtaaaaaaaaaaaaaaaaaaaaaaacaaaacccacaagcacttatcttggctactaatgaagctctccttttttttgtttgtttgtttgcttcattgttgattgtgtattttcttcattcctggggagtactaacccaaaagcgtctgtctcttgttttctagtccagtttgagattaatttagaagaaaggaatactgtatgtgaaattcatcttgggctttcccctaaattgcaagataaggccatgtgtaagattttccctaaaactagaatatattaatgcatgtttgagaattttaaagcaccatggtcaaaaccagaagctatattttgcatatttggactcagccatccattaagaacccatgttgtcctctggacatatttatcaatataattgggttttaaatagtataaaagaaaacttgtgatctatataatttatgtatcaccttcattgtaaatttagcaggaaatgcatcacaattatgatttttttttttgcaccagtgaaacaataaagatgctattaacaaaaaaaaaaaaaaa

SEQ ID NO: 989 - DNA, 2913 bp, human
aggagatcctggggccttacctactagcggaatcgactgaagagacgcctgccagtgcgggaggtaggaagctcgatccccaaagaaaagagcgagtgggcaggcagctgcgagacagaaccggagtgtgcagggtccctagaggccggttcctggtctgtgctgctctcctggaagccatggtacaggcagagctcagggcgatccccaggtgagggcagcggctctgcctgggattccaccgcagtacaaccgggtagatgcggggtggagaagaaaggatgttgcctgcactgctcgccaatagcaccctgagaggctacatttgcagaagcagcagcagcagaagacacagcgccggtccaggaggcggctcgagctgttcgtaaagtcgcccgacagctttttctccgtagtatgcgagttgacaaaacagccagagaacagggctccccattacaatcttttcgagatcttttcccttgctaaccggatctgatttgtgcgaaaacatgccttgcacttgtacctggaggaactggagacagtggattcgacctttagtagcggtcatctacctggtgtcaatagtggttgcggttcccctatgcgtgtgggaattacagaaactggaggttggaatacacaccaaggcttggtttattgctggaatctttttgctgttgactattcctatatcactgtgggtgatattgcaacacttagtgcattatacacaacctgaactacaaaaaccaataataaggattctttggatggtacctatttacagtttagatagttggatagctttgaaatatcccggaattgcaatatatgtggatacctgcagagaatgctatgaagcttatgtaatttacaactttatgggattccttaccaattatctaactaaccggtatccaaatctggtattaatccttgaagccaaagatcaacagaaacatttccctcctttatgttgctgtccaccatgggctatgggagaagtattgctgtttaggtgcaaactaggtgtattacagtacacagttgtcagacctttcaccaccatcgttgctttaatctgtgagctgcttggtatatatgacgaagggaactttagcttttcaaatgcttggacttatttggttataataaacaacatgtcacagttgtttgccatgtattgtctcctgctcttttataaagtactaaaagaagaactgagcccaatccaacctgttggcaaatttctttgtgtaaggctggtggtttttgtttctttttggcaagcagtagttattgctttgttggtaaaagttggcgttatttctgaaaagcatacgtgggaatggcaaactgtagaagctgtggccaccggactccaggattttattatctgtattgagatgttcctcgctgccattgctcatcattacacattctcatataaaccatatgtccaagaagcagaagagggctcatgctttgattcctttcttgccatgtgggatgtctcagatattagagatgatatttctgaacaagtaaggcatgttggacggacagtcgggggacatcccaggaaaaaattgtttcccgaggatcaagatcaaaatgaacatacaagtttattatcatcatcatcacaagatgcaatttccattgcttcttctatgccaccttcacccatgggtcactaccaagggtttggacacactgtgactccccagactacacctaccacagctaagatatctgatgaaatccttagtgatactataggagagaaaaaagaaccttcagataaatccgtggattcctgaacagtatggaaaagcaaactgtgcaactactacattatatcattacctggtatcccatggattttgtgcttgggacagaccataaatgatggaaaatgtcaacacaaaaatagctgaaagccaggtacaactactgcatttatatatgtaagttttgtatatcaaaaataattggtctaaatttcctagacttagacttgatttcttaacattagggtatcgcatactcaaatggtagacaatgaccccaactaaatcttcctgatgttacactgctttatcaagaggatggactttttttttttgagacagacagagtcttgctctgtcacccaggctggagtgcagtggcgcaatctcgggtcactgcaagctctgcctcccaagttcatgccattctcctgcctcagcctcccaagtagctgggactacaggcacctgccaccatgcccagctaattttttttttttcagtagagacagggtctcaccatgttagccaggatggtcttgatctgacctcgtgatccgccgacctcggcctcccaaagtgctggaattacaggcgtgagccactgcgcctggccaagaatggacattttttaaaaaaacatcagtacttcctaccactgctgcatgagtataatgctccggaattatcagaaagcataatgcagaaatacgaattagtggaacttaatcatgtgccatataagcttacctaacaaacagttatatccctattcctcaactgaatgtctttcaataaataagaatttatcatttattttctgcaacttttttatgtctcattctttaaacattaaaaacccttaatattttaacaaaaatttcttgattagaggcacagtgaaaaagaagtcaaaaaaaaaagttctacttttcatcagtgctattaaaggtggcagcaaatgtaaatcttggctgaatggtcttaattactcattaaaccacagtcagaaagacatataggtgctatttgggaaaactttttattacctaggatggggtttctctaattgctaatcacaaccccactgggtcatgtttgacattttataatg

SEQ ID NO: 990 - DNA, 2540 bp, human
aggtggcggagattgcaccggaagacgcttcctgggtttgaggagttcagtgactgctattgaaccaccaaaagtccattatgaaactgtattgcctgtcagggcacccaaccttaccatgcaatgtgctcaaattcaaatcaaccaccattatgttggactgcggactggacatgacttctaccctcaatttccttcctttgccacttgttcaaagtcccaggctgtccaatcttcctggctggtccctgaaggatggaaatgctttcttggacaaggagctaaaggagtgctcgggtcatgtatttgtggattctgtgccggaattctgtttaccagagacggagctaatagatctgtctacagtagatgtgattctcatctctaactatcactgtatgatggcgctgccatacatcaccgagcacaccggcttcacaggcacagtgtatgccacggaacccaccgtccagatcggcaggcttctcatggaagagctggtgaatttcattgaaagagtgccaaaggctcagtctgcctccttgtggaagaataaggacattcagaggctgttaccttctcctctcaaggatgcagtggaagtctcaacctggagaagatgctatacaatgcaagaggtgaactctgcccttagtaaaatccagctggtgggatattctcagaaaattgagctttttggtgcggtccaggtgactcctctgagctctggctatgcccttgggagctccaactggatcatccagtctcattacgagaaagtgtcttatgtctctggatcctccttgcttaccacacacccccagcccatggaccaagcttctctcaaaaacagcgatgttcttgttctgacagggcttacccagatccccactgcaaacccagatggaatggtgggagagttctgcagcaacctagctctgacagtccggaatggaggaaacgtgttggttccctgctacccttctggagtgatctatgacctcctggagtgcctatatcagtacatcgactcagccgggctttccagcgcccccctctacttcatctcccctgtggccaacagttcactggagttttcccagatctttgctgagtggctttgtcacaacaaacagagtaaggtgtatcttccagaaccaccttttcctcatgcagagctcattcagaccaataagctgaagcactaccccagcatccacggagacttcagcaacgactttagacagccctgtgtggtgttcaccgggcacccttccctccgcttcggggacgtggtccacttcatggagctctggggaaaatctagtctcaataccgtcatattcacggaaccagacttctcctacctggaagccctggctccttaccagccgctggccatgaaatgcatctactgccccatcgacacccggctgaacttcatccaggtgtcaaagctgcttaaagaagtgcagcccctgcacgtggtgtgtcctgagcagtacactcagccgcccccagcccagtcccacaggatggacctcatgatcgactgccagccccccgccatgtcctatcggcgggctgaggttctcgccctgcccttcaaacgtcggtacgagaagatcgagatcatgccagagctcgcagattcactggtgcccatggagatcaagcctggcatctccttggcaactgtctcggccgtgctgcacaccaaagataacaagcacttgcttcagccccctcctcggcccgcccagcccacgagcgggaagaagagaaagcgggtgagcgatgacgtaccagactgcaaagtcctgaagcctttgttgagcggttccatccctgtggagcagttcgtgcagaccctggagaagcatggcttcagtgatattaaggtggaggacacagccaagggccatatcgtcctgctccaggaggctgagacgctcatccagattgaagaagactcgacccatatcatctgcgacaatgacgagatgctcagagtgcgactgcgggaccttgtcctcaaattcttacagaagttctgagtgggccatctgagctacttccctgaaatcctgcagtccctcactggctgccctcacaagccacctgaggagtggcatgagaggccattaactgtgtctttgtggtgtcctctggcttaaggagtgaagaggtggctcttgagggaaatggtctggacttattcccagcactgtttcaggcaagaactttccctttcaacttcaggctcattttcttctcaactctggctctctcaaggagctggagggtgacagaagtgggacaggagaagttttccaagaggttcatgggaggcggaggtgactggctggctgtcttgcatcagtcccaggcctcggccaggggagccagcctttggtttcgtttacttgcctacagtgctgtacgcaataagatgatgatcccaaaatatggtaaagtgaacccatctgtctgcattttctactctgagcccatttgttaataaacacttatttttatat

SEQ ID NO: 991 - DNA, 3524 bp, human
gggatgccgggggggcaagatggcggcggcagtaggggttcgtggccggtacgagctgccgccttgctccggcccaggctggctcctcagcctttccgccttgctgagtgtggcggcacgaggggccttcgccaccacgcactgggtcgtcacggaggacgggaaaatccagcagcaggtggattcaccaatgaacttgaagcatcctcatgacctagtcatattaatgagacaagaagcaacagttaactacctcaaagaattagagaaacaattagttgctcaaaaaattcacatagaagagaatgaggacagagacacaggactggaacagagacataataaagaagacccagactgcatcaaagccaaggtgcccttaggggacctggatctatatgatggcacatacataactttggagagcaaagacatcagtcctgaagattatatagacacagaatctcctgtccctccagacccagagcaacctgattgtactaaaattctagaacttccatatagtatacatgcttttcagcacttgagaggtgtacaggagagagttaatctttctgcacctctgctacctaaagaagacccaatcttcacatatttatctaaacggttaggaaggagtatagatgacataggtcacctcattcatgaaggcctacagaagaacacttcctcgtgggtactgtataacatggcttcattttactggagaattaagaatgagccatatcaggtagtagaatgtgccatgcgagcacttcacttctcttccaggcacaataaagacattgccctggtcaacctggcaaacgttctacacagagcacacttctctgctgatgctgctgtcgtggtccatgcagctctggatgacagtgacttcttcaccagctattacactttggggaatatatatgcaatgcttggggaatataaccactcagtgctctgttatgaccacgctttgcaggccagacctgggtttgagcaagctataaagaggaagcatgctgtcctatgtcagcaaaaactggagcagaaattggaggctcagcatagatctctccagcgaacactgaatgagttaaaagagtatcaaaagcagcatgaccactacctgagacagcaggaaatcctagaaaaacataaactgattcaggaggagcaaatcttaagaaatatcattcatgagactcagatggcaaaagaggcacaattaggaaatcatcagatatgccgactggtcaaccagcagcatagtttacattgccagtgggaccagcctgtacgctatcatcgtggagatatctttgaaaatgtggactatgttcagtttggtgaggattcatcaacctccagtatgatgtctgtgaactttgatgttcaatcaaatcagagtgatatcaatgattcggtcaagtcttctcccgtagcccattctattctctggatttggggcagggactctgatgcatatagggacaaacagcatattctatggcctaaaagagcagattgtacagaaagctaccctagagtccctgttggtggggaattgccaacgtattttctgcctccggaaaacaaaggactcaggatccacgaactcagcagtgatgattattctacagaagaagaggcccaaacccctgactgttccataactgacttcagaaaaagccacactctgtcctacttagtcaaagaattagaggttcgcatggatctgaaagccaaaatgccagatgaccatgcacgaaaaattttgctttcccgtattaataactatactatcccagaagaagaaattgggtctttcttatttcatgctattaataagccaaatgctcctatctggctcatactcaatgaagctggactatactggagagcagtaggaaatagcacttttgctattgcctgtcttcagagggctttgaatttagctccacttcaataccaagatgttcctcttgtcaacttggccaaccttttgattcattacggccttcatcttgatgccactaagctgctacttcaagctttggccatcaatagctctgagcctctgacctttttgagcctgggaaatgcttaccttgctctgaagaatatcagtggggcacttgaggcctttagacaggccttgaaattaaccaccaaatgtccagagtgtgaaaacagcctgaagttgatccgctgtatgcagttttatccttttctgtacaacatcacttcttctgtttgcagtggtacggtggttgaggagagcaatggttctgatgagatggagaattcagatgaaaccaaaatgtcagaagaaatactggctttggtggatgaatttcaacaggcatggcctttggaaggctttgggggtgcactagagatgaaagggcggcgtctagacttacaaggaatacgggtgctgaagaaaggtccccaggatggagtggccagaagctcttgctatggagactgcagaagtgaagatgatgaagcaacagaatggattacattccaggtcaaacgtgtaaagaaacccaaaggagatcataagaaaactcctgggaaaaaagtagaaacaggtcagatagaaaatggacatcgttaccaagcaaacctagagatcactggccccaaggtggcatctcctgggccacaaggaaaaaaacgtgactaccagcgtctgggatggcccagcccggacgaatgcctcaaactccgctgggtagagctgactgccatcgtgagtacctggcttgcagtttcttcaaaaaacattgacatcacagaacacatagattttgccacccctatacagcagccagcaatggagcctctttgcaatggcaatctccccacgagtatgcataccctggaccacttgcatggggtttccaaccgagccagcctgcactacacaggggagagtcagttaacagaggtattacaaaatctcggcaaagaccaatatccacaacagtcgcttgaacagattggcacccgaattgccaaagttttggaaaagaaccagacgtcctgggtcctctccagcatggcagccctctactggagggtgaaaggccaaggaaagaaggcaatcgactgcctccgccaggctctgcactatgcgccacaccagatgaaggatgtgcccctgattagcctggccaacatcttgcacaatgccaagctctggaatgacgccgtcatagtagccaccatggcagtagagatcgcaccacactttgctgtgaaccacttcactctgggcaatgtctacgtggcaatggaagaatttgaaaaagcactggtgtggtatgaatccacattgaagcttcagcccgagtttgtcccagccaagaaccgaatccagaccatccagtgtcacttaatgctgaagaagggacggcgctctccttagtgcacttcttccttctctctttctctttactcatgctctaaaaaaaaaaaaaaaaaaaaaaaaaaaaaaaaaaaaaaaa

SEQ ID NO: 992 - DNA, 2065 bp, human
aacagcaatggcggaaggagaagatgtgccgccgctgccaacgtcgagcggcgacggctgggaaaaagatcttgaagaagctctggaagcaggaggttgtgatcttgaaacgttgagaaatataattcaaggaagaccgctgcctgctgatctgagggccaaagtttggaagattgctctgaatgttgcaggaaaaggtgattgtttggcatcatgggatggtattttagacttgccagaacagaacactattcacaaagattgcctgcagtttattgaccagctttcagtgccagaggagaaggcagcagaattacttttggatattgaatctgtaattaccttttattgtaaatcacgtaacattaaatatagcacatcccttagctggatacatctactgaaaccattggtgcatcttcaactgccacgcagcgatttatacaactgcttttatgccataatgaataagtacattcccagggattgttcccagaaagggagaccatttcatcccttcaggttgctcatccaataccatgagcctgagctttgttcttatcttgatacaaagaaaattactccagactcctatgcactcaactggcttggaagtctttttgcatgttactgttccactgaagtcactcaggcaatatgggatggatatctacaacaagcagatccattttttatttatttcttaatgttaattatccttgttaatgcaaaagaagttattttaacacaagagtcagacagcaaagaagaagttatcaagttcttggaaaatactccatccagtctgaatatagaagatatagaagaccttttctctctggctcagtattattgcagcaaaacaccggcttcttttaggaaggataatcaccatctctttggtagtactttgttgggaattaaggatgatgatgcagatctgagtcaggctctttgtctggccatctccgtgtcagagatccttcaagcgaatcagctacaaggggaaggagtccggttctttgtggtggattgccgtcctgcagaacaatataatgctgggcatttatcaactgctttccactcagattcagacctgatgcttcagaatccatctgagtttgcacagtcagtaaaatccttgctggaagcacagaagcagtccattgagtctggctccatagctggtggggagcacctctgttttatgggcagtggcagggaggaagaagacatgtatatgaacatggtcctggcacactttttacagaaaaacaaagaatatgtgagtattgccagtggaggatttatggcactgcagcagcacctggcagacattaatgtggatggaccagaaaatggatatggccattggattgctagtacctcaggctcaaggagcagtatcaattctgttgatggtgaatctcctaatggctcaagtgatagaggaatgaaatcactagtaaataaaatgactgtggctttgaagacaaaatccgttaatgtcagggaaaaagttatcagttttatagagaatacatcaactcctgtggatcggcatgtgagcagcagtgacagagtgggcaagccttaccgtggcgtaaagcctgttttcagcattggggatgaagaagaatacgacacagatgaaattgacagttcttcaatgtcagatgatgatagaaaagaggttgtaaacattcagacttggataaacaaaccagatgtcaaacatcattttccttgtaaagaagtaaaagaaagtggacacatgtttcccagtcatctgttggttactgcaacacatatgtactgtttaagggagattgtttcacggaaaggattggcttatatacagtctcgacaagcgctgaattctgtagttaaaattacatccaaaaaaaaacatcctgaactcattaccttcaagtatggaaatagcagtgcttcaggaatagaaatcttggcaatcgaaaggtatttgattccaaatgcaggggatgcaactaaagccataaaacagcagatcatgaaagttttggatgctttggaaagttaatat

SEQ ID NO: 993 - DNA, 4299 bp, human
gtgacgcgaggtcacgtgacgggttgggcagcctgtgccgccgccgccgctttgtaagaggcacattggcagattttctattttgtacatacattattttgtatatactgtatatgatgacttcagtgagcagtgaccattgtcgaggtgctcgggaaaaaccacagatttcagcagcacaatcaacgcaaccacagaaacaagtggtacaggcaacagctgaacagatgcgtctcgctcaagtgatctttgataagaatgattcagattttgaagctaaagttaagcagcttatggaagtgacagggaaaaatcaggatgaatgcatagtggccctacatgattgtaatggagatgtgaacaaagctatcaatatattgctggaagggaattcagacacaacttcatgggagactgtagggtgtaagaaaaagaattttgcaaaagaaaattcagaaaacaaagagaatagagagaagaaaagcgagaaagaatcgagtcgtggacgtggaaacaacaaccggaaaggaagaggcggcaatcgtggcagagaatttagaggtgaagaaaatggaattgattgcaatcaagtggacaaaccttcagatcgtggcaagcgagcccggggtagaggatttggacgtggcagagggagaggggcaggaaggttctcaacccaaggcatggggacatttaatcctgcagactattcagattctacatctacagatgtgtgtgggacaaagctagtagtttgggaagctgctcagaatggtgcagatgagggaactgaactggcatcaaatactcacaacatagctcaggatctgtcaaacaaaagttcttatggactcaaaggggcttggaagaattctgtggaagagtggacaacagaagactggactgaagatctttctgaaacaaaggtcttcactgcctcatctgctccagcagagaatcacatcttacctgggcaaagcattgatctggtagccttgctccagaagcctgttcctcacagtcaagcctcagaagccaactcctttgaaacttcccaacagcagggctttggccaagcccttgtcttcacaaattcgcaacacaacaatcagatggcaccagggactggcagctccactgccgtcaactcctgttctcctcagagcctgtcatccgtccttggctcaggatttggagagcttgcaccaccaaaaatggcaaacatcaccagctcccagattttggaccagttgaaagctccgagtttgggccagtttaccaccaccccaagtacacagcagaatagtacaagtcaccctacaactactacttcttgggacctcaagcccccaacatcccagtcctcagtcctcagtcatcttgacttcaaatctcaacctgagccatccccagttcttagccagttgagccagcgacaacagcaccagagccaggcagtcactgttcctcctcctggtttggagtcctttccttcccaggcaaaacttcgagaatcaacacctggagacagtccctccactgtgaacaagcttttgcagcttcccagcacgaccattgaaaatatctctgtgtctgtccaccagccacagcccaaacacatcaaacttgctaagcggcggatacccccagcttctaagatcccagcttctgcagtggaaatgcctggttcagcagatgtcacaggattaaatgtgcagtttggggctctggaatttgggtcagaaccttctctctctgaatttggatcagctccaagcagtgaaaatagtaatcagattcccatcagcttgtattcgaagtctttaagtgagcctttgaatacatctttatcaatgaccagtgcagtacagaactccacatatacaacttccgtcattacctcctgcagtctgacaagctcatcactgaattctgctagtccagtagcaatgtcttcctcttatgaccagagttctgtgcataacaggatcccataccaaagccctgtgagttcatcagagtcagctccaggaaccatcatgaatggacatggtggtggtcgaagtcagcagacactagacactccaaagacaacaggccctccctctgccctcccgtctgtgagctccctgcccagcaccacctcctgcactgcacttctgccgtccacatcccagcacactggcgacctgactagcagccctctctctcagcttagcagttcgctctccagccaccagagcagcctctctgcacatgcagccctctcctcgagcacgtcacacacacatgccagtgtggagagcgcctcttcccaccagtcctcagccaccttctccacggcagcgacctccgtctcaagttccgcatcctcaggcgccagcctgtccagtagcatgaacaccgcgaacagcctctgtctgggtgggacccccgcgagtgcatccagcagcagtagcagggccgcgcccttggtgacctcaggcaaagcacccccaaacttacctcagggggtgcctcccctgctgcacaaccagtacctcgtaggtcccggaggactgcttcctgcctacccgatctatggctatgacgagctccagatgctgcagtcacggctgccagtggactactatggaattccctttgctgcacccacagcgcttgccagccgagatgggagcctagctaataatccatatccaggtgatgtcacaaagtttggccgtggggactctgcatcccctgcacccgctaccacaccagctcagccacagcagagccaatcacagacccaccacacagcccagcagcccttcgtgaatcctgcactgccacctggctatagctacactggtcttccctactacacaggcatgcccagtgccttccagtatggccccaccatgtttgtccctccagcctcagccaagcaacatggggtgaacctcagcactcccacacctcccttccagcaggccagtggttatggccagcacggctacagtacaggttatgacgacctgacccaggggacagcagcaggagactactccaaaggtggctatgctggatcatcgcaggcaccaaacaagtctgcaggttctgggcctggcaaaggagtatcagtgtcttcaagcaccactggtctacctgatatgactggttctgtctacaataagacacagacttttgacaagcagggatttcatgcagggacgcctccacctttcagcctgccctcggtcttgggctccactgggcccctggcctcgggagcggcccctggctatgcacccccaccattcctacacatcttgccagcccaccagcagccccactcacagctgctgcaccaccaccttccgcaggatgcacagagtggctcgggtcagcgcagccagcccagctccctgcagcccaagtctcaagcctccaaacctgcctacggcaactctccatactggacaaactaaacccagaagagaggggtgggctggggcaaggcttatcctgggcaggagagaacacacgagcacgtatttgggagcccagtgccctttcctagaattcccgacatgtgtcagccatgcctctgtggggagtctgcctcccagactggctactgtatgtaatgtatttatgtatgtatttgtaaatgtgatagaagtctgggggggagttgggggatggcggcagatgttagccaggtctgccctccccattcaagccccttctccactgtagcaaaataagcacccccaccccatctgccttcaggtcttcttcacagcctgcactgcccagtgggccactaggggcagtctctggaagggctggttcaaggctgtttgggtataggggtcaggtaccaatgaagaatcacgacttgtctcactcctttggaaattgttttctttcctgtgtaattacttcatacctctgtttttgagaaactgttccgtttgtcatctgtcatggtctccttccaccaaatcttcatctgggaatagcagcggtatccctccacccaagtatggccacctgtttgtcttcatatagaacaggggcttctggtctggtcatgtccctagagacttactagagactggctgaccatgaaaaaaaaaaaaataatctgagttattcagccagtcagctcccctttaaaaatctaaggtatctccaagcaacacatctccattctagttgtcttgaaccacgtgggcaactgtttcaggggttttctcttgcccaatccccacctaataaagttctgagagcatgaaaaaaaaaaaaaaa

SEQ ID NO: 994 - DNA, 2975 bp, human
ggacggacgcactagaggcgacctaaacatggagacagcgggcgctgcaactgggcagccggcctctgggctggaggctccggggtccacgaatgaccggcttttcctggttaaaggtggaattttccttggtaccgttgctgcagcgggaatgctagctggatttattacaacattatcattggctaaaaagaaaagccctgaatggttcaataagggaagtatggccacggctgcattaccggaaagcgggtcttcccttgccttgcgagctctgggctggggctccctgtatgcatggtgtggggttggtgtgattagcttcgcagtctggaaagctttaggagttcacagtatgaacgactttcgaagtaaaatgcaatcaatatttccaacaattcccaagaactccgaatcggctgttgagtgggaggaaacattgaaatccaaatgagatgagcatggatgaatttcaaaatgcttgttacagaaaggggtggctctggagacaccatgacagcaaaaggactgggactgatttctcccaggaacatgggcagattgctgactgaaccagtgcactggatagcattcagcctcatcacaggagagtatgtgtgtgcgtgctgggggagggtaaagttttcccacagttaagaagactatttaaaaatagtaattacaggaataacttccttatgtggaggggaccccataggaaatggttctgtttgtaacagttgaagcaaatttcatactaaaaaagtttataataaaagtatgataagaaaatatttataaaacagaccccctaatagcaatagtactgcaatgtgtctaattaaaggagtttcaagagcctttcttgtcaatatatgacagaacttggaagtcttattctgattagccagactacaaagtgacagtcacctggtaagtcctgtatggtaggaagtgggtgtggctctcgggtcctaaatgtggtctgtgctttacagccatcacacacatgctagttatttacctgatgcccttgcttgaaggccctataaattcttatacttaaaacaaaaagccagtaatgagttgtgatcaccccaaaaggcacagttgggctaaaataatgatatcaggggtaaacatatttttttgagaagttggtctggatctctgaacactgacaatttgtcattttgtctcagttgtcaaagtaaaaaaagcccagttgtcatccgtcttcaatatttttaaccagaaagtcacctgagtacggagtcccaatataaagtatttgggaccacctccctaacaaagctgttagggtaaattctgtgtgcacgcccaactccctcctgtcttccacagtctcctacaaaaaaaacagatggagaataatgtctacatgcaattgtttttactgcaattgtattttaaaatattttcaagaagagaaatactttaatatgtcaatatgtccagagaaaaaacctgtagttaaatatcagttgtgcaatttcttcctacttgcctaggctctaattagtcagcaatcaggtttaataaaggacatttgaaatttctgttatgaaaccttttattctaagggagatttttaaatgaaatgacaagaacttaatgtaatacttttctctagaccatgttaccctgttaaaattgctgtattgttaatgaaacaggtgtaatcagcatctggaattcatatgtaatctgttaaaaatccaagactgaaaggaaaggattgtgaaattggtcagtgaatgcgggtagcaaaaactcttcactgcctttcatttgtaactaaatctcctctgagaagagatctgtaggctttgaatgaaaggaaggaaaggcaggagccaaaggaacaggttttcgtccatacaattagtctgaatctaggttcctctgaatagaatgggcaccgcctgatccttttgtgcttcataaatgtgggtttccaacgtgcatgagatggccctcaaaccttgttacaacgatgcactttactcgtttgatgtggggggaaaaagaatgggcactacctaaaactgtttacagctagaatctgggttttatttttcatagatggagaatgcctagtggtttctaaaggcctccactgggtggagaaaggagacttgcccacctgtctggagtgttaaaaggagaaatcattgttaactgattctgttaatggattcctgccttgtaacctcccgaagggcagggacccctctcagggccttgtaaactggtgtcagcaccgctgcaaaggctgctgcacatcaggctgatggcagctaggccctaggaaggagccaggggccatggtgggggctctgctttcccacagggctggcacagaggaggcctagacatatgttgctgaaagagtgtcctaatactagagtggcatgcctcgtgtctacaaaacccttatatgtcacctctgctgtccttgaccgatggcaggggaactcccattagaatgatgatgaatcccctgcagaggggaggctggcagggacaaattccctaaaagagggaccaagcgtcagctccaattgcatcttaaaagcaaaagtgaagtaatgcacagatggaaatttaaaaagaaaacaagcagtatgactcaagtggtgtttttcacagtcagaacttgaatatcagtagatttcgtcatttgtctattccttttgtaccagaggcatattgttaaattggttaatggaaaggaaaaatgttgaacagataatgttattctttatgagacgtaccatctgtgtattgagctctgaatgtccctggatatggaagagaggaaatgtgatggaatttcaagtttgccttctttgctgtctttatcttgggttgagtatgacaaacataatcacatttatctcctggagcataaagagttttaatccccctaaaaaaaaaaaaaaaaaaaaaaa

SEQ ID NO: 995 - DNA, 1024 bp, human
gggtgacttggctggcgggatcaagtgcagctgcttcaggctgaggtggcagatagtgagcgctggtggcggagttaaagtcaaagcaggagagtaattatgaatagcgcagcgggattctcacacctagaccgtcgcgagcgggttctcaagttaggggagagtttcgagaagcagccgcgctgcgccttccacactgtgcgctatgacttcaaacctgcttctattgacacttcttctgaaggataccttgaggttggtgaaggtgaacaggtgaccataactctgccaaatatagaaggttcaactccaccagtaactgttttcaaaggttcaaaaaaaccttacttaaaagaatgcattttgattattaaccatgatactggagaatgtcggctagaaaaactcagcagcaacatcactgtaaaaaaaacaagagttgaaggaagcagtaaaattcagtatcgtaaagaacaacagcaacaacaaatgtggaattcagccaggactcccaatcttgtaaaacattctccatctgaagataagatgtccccagcatctccaatagatgatatcgaaagagaactgaaggcagaagctagtctaatggaccagatgagtagttgtgatagttcatcagattccaaaagttcatcatcttcaagtagtgaggatagttctagtgactcagaagatgaagattgcaaatcctctacttctgatacagggaattgtgtctcaggacatcctaccatgacacagtacaggattcctgatatagatgccagtcataatagatttcgagacaacagtggccttctgatgaatactttaagaaatgatttgcagctgagtgaatcaggaagtgacagtgatgactgaagaaatatttagctataaataaaaatttatacagcatgtataatttattttgtattaacaataaaaattcctaagactgagggaaatatgtcttaacttttgatgataaaagaaattaaatttgattcagaaatttcaaaaa

SEQ ID NO: 996 - DNA, 2140 bp, human
gtggcgcgcacgcgcagctccgcttccgggagccgctcctcgctacccactatgctctgcgacatcgacctgtcgcaaaggccgcgtttgcggggccaatgagcgactcgctttccgtgcggtgcggcgagtgaggccccggtcttcctcctcgtcctgccgcaggccagaacccctgacggtattcagctgcgcgtaagtctggccggtgccatctgtctccgcaatgccccccaagaaacaggctcaggccgggggcagcaaaaaggcggacgaaaaaaagaaggagaagattatcgaagacaaaactttcggtttgaagaataagaaaggagcaaagcaacagaagtttatcaaggctgtcacacatcaagttaaatttggtcaacaaaatccacgtcaggtagcacagagtgaagctgaaaagaaattgaagaaggatgacaagaagaaagatttgcaggagctaaatgagctgttcaaacctgtagttgctgctcaaaaaataagtaaaggtgcagatcccaagtctgtagtatgtgcattcttcaagcaaggacagtgtactaaaggagataagtgtaagttctcccatgacttgactctggagagaaaatgtgaaaagcgaagtgtttacattgatgcaagagatgaagaacttgaaaaagatactatggataattgggatgagaaaaagctggaagaagtagtgaacaagaagcacggtgaggcggaaaagaaaaaaccaaaaactcaaatagtgtgcaagcatttcctggaagctattgaaaacaacaagtatggctggttttgggtatgccctggagggggtgatatttgcatgtatcgtcatgcacttcctcctggatttgtgttgaaaaaagataaaaagaaagaagagaaagaagatgaaatttcattagaagatctaattgagagagagcgttctgccctaggtccaaatgttaccaaaatcactctagaatcttttcttgcctggaagaaaaggaaaagacaagaaaagattgataaacttgaacaagatatggaaagaaggaaagctgacttcaaagcagggaaagcactagtgatcagtggtcgtgaagtgtttgaatttcgtcctgaactggtcaatgatgatgatgaggaagcagatgatacccgctacacccagggaacaggtggtgatgaggttgatgattcagtgagtgtaaatgacatagatttaagcctgtacatcccaagagatgtagatgaaacaggtattactgtagccagtcttgaaagattcagcacatatacttcagataaagatgaaaacaaattaagtgaagcttctggaggtagggctgaaaatggtgaaagaagtgacttggaagaggacaacgagagggagggaaccggaaaatggagccattgatgctgttcctgttgatgaaaatcttttccactggagaggatttggatgaactagaagaagaattaaataccttgatttagaagaatgccccaaccctcgctgaaaaaattaagtcagccagcacgagttgaaattgactacattaatttcctttccacctagaatcaacaggatgtttatttcctatgctgattctggaggagttacctcctgcaaaaaaggcatcttgtccctacatcttctcttctgactttggctacatctcatagtaagttcagagtagttcatgataaattgaaaatataatggtcattgcagaaaatgattgatgttgtactgtccacccaagtaagaagtgtatctgcctttccatcttttggttttcatttgggcatgtgctattaccagaaacaacaaacttatatttaaaatacccttcatttgacacagtttttaatgagtgatttaatttcctctgtatttgtatgtttagaagactgcctaaaacatgagcactgtacttcataaaggaaactgcgtatgcagattcagtattgtgtatctttggacaattagatggacatttaaaatggaacttcttttatctgacaggatcagctacaatgccctgtgttaaattgtttaaaagtttcccttttcttttttgccaataaagttgtaaataaagaccatcatacattaaaaaaaaaaaaaaaaaaa

SEQ ID NO: 997 - DNA, 753 bp, human
gcgcttcgtcacaagggtgcgaggaaagtcagtgagcaaatcgcggaccaccggggctgccagctcgcctgactcccggcctcttgcgctcctaggggcggagaagggtgcgggctcttcgccctttgtgtcctccttctttcactaacttctggactttccagctcttccgaagttcgttcttgcgcaaagcccaaaggctggaaaaccgtccacgatgaccagcatgactcagtctctgcgggaggtgataaaggccatgaccaaggctcgcaattttgagagagttttgggaaagattactcttgtctctgctgctcctgggaaagtgatttgtgaaatgaaagtagaagaagagcataccaatgcaataggcactctccacggcggtttgacagccacgttagtagataacatatcaacaatggctctgctatgcacggaaaggggagcacccggagtcagtgtcgatatgaacataacgtacatgtcacctgcaaaattaggagaagatatagtgattacagcacatgttctgaagcaaggaaaaacacttgcatttacctctgtggatctgaccaacaaggccacaggaaaattaatagcacaaggaagacacacaaaacacctgggaaactgagagaacagcagaatgacctaaagaaacccaacaatgaatatcaagtatagatttgactcaaacaattgtaatttttgaaataaactagcaaaaccagaaaaaaaaaaaaaaaa

SEQ ID NO: 998 - DNA, 1715 bp, human
atggcggccgcggctccggggaacggccgcgcatcggcgccccggctgcttctgctctttctggttccgctgctgtgggccccggctgcggtccgggccggcccagatgaagaccttagccaccggaacaaagaaccgccggcgccggcccagcagctgcagccgcagcctgtggctgtgcagggccccgagccggcccgggtcgagaaaatatttacaccagcagctccagttcataccaataaagaagatcctgctacccaaactaatttgggatttatccatgcatttgtcgctgccatatcagttattattgtatctgaattgggtgataagacattttttatagcagccatcatggcaatgcgctataaccgcctgaccgtgctggctggtgcaatgcttgccttgggactaatgacatgcttgtcagttttgtttggctatgccaccacagtcatccccagggtctatacatactatgtttcaactgtattatttgccatttttggcattagaatgcttcgggaaggcttaaagatgagccctgatgagggtcaagaggaactggaagaagttcaagctgaattaaagaagaaagatgaagaatttcaacgaaccaaacttttaaatggaccgggagatgttgaaacgggtacaagcataacagtacctcagaaaaagtggttgcattttatttcacccatttttgttcaagctcttacattaacattcttagcagaatggggtgatcgctctcaactaactacaattgtattggcagctagagaggacccctatggtgtagccgtgggtggaactgtggggcactgcctgtgcacgggattggcagtaattggaggaagaatgatagcacagaaaatctctgtcagaactgtgacaatcataggaggcatcgtttttttggcgtttgcattttctgcactatttataagccctgattctggtttttaacaagctgtttgttcatctatatttagtttaaaataggtagtattatctttctgtacatagtgtacattacaactaaaagtgatggaaaaatactgtattttgtagcactgattttgtgagtttgacccattattatgtctgagatataatcattgattctatttgtaacaaggagttttaaaagaaacctgacttctaagtgtgggtttttcttctctccaacataattatgttaatatggtcctcatttttcttttggtgcagaaccgttgtgcagtggggtctaccatgcaattttctttcagcactgacccctttttaaggaatacaaattttctccttcatcacttaggtgttttaagatgtttaccttaaagtttttcttggggaaagaatgaattaatttctatttcttaaaacatttccctgagccagtaaacagtagtttaatcattggtcttttcaaaactaggtgtttaaaaaagagacatatatgatattgctgttatatcaataacatggcacaacaagaactgtctgccaggtcattcttcctcttttttttttaattgggtaggacacccaatataaaaacagtcaatatttgacaatgtggaattaccaaattaaaagagaatactatgaatgtattcatattttttctatattgaataaacaatgtaacatagataacaatataaataaaagtggtatgaccagtgaaaaaaaaaaaaaaaaaa

SEQ ID NO: 999 - DNA, 2925 bp, human
agttcggcctgttttctcagtcccggcacccgccgcgaccgcaaaggcggccgcggttctaggaacttgacgtgatggggcttcctgaggagcgggtccggagcggcagcgggagccggggccaggaggaagctggagccggaggccgggcgcggagttggtctccgccgcccgaggtcagccgctccgcgcacgtcccctcgctgcagcgctaccgcgagctgcaccggcgctccgtggaggagccgcgggaattctggggagacattgccaaggaattttactggaagactccatgccctggcccattccttcggtacaactttgatgtgactaaagggaaaatcttcattgagtggatgaaaggagcaactaccaacatctgctacaatgtactggatcgaaatgtccatgagaaaaagcttggagataaagttgctttttactgggagggcaatgagccaggggagaccactcagatcacataccatcagcttctggtccaagtgtgtcagttcagcaatgttctccgaaaacagggcattcagaagggggaccgagtggccatctacatgcctatgatcccagagcttgtggtggccatgctggcatgtgcccgcattggggctttgcactccattgtgtttgcaggcttctcttcagagtctctatgtgaacggatcttggattccagctgcagtcttctcatcactacagatgccttctacaggggggaaaagcttgtgaacctgaaggagctggctgacgaggccctgcagaagtgtcaggagaagggtttcccagtaagatgctgcattgtggtcaagcacctggggcgggcagagctcggcatgggtgactccaccagccagtcccccccaattaagaggtcatgcccagatgtgcagatctcatggaaccaagggattgacttgtggtggcatgagctcatgcaagaggcaggggatgagtgtgagcccgagtggtgtgatgccgaggacccactcttcatcctgtacaccagtggctccacaggcaaacccaagggtgtggttcacacagttgggggctacatgctctatgtagccacaaccttcaagtatgtgtttgacttccatgcagaggatgtgttctggtgcacggcagacattggttggatcactggtcattcctacgtcacctatgggccactggccaatggtgccaccagtgttttgtttgaggggattcccacatatccggacgtgaaccgcctgtggagcattgtggacaaatacaaggtgaccaagttctacacagcacccacagccatccgtctgctcatgaagtttggagatgagcctgtcaccaagcatagccgggcatccttgcaggtgttaggcacagtgggtgaacccatcaaccctgaggcctggctatggtaccaccgggtggtaggtgcccagcgctgccccatcgtggacaccttctggcaaacagagacaggtggccacatgttgactccccttcctggtgccacacccatgaaacccggttctgctactttcccattctttggtgtagctcctgcaatcctgaatgagtccggggaagagttggaaggtgaagctgaaggttatctggtgttcaagcagccctggccagggatcatgcgcacagtctatgggaaccacgaacgctttgagacaacctactttaagaagtttcctggatactatgttacaggagatggctgccagcgggaccaggatggctattactggatcactggcaggattgatgacatgctcaatgtatctggacacctgctgagtacagcagaggtggagtcagcacttgtggaacatgaggctgttgcagaggcagctgtggtgggccaccctcatcctgtgaagggtgaatgcctctactgctttgtcaccttgtgtgatggccacaccttcagccccaagctcaccgaggagctcaagaagcagattagagaaaagattggccccattgccacaccagactacatccagaatgcacctggcttgcctaaaacccgctcagggaaaatcatgaggcgagtgcttcggaagattgctcagaatgaccatgacctcggggacatgtctactgtggctgacccatctgtcatcagtcacctcttcagccaccgctgcctgaccatccagtgaacatgatcctgacctttacctaggattcctcctgctccaaactttgcccatcctctttgccccctcaggagtgctgagggccagtgttgacccacactaccctcccttgaccagctgtctgggaccggaaaccagctttgtctccaggtagagacaacatcctgtgactgccaggcagaaaggacagggcccaggtcagcctcagtctgctgtgcctccagactgcagagctctcagaacccagaacagagacgaaaaggctacctctcctacccaagttaagtgttcaaaggggatgtgagggcctccactgaagcagggaggcagctgtgtaatcctatgtcagctctcttaggaagccccagtacttatattgggcatgcacttgcccttaaaaacaatgatttgtgagtccaggaacaatttactatttttaaaatattttgctgcttctgttctgggtctgaattcccttttgtgccagatgccagtactgtctgcccattggctccaggggctgtatgggcagattcagtctccagagggtattcagatcatctgcttctttgaaggagtaaatgtgttttgttcctagggccagaggagcttgtcttccttgtcctctgttcccaccctcccctgaacagaacccagcccataagagacattctcagatgaaactctgttttcttgccccagtcaggctcaagccctgtggttgtaggaataaagcctgtgatctcaa

SEQ ID NO: 1000 - DNA, 4114 bp, human
ttgatgaaacgcggatccagacgctgcgtttgctggctttgatgaaacgcacatgtgtttctgttttgtgttgtagcatttgttctggaagctcgtatttacattttaagtgtatctggtgagtgggctggagccctcgtctgggccggaaaaaaaaaagccctccgatccgtcttttagttgcttctcttccttttttctctccggtttctcatcactccaaccagccgcgaccatgcccaggaagaaggcggcggcggcggcctgggaggagccgagctcgggcaacggcactgcccgcgccgggcccaggaaacgcggcggcccggcgggcaggaagcgcgagcggcccgagcgctgcagtagcagcagcggcggcggcagcagcggcgacgaggacggcctggagctcgacggggcccccggcgggggcaagcgcgcggcgcggccggcgacagcaggcaaggcgggcggcgcggccgtggtcatcaccgaacccgagcacaccaaggagcgcgtcaaacttgaagggtcaaagtgcaaagggcagcttttgatttttggggcaaccaactgggacttgattggtcgaaaagaagtgcctaaacagcaagctgcttaccgcaatctcggtcagaatttgtgggggccccacagatatgggtgcctggcgggggtccgggtgcggacagtggtctcgggctcgtgtgctgcacacagcctcctcatcaccacggaagggaagctgtggagctggggtcgaaatgagaaggggcagctgggacatggtgacaccaagagagtagaagcccctagactcatcgagggtcttagccacgaagtgattgtgtctgcagcatgtgggcggaaccacaccttggccttgacggaaacgggctccgtgtttgcgtttggggaaaacaagatggggcagctgggccttggcaaccagacagacgctgttcccagccccgcgcagataatgtacaacggccagccaattaccaaaatggcctgtggggctgaattcagtatgataatggactgcaaaggaaacctctattcctttgggtgccctgaatatggtcagctgggacacaactcagatgggaagttcatcgcccgggcacagcggatagagtacgactgtgaactagttccccggcgagtggccatcttcattgagaagacgaaagatggacagattctgcctgtaccaaacgtggttgtacgagacgtggcctgtggcgctaaccacacgctggtcctggactcccagaagcgagtcttctcctggggctttggtggctatggccggctgggccacgcagagcagaaggatgagatggtcccccgcctggtgaagctgtttgacttccctgggcgtggggcttcccagatctatgctggttacacctgctcctttgctgtcagtgaagtgggtggtctgtttttctggggggccaccaacacctcccgtgaatctaccatgtacccaaaagcagtgcaggacctctgcggctggagaattcggagcctggcttgtgggaagagcagcatcattgtggccgccgatgagagcaccatcagctggggtccgtcaccgacctttggggaactgggctacggggaccacaagcccaagtcttccactgcagcccaggaggtaaagactctggatggcattttctcagagcaggtcgccatgggctactcacactccttggtgatagcaagagatgaaagtgagactgagaaagagaagatcaagaaactgccagaatacaacccccgaaccctctgatgctcccggagactcctccgactccacacctctcgcggcagctgtcatttccatgtgcactgggacgggaagtcaaacgaggaatttaaaaaagcaaaagttgaccgaaggtgcatttttgtttagactccctgaggttccgttttacacatgatccaacgttaactacctttttttctgtatgctttccaaagtccttttttttcccttaatgttgaattaaaatacttgctcatagttgatttaccattcctacaaaagaggcagaaactttgagcaatctaggtttttttttttttttttaagttttttctttcttcctttcctgaatacactccccaaaacacccctttccagttacaattagcatcgtgatccaagcagatgccacatggaagaggaatcgccatttactcagaaaaaatgtcccttacaggaaccggcagcagctaggcagtcaccggcccgcctccatccaaaatcacgctcgcgtgcttcggaagcatccgggtcactccttctccgctttttcttgcagatgggcctaggccggtgtcggttctgtttctccccttggctgcctgtacgcccacagccttctggctgcgacattatagaatcggccgtgtcccccctggtgggggattggggatctgtgtttagccatttatatctactttagctgttaaagaggtccaaatgaaaatcaggtgattgtggaaccatggggacttgggggtggggcagaggtgggaacatttgtatcagttgagtcagcttggtggctccctgtggagccagggctgagccttgtcacgcgcactcgccaattaagagatggaccagccagcagtcaagtgcattctccagtccttgcaagaaggatcagccctttctgtgccagcctcgatcgccttgtgctttggtctctttttctcccccccgcctggatcctgcctcgcgcgggccgtcctgttgctgagactcggggtaccgttctgctgacccagctccctttagtcacgtttgcttggctctggtaccaaatagttgggattaccgaagagtccccttccttgcgtgtcagcacggatgctgtgactgccacctgcgtcctcgtcaagtgcccgagctcgccgccgtgtgtgctgcgctgagtgagttatgaggtgcctttcccggaaccctcctctcgcctggacccaagagaggcgacagctgtggctggggctcttggtttccagagggtctggactggtttgggtgctttaaaatagatatttagttcagtggtgcttatgggggagatgggactagaacttaagtgtgagacttgggtggatgggaaagttaaatattggtctcttcaagttttttttttcttttgctttgttaccacttgtcactgtctccatgttaaaatgccaaaaatgatgtagttgttgttgcttttttccctattttccaccccagtcgctccttaccgtgactcctgcccttggagggcatgtagcagtgtctgtcctgccagtcccaaggccctgtgggaggagactggcctgcatctctctaagacttagtctgacgccacgcgcatctcttgttctgtgttcaatcagtagtccaggggagaagcttctgctacttcagagctttgctaaactaacctaatttgtccaaatcaccccaaaaccaccatctctgacgtaagcttccatgcgacagcctgatccgtttccctggacaggtctctttcctggaatgcagcccaggcacctgtgctcctggcacccttgaggtctctcctttgagccgtggtcaccgagagggttgaggacgcagcacccgaggtcccagcctttgcaggagcctccctgggcttagctggacttagatcttcggtggcctcatgtaaacgtggcagccagcctcttctagaaccctagcccagggactggagcaggaaagggaccttcaaagtgaagactgccttgtcccgcagctccttctggcttagattgaaacatgggcttcctaatgggttaaatcctttaaaacaaggagttgtgggggaagggtgtcgtgcactcctagagaaaggtacacagttgcccggttgggaatgtgcttggcgctgaccctgcgggcatctgactggtcttccagctcaggaaaaagaatttgaaagaggcttagcgtgaaggggaatcaaagaggaggttgtgatttggtcgaaggtgcctggtttagtgctgtaattgtcttattattttttttatatatatatttcttggagtaaacattttaaat

SEQ ID NO: 1001 - DNA, 600 bp, human
ttccatccggtgggttttgctcggcgcacccgggaggcggggccagcgaggcaagatggagttagtgcaggtcctgaaacgcgggctgcagcagatcaccggccacggcggtctccgaggctatctacgggtttttttcaggacaaatgatgcgaaggttggtacattagtgggggaagacaaatatggaaacaaatactatgaagacaacaagcaattttttggccgtcaccgatgggttgtatatactactgaaatgaatggcaaaaacacattctgggatgtggatggaagcatggtgcctcctgaatggcatcgttggcttcacagtatgactgatgatcctccaacaacaaaaccacttactgctcgtaaattcatttggacgaaccataaattcaacgtgactggcaccccagaacaatatgtaccttattctaccactagaaagaagattcaggagtggatcccaccttcaacaccttacaagtaaagacaatgaagaacagttgaaacatgcaaaatatggagcttttcatgtaattactcttttactgtttaccattcactataattcacaattaaaattgtgtgactaaa

SEQ ID NO: 1002 - DNA, 3551 bp, human
aactaggggtaaggaggtacaaagaacaaggaagttaggctttgaaaatagagaacaaagaacaagtaagctgaacaagtaagttcctctttggagaggcaagagggcaaagaagctgaggacccagaagacaggattgtgcctaagaaagtggccttggagcagaggcccaaagaaagcggggagagcgccttgcccatcggtaagggaaaggtgctccaggcacagaagcagctaatgcaacggccctgaggcaaatgcaagataactggcaagttccaggaacagcaaggagggcaaggcgcctggagcagaggaagctagcggatcccttgatgagagggaggaactggcccatctctcatgggtcctgcaggcaggccatgagactgtcttttatgcggggcgagataacgaggcatggacgtgttgtgagcggaggcctagcctgttcaaggtctgaatttttacccctagaatgtaagaagcatgggagcagggactttgttttgctccctgccatatccacagccctagaaaaacgtcgggccattgatagctctcagtaaatgcttgacaagtaagtgaatgaacgaatgcacaattaatgaaatgagggctgcgtcaatgaataactgggaatctgactcctgcagggagccttcagcccacaggtgtatgtaagacccgccccgcctctcatccttcgggctcccacccccgccgttaggctgcggttcgcgccgcggtcgccagagggcgcggagcggcggggcttcccgcacggagggctttgcgtgaggcaccgcgtggggcggggctgcgggcgggctcccagctgctgggccctcatcggctgggcctcgtcgaccggcaagcggaacgcggcagcggggctgggcctgtgcggcggccgccggagcgctttggaaggcgcacggggcgaagatggcggcggagcgacaggaggcgctgagggagttcgtggcggtgacgggcgccgaggaggaccgggcccgcttctttctcgagtcggccggctgggacttgcagatcgcgctagcgagcttttatgaggacggaggggatgaagacattgtgaccatttcgcaggcaacccccagttcagtgtccagaggcacagcccccagtgataatagagtgacatccttcagagacctcattcatgaccaagatgaagatgaggaggaagaggaaggccagaggttttatgctgggggctcagagagaagtggacagcagattgttggccctcccaggaagaaaagtcccaacgagctggtggatgatctctttaaaggtgccaaagagcatggagctgtagctgtggagcgagtgaccaagagccctggagagaccagtaaaccgagagttcatgtagtattgaaactctggaagagtggattcagcctggataatggagaactcagaagctaccaagacccatccaatgcccagtttctggagtctatccgcagaggggaggtgccagcagagcttcggaggctagctcacggtggacaggtgaacttggatatggaggaccatcgggacgaggactttgtgaagcccaaaggagccttcaaagccttcactggcgagggtcagaaactgggcagcactgccccccaggtgttgagtaccagctctccagcccaacaggcagaaaatgaagccaaagccagctcttccatcttaatcgacgaatcagagcctaccacaaacatccaaattcggcttgcagacggcgggaggctggtgcagaaatttaaccacagccacaggatcagcgacatccgactcttcatcgtggatgcccggccagccatggctgccaccagctttatcctcatgactactttcccgaacaaagagctggctgatgagagccagaccctgaaggaagccaacctgctcaatgctgtcatcgtgcagcggttaacataaccgcccagccagctgcctggcctccctcctgtgtttcccatggccagtggccatgccccatggggatcgcccctcctgcccccttgtgcacacccagcagtccagtgcaacgtctcctccatagctctgggttcttagatcttggttggacgtttgttttctccttagttgcatttcctgggtttttgtgatgatcaatggactttaatgaaaaaaaaaataaaaacaaccaaaaaaattgaaggaatatcaccagcatgttgtacggaaactctcccactgaagcaggctttaattgctttaaaattatatttatcttggggcctgtgggaggaaacttccttccatcttctctgcataaaaacttgtggcacacaatgcttattcactagtgtgtcccacccgccagccccacagatgactggaggaaggaggggaaatgtgtagaaagaggcttcgccaccacttgttcccacgagaatatgtcacttgcccagataaaactgggcggcagccagagttccctgaagtgggaagtcagagctccatgcacacagtgtcttcagaaggtgaaaataaatatttccctgtgctccttttactcaacccctggggtatctaatcttgccaggtcttggccagttgagattctgttccacctgcctgcctggccctttcctccattaccatccagactgctcgcctcctggggattctcaggggctccattatggcttgatttactccacgtgcagaagtcttgagtggacctaggaggtaggtgggatattttttttcactaggatacagctcatgccaacccatcctaagtgagttcagaatcagggtatcttgccctataagataaacagtcaaaatgccaccgagctgttcactagtgatgtgtggcaaatcaaatcaactgttgaagaaggggtgagttttctgtgctacaagcacctgtcactgttggtacttgcaggaggcttctgctgggtatgttttggaagtgagtgtcactacttggctttgcttagcaggttctgcttcacacttgttctttgacctgctgacttgtgacttgcagaaacataggcagtagtcctagcctggtaaagaccctccaccacccctataagtttgattgctatgcaggtttgggagaggaggcctattgggctcttggatggaaccctttcccgtattaaacaaaccagagacagaatcagtgctgactcaggatctcctggtttggaatcgtaatgtgcctcaatcctctttccaagcaggcctcaccagtctctttctctttcctgcttcacccctgcaatgagccaagaaccaacactacatccacctagaactgcagaagggcttgtggtttcaaccaagacccatcctgagcaagggacttggcttggtgcttttgatcccaaagttcccacaccggcagtggcctgctggggcaatggcatctgtcacggtgttttctccagcaggtggagattatggaacctacatatgggtctggaaaaactgtacactgttgtcaccttgaccattaaaaaccagaatgaggacaa

SEQ ID NO: 1003 - DNA, 1091 bp, human
cgcggcgcctgctctgtagagccggcggaaccgggtagcttggccaggttgtgaggaaccgcagcgcgccgcaggaccgggccgctgagcctgcagccgccccgcgccgtgacctgcgaccctagaccccgactccctttggctcagcccgcgcgccccaggcccggcccgggcggcgcgacgggaggatgagcggcgggcggcggaaggaggagccgcctcagccgcagctggccaacggggccctcaaagtctccgtctggagtaaggtgctgcggagcgacgcggcctgggaggataaggatgaatttttagatgtgatctactggttccgacagatcattgctgtggtcctgggtgtcatttggggagttttgccattacgagggttcttgggaatagcaggattctgcctgatcaatgcaggagtcctgtacctctacttcagcaattacctacagattgatgaggaagaatatggtggcacgtgggagctcacgaaggaagggtttatgacctcttttgccttgttcatggtcatttggatcatcttttacactgccatccattatgactgatggtgtacagctcccaagtgctccctatccagtccaaaggaccctcttgattacagcacaggaacttgatcgttggggaaccccagccccttggaacttggaagacccgtgtttcctggaccgcgaatcagtgtgttgggcatcagtgttttctgcaagggttgtgacctgaaactttttaaaaaccacccacctttggggaagcatttctgaatttatccatcaccaaccatttcttcttggataccatcaagtaacagctattatttgccaagtggagctgtcatttaatttgatgcacctctggattcagatgaaacattaaattgtcttcctcgattctccatcgggtgtagagtttttaaactatcaatggcatttcaagtcttctgaaacagcatggctgtatgtgcgtggtccatagcacagtacatgcagcatctaataagagtttccattgtagaatgttttcacatacttgaataaatcaaatctttaattgagaaaaaaaaa

SEQ ID NO: 1004 - DNA, 12395 bp, human
cgctgcaagtcccggggccctgcctccatcgtcctaggggttccgcgggcaggagcaacccagaagcaccggtgaggccagcgcgtcctcgcagccatgagcagtgagcaggataaatcggccagcaaagaaaaatccaagaaaccagtaagatttctaccacagctgtctatggagaaattagccagcaaagaaaagttcaaggcaccagcaagagctttaccacagctgtctatggtgagtacaaagccccactggcagcaggcagctccatcattccatttgagtgtaaagcaggatgatgagagtccagaaccatttagtgttaaaaatgaacagtcccatgctgaatacatggaacgttttggaaaaaagggcaaattaccccaccaagttgatgatagttatgttggaccatctacttccaaatcaaagggcaaatctccacataaagaacgagaaaactttagaagtactcttgttaatgtcattatgcaacaagatgctgacttagactcagctgtccctgatggaagcacaattccaaaaccgaccgcttctgctatagagaaagacatcttgagatattactattatattcaccatggaattgatacagaccatgtagccccaatggaagattcttggctagaacacgtactggatttagttccacaacatctgaaagtcttcactgacagcatagttacattatctgatgaaatgagagaggattatcttcttagtgtaaggaaatccatagttgattttgttttaaaagatcctcgagagaaaggagatgataagaagacagatgaacttccagcccatcgtgctgaaatggaaattctgccaaaaccttggaggaaatcttttttagctgcaagcagttatattagggatcacttgaatgcaatgaaccccacaatgctggctgtactagatttgtggcacactaattttaaaaaattacgtttagttgatatcaaagaatttcataattgccaggatgcattagagctgtcaagttttcagaacattatcatgagacacatggactctgccaaagagactctacttaaaatgtggtttccagaagtgcagaatatttattaccaaggtaataaaaaaaagcaattgccaactggtgacagcagtgccaaattggaatcttttttcaactgtgctgctgcacttatgactttacagctgcaggacctcactttagtctccatgcaagatttcacggacttaattgcacaacccccagattctgttagagcttttgaacatccaggtttcatcatgaggctgattcttgataatgacaccattaagtttgaacctgagttgagtgactatatagatatctttctaaatgtttatgacgtcatgattaaagctgtcagttttgtgccaagagttgagacaaaattgtattccaagtgggaaagtaagtctaaaccaacaaccttgaagcccataattctgaatgaaattgtagatgctcacaaagaaaagatcaaggaagttattatgaaagagagtgtggcacctactgagcacctcagactctatgacaagtatgactttttaattaccagaaaagctgagcgagatgttgataacttcctcgcagaaaatcatagttatgaaaaaataatagatgaaatttgcaaataccagaaactaatagaggaaatacagtacacatccataaagactattcgtttaggaatgtttgaaatgcactgtgaggaattaatcagagctttggtgaagcgagcagatattatttgtgggaaacttctagctaaaatgttcagagatcatcaggaagtaaatacaagattatgcgatgaatttgagaggatagctgaaaaagctcttagcactcctccaaatacagcagaactaatggaaatgaaggcttacattcagaaagtggaggtaactgatatgattgaactagaacagagattagtggattccaaaaactgcctcgccttcctcatcgagtatgtcaacttttctccagcagacatgaggctaaataatagtgttttccagtggtatggaaggatgggagaaatttttgaagaacacaggaaaatcattaaagagaaaatagaacaatatcaagaaggtctgaagttacggtgtgaacggtttgtggaggaattggagagttatgctaagcaatcagaagaattttattcatttggagatcttcaggatgttcagcggtacctaaaaaaggctcaaatactgaatggaaagttggatttagctgcagataagattgagcagtttaatgctgaagaggaagcatttggttggctaccatctgtatatcctcaacgtaaaaaaatccaagatggcttgaacccttatcttcgtctttatgaaactgctgtcgaatttagcagcaactatagagcatggacagaagggccatatcataaagtgaatccagaccaagtagaagcagatattggaaattactggagaggattatataaactggagaaaacctttcatgattctccatatgcattggcaatgacaaaaaaagtaagatcaaaggtggaagatttcaagcagcacattcctctcattcaagtgatctgtaatcctggtttgcgccccaggcactgggaggccatgtctgccattgttggttaccctttgcagccatcagatgactccacagtctcctcttttttagacatgaatctggaaccatatatagaccgatttgaaggtattagtgaagcagctagcaaagaatattctcttgaaaaggcgatggagaagatgattactgagtgggatgcagtggaatttgtcatccattcttatagagaaactgggacatttattttggcatcagttgatgaaattcagatgttgttggatgaccatattattaaaacacaaactatgcgaggatctcctttcattaagccttatgaaaaacaaatgagagaatgggagggcaagctcctactgcttcaggagattctggatgaatggctcaaagtccaagccacgtggctgtatctggagcccattttcagctctccagacattatgtctcaaatgcctgaggaaggcagacgatttacagctgtggataagacatggagagatataatgagaagtgtcatgcaggataaacatgttctgacagttgtaaccattgacagaatgctggaaaggctgaaaaaatctaatgaacttttggagctcattcttaaaggacttaatgaatatttggaaaagaaacgcctctttttccccagattcttttttttgtccaatgatgaacttcttgagatactatctgagactaaagatcccactagggtgcaacctcacttgaagaaatgttttgaaggaatcgcaaaggtagaatttacggaaactttagacattactcacatgaagagcagcgaaggagaggttgtagaactcatagagattatttcaacagccaaagccagaggtcaagtggagaagtggttggttgaattagagagagttatgattaactccatccacaaggtaactggagatgcaacttttgcctatacaaaatatgaacgaattaactgggtaagggattggcctggacagactgttctctgtgtatcccaaatcttttggacaaaagaagtacaaacagctattccaatggggataaaggctcttgagcaatacttgaaaacatgtaacagacaaattgatgatattgtcactttggtgcgtggcaaattgtccatgcagaatcgcgtaactctgggagcacttgtggtactggatgtccatgctagagatgtcctctcatcacttgtaaaaaaaaatattagcgatgactctgactttgaatggttaagtcagcttaggtactactggcaagaaaatcatttagaaacaaaaatgatcaatgctggtttgcgatatggatatgaatatctgggtaattcccctaggctggttattacaccactcacggatagatgttacagaaccttatttggagcccttcatttgcaccttggaggagcacctgagggtccagctggcactgggaagactgaaactaccaaggatttggcaaaagctgtagccaaacaatgtgttgttttcaactgctctgatgggttggattatttggctttgggaaaattctttaagggactgttatcttgtggagcctgggcttgctttgatgagtttaacagaattgatttggaagtactctctgtggttgctcaacaaatccttactatccaaagaggtattaatgcaggtgctgatatactgatgtttgaaggaactgaactaaaacttgaccccacatgtgctgtctttataacaatgaaccctgggtatgctgggcgatcagaactgccagataacctgaaggctctctttcggacagtagcaatgatggtacctgactatgccatgattgctgaaatagtcctatactcctgtgggtttgtcactgctcgaccactgtctgtaaaaattgtggctacgtatcgcttgtgttcagagcagctgtcatctcaacatcactacgactatggaatgagagccgtgaagtcagttcttactgctgctgggaatctgaagctgaaatatccaaatgaaaatgaagaaattttgctgcttagatctatcattgatgtaaatctgccaaaatttttatcccatgatttaccactctttgagggaattacttcggatttgtttcctggggtaaaattaccaaaaccagattacaatgatttgctggcagctatcaaagacaattgtgcctccatgaatttgcaaatgactgcattcttttccgagaagattcttcaagtatatgaaatgatgattgtgcgtcatggttttatgattgttggagaaccatttggaggaaaaactagtgcatatcgtgtcttagctggagcactaaatgatatatgtgaaaaggggctaatggaagaaaacaaagttcaaataactgttttaaatcctaagtctgtcaccatgggccaactgtacggacagtttgattcagtgtcccatgaatggtctgatggggtccttgctgtcagttttagagcatttgcctcttcagtgactccagataggaaatggttaatttttgatggcccagtagatgcagtgtggattgagaatatgaacactgtgctggatgacaacaagaagctatgtctgatgagtggggagattattcagatgtcaccacaaatgaatctaatttttgagccaatggatttagaagttgcttcccctgccactgtttccagatgtggcatgatttacatggagcctcacatgttaggctggagaccactgatgttgtcctgggtgaatctgttacctgcgtcagtcagtgttattcaaaaggaattcataatgggcttatttgacagaatggtccctgtttcggttgaatttattagaaagcatacaaaggaattatctcctacttccgatacaaacttggtccggtccttaatgaatctaatagactgttttatggatgattttgctgatgaagtcaaactaaaggagagaaatgatcgagaaacttactctttgcttgagggcatttttctgttttcattgatctggtccgttggtgcttcttgtacagatgatgatcgattgaaatttaataagattcttcgagaactaatggaaagtccaatttcagatcgaactcgaaatacgtttaaattacagagtggtactgagcaaacatcctcaaaggcactaactgtcccatttcctgaaaaaggaacaatttatgattatcaatttgtcactgagggaataggaaaatgggaaccatggataaagaaattgaaagaagctcctccaattcctaaagatgtaatgtttaatgaaatcattgtgccaactctggacacaattcgatactctgcattaatggaattgctgaccacccatcaaaagccttcaatatttgtaggaccaacaggaactgggaaaagtgtttacattacgaattttcttttaaatcaactaaataaggaaatctacaaacctctgctaattaacttctcagcacaaactacagcagctcaaactcagaatattgtcatgtcaaaattggacaagagaagaaagggagtttttggtcctcctttgggcaagagaatggttgtctttgtagatgatgtcaatatgcctgctcgggaggtatatggggctcaacctcccattgagttacttagacagtggttagaccactggaactggtatgatctaaaagattgttccatgattaaactagtggacattcagatcatgtgtgctatgggacctccaggtggtggtcgaaatccagtaactcctcgatacatgcgacatttcaatattataacaatcaatgagtttagtgataaatccatgtatacaatcttctctagaatcttaacttggcatttagaaatctgttataaatttccagatgaatttctagatttgaccacacaaatcgtaaatggcacaatgactctgtataaagaagcaatgaagaatctcttgcctactccagctaaatctcactacttgttcaacctccgtgatttctcccgtgtcattcaaggtgtttgtttgtcaagaccagaaacaacagaaaccacagaagtgattaaacgtctttgggttcatgaggtccttcgagtgtattatgaccgccttctggacaatacagacagaagctggctcatcaactacattcaagaaattttgagaaactacatgtatgaagattttcatgagctttttcagcgtttggattttgataatgatggcatggtggaagcagatgacttacgcagcttaatgttttgtgatttccatgatcccaagagggaggataccaactacagagaaatcgcagatgtggataatcttcgaatgatagtagaaattcacctagaagaatacaacaatataagcaaaaaacccatgaaccttgtcttgtttcgatttgccatagagcacatcagcagaatttccaggatcctgaagcagcctcgcagccatgctctcctagtaggggttggagggagtggaaggcagtctgtcaccagattagctgcccacatggctgattattcagttttccaagttgaaatctctaaggggtatgatactactgaatggcatgaagatttaaaagtgatcttaaggaaatgtgcggaaggtgagatgcagggtgtcttcctgtttacagatactcaaattaaagaagagtcttttctggaagatgtcagtaatctgctaaatgctggggagattccaaatctctttgcattagatgagaagcaagagatatgtgataagatgcgtcagttagatcgccagcgggataaaaccaagcaaacagatggcagccccatagcccttttcaacatgtttattgatcattgccgcagccaactgcatgtggtccttgccatgagtcccattggagatgcatttcggaatcgtcttagaaagttccctgctcttgttaactgctgtaccattgactggtttcagtcatggcctgaagatgcactccaggcagttgcctcacgattcttggaagaaattgaaatgtcagaggaaatacgagatggctgtatcgacatgtgtaaaagcttccacacttctactatagatttatccaaatctttctttgttgaacttcaaagatacaattatgtgactcctacctcttacctcgaattaatctccaccttcaaactgttgttagaaaagaaaagaagtgaagtaatgaaaatgaaaaagagatatgaagtgggtttggagaaactggattctgcttcatctcaagtagccacaatgcagatggagttggaggcactacatcctcaattaaaagttgctagcaaagaggttgatgaaatgatgataatgattgagaaagagtctgtagaagttgccaaaactgaaaaaatagtgaaagctgatgaaacaatagcgaatgaacaagctatggcttccaaagccatcaaagatgagtgcgatgctgacctggcaggtgccttgccaatattagagtcagcactggccgcccttgatactcttactgcacaggatattacagtggtaaaatccatgaagagtcctcctgctggtgtcaagcttgttatggaagctatatgcatcttgaaaggaatcaaagctgacaaaatccctgacccaacaggttcagggaaaaaaattgaggatttctggggcccagctaagagacttcttggtgacatgaggtttctgcagtcacttcatgaatatgacaaggacaatattcctccagcttatatgaatatcataagaaaaaattatattccaaatccagattttgtaccagaaaaaatcagaaatgcttctacagcggccgaaggtctgtgcaaatgggtcatagcaatggattcatatgataaagtggcaaaaatagtagctcccaaaaagataaaactggctgcagctgaaggggagcttaaaattgccatggatggtcttagaaagaagcaggcagcccttaaggaagttcaggacaagctggccaggcttcaagacacacttgaattaaataaacaaaagaaggctgacctggaaaaccaggttgacctttgcagcaaaaaactagaacgagctgaacagttgattggaggccttggaggtgagaaaactcgatggagccacacagctctggagctaggtcagctgtacatcaacttgactggggatatcctcatttcctccggagtggttgcttacctcggagccttcacatccacctatagacagaatcaaactaaagagtggacaactttgtgcaaaggaagagatatcccctgctcagatgattgctctcttatgggtaccctgggagaagctgtgacaattcgaacttggaatattgctggattaccttctgactcattttccattgataatgggataatcataatgaatgcaagaaggtggcctctgatgatagatcctcaaagtcaggctaataaatggatcaagaacatggaaaaagccaatagtctttatgtgattaaacttagtgaacctgactatgtcaggactctggaaaattgcatccagtttggtactcctgtgttgctagaaaatgttggcgaagaactagatcctattttggaacctcttctactaaaacaaacctttaagcagggtgggagtacatgtatccggcttggggactccacaattgaatatgcacctgacttccgcttctatattactaccaagttaagaaatcctcattatcttcctgaaacatcagtaaaggtaacattattaaacttcatgataacccctgagggaatgcaagatcagcttctgggaattgtggtggcacaagaaaggccagaccttgaagaagaaaagcaagccttgatattacaaggagctgaaaataaaaggcagttaaaagaaatagaagacaagattttagaagttctttcatcttcggaaggcaatatattagaagatgaaactgctattaagatattatcttcctccaaggccttggctaatgagatttctcagaagcaggaagtagccgaagagacagagaaaaagattgacaccacccgcatgggctatcgtcctattgccatccattcttccatcctatttttttctcttgctgatttagccaacattgagcccatgtaccagtattcactgacctggtttattaaccttttcatcctgtctattgaaaattcagagaaatcagaaattttggcaaaaaggcttcagattctcaaggatcactttacttattcactgtatgttaatgtctgccggtcactctttgaaaaggataagctgctcttttccttttgtctaaccataaatctactgctgcatgagcgggcgattaataaagctgagtggagatttctgctaactggtggcattggactggataatccttatgccaacccttgtacatggcttcctcagaaatcctgggatgaaatatgtcgattagatgatttgcctgccttcaaaaccattcgtagagagtttatgcgcttaaaggatggatggaagaaagtatatgatagtttggaaccacaccatgaggttttccctgaagaatgggaagataaagcaaatgagtttcaaaggatgcttattattcgttgcttgaggccagacaaggttattccaatgttgcaggaatttataatcaacagattgggacgtgcattcattgaaccacccccctttgatttagccaaggcatttggagacagtaactgctgtgcaccactgattttcgtgctctctcctggagcagatcccatggctgcccttctaaaatttgctgatgaccagggatatgggggatcaaaacttagctctttatctcttggtcaaggccaagggcccattgctatgaagatgttagaaaaagctgtcaaggaaggaacatgggttgttcttcagaattgtcaccttgccacctcttggatgccaacccttgagaaagtctgtgaggagttaagcccagagtcaacacatccagatttccgaatgtggctaacgagttacccatctccaaatttccctgtgtcagtactgcagaatggagtgaaaatgaccaatgaagcaccaaaaggtttacgggctaatatcattcgatcatacctcatggacccgatctctgatccggagttctttggcagctgcaaaaagcctgaggaattcaagaaattgctttatggcctgtgtttctttcatgctttggtacaagaaagacggaaatttggacccctagggtggaatattccttatgagttcaatgagacagatctgagaatcagcgtacagcagctccacatgttcctgaaccagtatgaggaactgccgtatgaggctctgcggtacatgactggcgaatgcaattacggaggcagagtgaccgatgactgggaccggcgcacgctgcgcagcattctaaacaaattcttcaatcccgaattagttgaaaattcagactataagttcgactcaagtggcatctattttgttcctccttctggtgatcacaaaagctacatcgaatacacaaagactctgccactgaccccagcaccagaaatctttgggatgaatgccaatgcagatatcactaaggatcagtcagaaactcagctgctatttgataacattcttcttacacagtctcgttcagcaggtgctggtgcaaaatcatcagatgaagtagtgaatgaggtcgctagtgacatcttgggcaaacttccaaacaacttcgacatcgaggctgccatgaggaggtacccaacaacttatactcagagcatgaacactgtacttgtccaagagatgggacggttcaataagttactgaagaccataagagattcgtgcgtaaatattcaaaaagcaatcaaggggcttgcagtcatgtctacagatcttgaagaagtggttagcagcattttgaatgtcaaaattccagaaatgtggatgggtaaatcctacccaagccttaaaccacttggcagctatgtgaatgacttccttgcaagactaaaattcttgcagcaatggtatgaggttggtcctcctccagtcttctggctttctggcttcttcttcacacaagccttcctgaccggtgcccagcagaactacgccaggaaatacacaattcctattgatcttcttgggtttgactatgaagtgatggaagacaaagaatacaagcatcctcctgaggatggtgttttcattcacggattatttctggatggagcttcctggaatagaaagatcaagaaacttgcagaatcgcatcccaaaattctttatgatacagtgcctgtgatgtggctaaagccctgtaagagggcagatataccaaaacggccaagttatgttgctccattgtataagacaagtgagcggagaggagtattatccaccactggccattccacgaattttgtgattgccatgactcttccctctgaccaacccaaggaacactggattggacgaggtgtagcactgttatgtcaacttaattcataaccagaagacatcatttccttgttcctatttcttgttggctggctgagtagagaaagcatattattttactacttaaacctttttttttgtttgtttaaatacatttgactaaagttataattatgaatttacttatgagcaaatgcagctaaacttaatatgactcatacttaaatgtaaggaaatgttctgaaataaataaagactaaagaaaacacactggc

SEQ ID NO: 1005 - DNA, 3201 bp, human
gcctcggagccactgcactgctggctgcagacacaggctgcaccatgaagccagccctcctgccctgggccctgctgctgctggcgacagccctcggcccgggccccggacccacagcagatgcccaagagagctgctccatgcgctgtggcgccctggacgggccatgttcctgccacccgacgtgctctggccttggcacctgctgcttggatttccgggacttctgcctggagatattgccctactcaggatccatgatgggcggcaaggactttgtggtgcggcacttcaagatgtccagccccacagacgccagtgtgatctgcaggtttaaggacagcatccagaccctcggccatgtggactcctccgggcaagtgcactgtgtgtcacctctgctctatgagagcggccgcatccccttcactgtgtcactggacaacggccactccttccctcgtgcgggcacctggctggctgtgcaccccaacaaagtgtcaatgatggagaagagcgagttggtgaacgagacgcgttggcaatactacggcaccgccaacacctcaggcaacctcagcctgacctggcatgtcaagtcgctgcccacgcagaccatcaccatcgaactgtggggctacgaggagacaggaatgccctactcacaggagtggactgcaaagtggtcgtacctgtaccccctggccacacacatccccaactccggctctttcactttcaccccaaaacctgctcctcccagctaccagagatggcgagtgggtgcacttcggatcatcgacagcaaaaattacgcagggcagaaggacgtgcaggcgctctggaccaacgaccacgcactggcctggcacctgagcgatgacttccgagaggaccctgtggcctgggcacgaactcagtgccaggcctgggaggagctggaggatcagctgcccaacttcctggaggagctgccggactgcccctgcaccctgacccaggcccgggctgactccggccgcttcttcacggactacggctgtgacatggagcagggcagcgtgtgcacctaccaccccggggccgtgcactgtgtgcgttctgtgcaggccagcctccggtacggctcaggtcagcagtgctgctacacagcggacgggacgcagctcctgacagctgactccagcggcggcagcactcccgaccgcggccatgactggggcgcacccccgttccgcacgccaccccgagtgcccagcatgtcccactggctctacgatgtcctcagcttctattactgctgcctctgggcacccgactgcccccgctacatgcaacggcggccctccaatgactgccgcaactaccggcccccaagactggcctccgccttcggagacccacactttgtgaccttcgacggcaccaacttcacattcaatgggcgcggagagtacgtgctgctggaggcagcgctgaccgacctgagggtgcaggcgcgggcccagcccgggacgatgtccaacggcacggagacccgtggcactgggctgaccgcagtggccgtccaggagggcaactcagatgtggtggaagtcaggctggccaacaggaccggaggtctggaggtgctgctgaaccaggaggtgctgagcttcaccgagcagagctggatggacctgaaaggaatgttcctgtcggtggctgccggggacagggtctccatcatgctggcatcaggggccggcctggaggtcagcgtgcagggcccgttcctgagtgtgtccgtcctgctgcctgagaagttcctcacccacacccacggcctcctcgggacactcaacaacgaccccaccgacgacttcaccctgcacagcgggcgcgtcctgcccccaggcaccagtccccaggagctgttcctgtttggggccaactggaccgtgcacaatgcgtcctccctgctcacctacgattcctggttcctggtccacaacttcctgtaccaacccaagcacgaccccaccttcgagcccctcttccccagtgagaccaccctcaaccccagcctggcacaagaggcagccaaactatgtggggacgatcatttctgcaactttgatgtggcagccactgggagcctgagcacgggcactgccactcgggtggcccaccagctgcaccagcgtcgcatgcagagcctgcagccagtggtgtcctgtggctggctggccccacctcccaacggacaaaaggagggcaacaggtacctggcgggttccaccatctacttccactgtgacaacggctacagcctggccggggcagagaccagcacctgccaggctgacggcacctggtcctcacccaccccgaagtgccagccaggacgcagctacgcggtgctgttgggcatcatctttgggggcctcgcggtggtggcggcggttgcgctcgtctatgtgctgctgcgccgcaggaagggcaacacgcacgtctggggtgcacagccctgatgggagcagcttggctgtgagcaccaggccaagactcctgagaacaggcagcccagtcctgcgactcccgcatccccaggaccagacacctgggacctggatacttgatacctgggcatttaaccccctactctgtcatctcagaccccaggcaggaggcccagtgttccaacacccaagccccgtgctagcagcgctccgtgctcttccccaaatactcacggctctaattccccaaacctgaaacttcataccctgggattctaatacctatgtcctgagccctgacactcccacacctgagcctcagattccaatagctcactccctagagcctgacgccggggcccctgacccctgagcctcagattccaatacctcactccccagagcctgatgccggggcccctgacccctgatctacggaggcctgctcccggaccgtgcgggcaccagtgcagtgctgccttggttcctggacccctgggcccatcctgggaccccagatggggtaaggagaggccccagaaccccaaagcagacagcgagacccccagcggcagagacctccctcggcactccaggcttataatttcgaactcttctggaaggtcactcaggaacaccctccctgcctgtgcaaagagaaaacaagcgccttgtttccttcaaaaaaaaaaaaaaaaaa

SEQ ID NO: 1006 - DNA, 1897 bp, human
actttacggcagtgtggctggagccgcggctgacgggcccgcggtctgggcgtgagtgcagggaagtggagtatttgctgggccgggtaccatggacgtgggcgaacttctgagctaccagcccaataggggcacaaaacgtccccgggatgatgaagaggaggagcagaagatgcgtcggaaacaaactggtactcgagaacgcggccgctatcgggaagaagaaatgactgtggtggaggaagcggatgatgacaaaaaaaggctgctgcagattattgacagagatggggaagaggaagaggaagaggaggagccattggatgaaagctcagtgaagaaaatgatcctcacatttgaaaagagatcatataaaaaccaagaattgcggattaagtttccagacaatccagagaagttcatggaatccgagctggacctaaatgacatcattcaggagatgcacgtggtggccaccatgccagacctgtaccaccttctggtggagctgaatgctgtacagtcgcttctcggcttgctcggacacgataatacagatgtgtccatagctgtggtcgatttgcttcaggaattaacagatatagacaccctccatgagagtgaagagggagcagaagtgctcatcgatgctctggtggatgggcaggtggtagcactgctggtacagaatctggagcgcctggatgagtctgtgaaagaggaggcagatggcgtccacaacactctggctattgtggaaaacatggctgagttccggcctgagatgtgtacagagggtgcccagcagggtcttctacagtggctgttgaagaggctgaaggcaaagatgccttttgatgccaacaaactgtattgcagtgaagtgctggccatattgctccaggacaatgatgaaaacagggaattgcttggggagctggatggaatcgatgtgcttcttcagcagttatccgtgtttaaaagacacaatcccagcacggctgaggagcaggagatgatggagaatctgtttgattccctctgctcctgtctaatgcttagttccaatcgtgagcgcttcctgaagggcgagggtcttcagctgatgaatctcatgctcagggaaaagaagatctcccggagcagtgccctgaaagtgctggaccatgccatgattggccccgaaggcacagacaactgccataagtttgttgacattcttggcttacgaaccatctttcccctctttatgaaatctcccaggaagatcaagaaagtgggaaccactgagaaggaacatgaagagcatgtctgttcgatcctggcttccctcctgcggaacctgagagggcagcagcggacccggcttctgaataaattcactgaaaatgacagtgagaaggttgacagactaatggagttgcattttaaatatctgggtgcaatgcaggtggcggacaagaagattgaaggggaaaaacacgacatggtccggcgaggagagatcatcgacaatgacaccgaggaggagttctacctccggcgcctggatgcggggctctttgttctccagcacatctgctacatcatggccgagatctgcaatgccaatgtcccccagattcgccagagggttcaccagatcctaaacatgcgaggaagctccatcaaaattgtcaggcatatcatcaaggagtatgcagagaacatcggggacggccggagcccggagttccgggagaacgagcaaaagcgcatcctgggcttgctggagaacttctagaggcaccttggccctgcgcatcatggactctctcagcttccctcccaggatcagtttctacacaactctgtgtggcttttggacaaattaaagctagttttggtaaaaaaaaaa

SEQ ID NO: 1007 - DNA, 3265 bp, human
agtttggtctggagcagctgaaaccggtttgagcgtggctgcttcctgccgctcgacgccgcggcaggccgcctgggggagcgctggcgaggcacggacggcgggcgcccggtacctctgcccgcggtcctcgctctcgggcggggcggcggcgacgcggacctgcggactagcgaacccggagcacgacatcataaaataaatccatcagaatgacaccttctcaggttgcctttgaaataagaggaactcttttaccaggagaagtttttgcgatatgtggaagctgtgatgctttgggaaactggaatcctcaaaatgctgtggctcttcttccagagaatgacacaggtgaaagcatgctatggaaagcaaccattgtactcagtagaggagtatcagttcagtatcgctacttcaaagggtactttttagaaccaaagactatcggtggtccatgtcaagtgatagttcacaagtgggagactcatctacaaccacgatcaataacccctttagaaagcgaaattattattgacgatggacaatttggaatccacaatggtgttgaaactctggattctggatggctgacatgtcagactgaaataagattacgtttgcattattctgaaaaacctcctgtgtcaataaccaagaaaaaattaaaaaaatctagatttagggtgaagctgacactagaaggcctggaggaagatgacgatgatagggtatctcccactgtactccacaaaatgtccaatagcttggagatatccttaataagcgacaatgagttcaagtgcaggcattcacagccggagtgtggttatggcttgcagcctgatcgttggacagagtacagcatacagacgatggaaccagataacctggaactaatctttgattttttcgaagaagatctcagtgagcacgtagttcagggtgatgcccttcctggacatgtgggtacagcttgtctcttatcatccaccattgctgagagtggaaagagtgctggaattcttactcttcccatcatgagcagaaattcccggaaaacaataggcaaagtgagagttgactatataattattaagccattaccaggatacagttgtgacatgaaatcttcattttccaagtattggaagccaagaataccattggatgttggccatcgaggtgcaggaaactctacaacaactgcccagctggctaaagttcaagaaaatactattgcttctttaagaaatgctgctagtcatggtgcagcctttgtagaatttgacgtacacctttcaaaggactttgtgcccgtggtatatcatgatcttacctgttgtttgactatgaaaaagaaatttgatgctgatccagttgaattatttgaaattccagtaaaagaattaacatttgaccaactccagttgttaaagctcactcatgtgactgcactgaaatctaaggatcggaaagaatctgtggttcaggaggaaaattccttttcagaaaatcagccatttccttctcttaagatggttttagagtctttgccagaagatgtagggtttaacattgaaataaaatggatctgccagcaaagggatggaatgtgggatggtaacttatcaacatattttgacatgaatctgtttttggatataattttaaaaactgttttagaaaattctgggaagaggagaatagtgttttcttcatttgatgcagatatttgcacaatggttcggcaaaagcagaacaaatatccgatactatttttaactcaaggaaaatctgagatttatcctgaactcatggacctcagatctcggacaacccccattgcaatgagctttgcacagtttgaaaatctactggggataaatgtacatactgaagacttgctcagaaacccatcctatattcaagaggcaaaagctaagggactagtcatattctgctggggtgatgataccaatgatcctgaaaacagaaggaaattgaaggaacttggagttaatggtctaatttatgataggatatatgattggatgcctgaacaaccaaatatattccaagtggagcaattggaacgcctgaagcaggaattgccagagcttaagagctgtttgtgtcccactgttagccgctttgttccctcatctttgtgtggggagtctgatatccatgtggatgccaacggcattgataacgtggagaatgcttagtttttattgcacagaggtcattttgggggcgtgcaccgctgttctgggtattcatttttcatcactgagcattgttgatctatgccttttgggcttctcagttcaatgaagcaataatgaagtatttaactctttcactacagttcttgcaagtatgctatttaaattacttggccaggtataattgccagtcagtctctttatagtgagaaaatttattggttagtaatataaatattttaaactaaatatataaatctataatgttaaacatatgttcattaaaagcatagcactttgaaattaactatataaatagctcatatttacacttacagcttttcatttgatcaggtctgaaatctttagcacttaaggaaaatgactatgcataattatacctgaccatgaaaaaaataagtacctcaaatgcatgcatttgcactggtgattccaactgcacaaatctttgtgccatcttgtatataggtattttttacatgggttgacatgcacacaacaccattttcattcagtatgaaccttgaggctgctgccatttttccacttaaccaaaccagcctgaaggtgaacctcgaaacttgtttcataaatctttcaaaagttgttttacatcaatgttaaaatttcaaaatgctgcagggtaatttaatgtataaaatattagtaagaaaaagtatgtattgcatacttagtagaatagatcacaacatacaaattcaattcagtgcatgctttaggtgttaagcatgagattgtacatgtttactgttaggtccttgcatctgtggtgctaggtgagtatgagaagatgtcaaggactggacgtattttgttgcctaaaaaaaaaaggctgtttgtaggcgttttaaatatgcttattttgtgtgtctctcactacctattacacactgttgctttgtgggtttgttttgtatgtgcgtgtgttatacagtagttaaatttccatgcagaaaaataaatgtcctgaattttcaaaaaaaaaaaaaaaa

SEQ ID NO: 1008 - DNA, 3678 bp, human
cgagcctagggaggcgaggttcccgcaccggataggaacattctgttgttttcctctgccatctagtggcaaaagaaagtaattttcctggttttttgaatggatagccataccttaaaaagcatccagattgcgcagtagtgctagcggcttcgcggttcagtcctcctaactgacagccgccactggtgctgagctgctaggaagcccctgtcggcgagcttgttggagcttgaacccactgtcacccctccgactcaccggcaaaaaaaaaaatggttgaagcagatcgcccaggaaagctcttcattggtgggcttaatacggaaacaaatgagaaagctcttgaaacagtatttggcaaatatggacgaatagtggaagtactcttgataaaagaccgtgaaaccaacaaatcaagaggatttgcttttgtcacctttgaaagcccagcagacgctaaggatgcagccagagacatgaatggaaagtcattagatggaaaagccatcaaggtggaacaagccaccaaaccatcatttgaaagaggtagacatggaccgcccccacctccaagaagtagaggtcctccaagaggttttggagctggaagaggaggaagtggaggaaccaggggacctccttcacgaggaggacacatggatgatggtggatattccatgaattttaacatgagttcttccaggggaccactcccagtaaaaagaggaccaccaccaagaagtgggggtccttctcctaagagatctgcaccttcaggactagttcgcagcagcagtggaatgggaggaagagctcctctatcacgtggaagagatagttatggaggtccacctcgaagggaaccgctcccctctcgtagagatgtttatttgtccccaagagatgatgggtattctactaaagacagctattcaagcagagattacccaagttctcgtgatacaagagattatgcaccaccaccacgagattatacttaccgtgattatggtcattccagttcacgtgatgactatccatcaagaggctatggcgatagagatggatatggtcgtgatcgtgactattcagatcatccaagtggaggttcctacagagattcatatgagagttatggtaactcacgtagtgctccacttacacgagggcccccgccatcttatggtggaagcagtcgctatgatgattatagcagctcacgtgatggatatggtggaagtcgagacagttactcaagcagccgaagtgatctctactcaagttgtgacagggttggcagacaagaaagagggcttcccccttctgtagaaagggggtacccttcttcacgtgattcctacagcagttcaagccgcggagcaccaagaggtgctggccctggaggaagccgatctgatagagggggaggcagaagcagatactagaaacaaacaaaactttggaccaaaatcccagttcaaagaaacaaaaaaaagagtggaaactattctatcataactacccaaggactactaaaaggaaaaattgtgttaccttttttaaattccctgttaagtcccttccgtaatttttatgttcttgtgaggaaaaaagtaaaacatgtttaattttatttgactttatgacattgcttttcaacaagcaaatgttaaatgtgttaagccttgtagtactagtgttgtaactttccaagtaaaggtgtccctaaagaccacttcctatctggtttttcccagtaaatgaggcaagcaattctaagatcttccacaaaacatctagccatctaaaatggagagatgaatcattctgcctatacaaacaagctagctattagagggtggttggagtatgctactcataagatttcagggtgttttctaactgaaatctcactgttctcagtatgcaaaacctgaaatcagatgcctatgtaaggaaagtgctattcacccagtaaacccaaaaaaagcaaatggataatgctggccattttgcctttctgacatttccttgggaatctgcaagaacctcccctttcccctcccacaataagaccatttaagtgtgtgctaaacaactacggaatactaaataaaaagtttggccaaaaccaaccatgaagctgcaaaggtgcttgctcttactctttcaaatttttgcaactctaatgtctcacttttaaaggaacagcttgattgcaaaggagaaaatagataagcaatgaatttatctccaacttcctaaaggcttatgacttctaaaaagtgaatctatcagcattccacatcagatttaaagcatcaaatgcctgtgaaacagcaaagatggttgaagattgtgctcattatgtttgtggagtgctgattgattcacagtagataacgctggcagtaagagaaatcaaatgctaagagttgttgaagcagaaggcggctgattgttggtaagtcagtgcagttgcataagcagtgctgtcagaattggtttggtgcaggcaatagattttgccttcaagggttcctgtggatctcaggaaggcatcagtgttgattaacactcataactagggagtgagtggtagttacttaagtaattgaccaaatggaaaaggggaagtaattaaggaaattggtaagtggaggtagtcaggaggttctcgtggtcctttacacagattttacagctttgggtttcattttgtttagctaaagtcatggggacaactcttcaatttagaacttaagatgaattataaaaatgatggatataagtggtagctctatctggtgaagtgtcttgtcagtaagtgaaacatttttttgtggtggcttatccacaaacagtttagttgtagaataaaacttatgagtgacatctggaaagtaacaaccatgctaagatggcaaacacactggaaacaattgggccacttggctttcttttgctgtattgttttataagcctgctttacctccccgtcttggaaacaagttttagtttattgctttggagactagagccaatagtgtaatgttctcaaaggaaacagacttgagttgttggattagaggaactaactcaacttctaattttttttgttgtaattatggcactgtcatgttttaacatttgcaactagggatagtaagtacaacatttttaactctcatttggcagactactactaatcacagaccacaagggtaatgaccaaatttatgtggttgttacacttccatagttgtcttagccgaatccttccatattcttatgattacttgggttaaagcttctgtgaggaccttttggctcttaagatatcctaaatatttaaaatatttagatatcctaaatataggatatagagtttgtaccaaatatgaatgaatattgttcaaagcaaggagtatgttaaaatgaccagacacctgtttgataaatagtttactgaactagcagacgtgtggaaaaagaatcagatcttgattcttctgggtttatactggttgtaaaacagaatgatattagaaaatgttttccttgtttaagtggtagttgaacatagaacttgggtattatagatcacttttcactttttggaatgttttgtattgaaacttaatacaactttaacatggcaaaaaaaaaaaaaaa

SEQ ID NO: 1009 - DNA, 4071 bp, human
atgaaagtgaccgtgtgcttcggacggacccgggtggtcgtgccgtgcggggacggccacatgaaagttttcagcctcatccagcaggcggtgacccgctaccggaaggccatcgccaaggatccaaactactggatacaggtgcatcgcttggaacatggagatggaggaatactagaccttgatgacattctttgtgatgtagcagacgataaagacagactggtagcagtgtttgatgagcaggatccacatcacggaggtgatggcaccagtgccagttccacgggtacccagagcccagagatatttggtagtgagcttggcaccaacaatgtctcagcctttcagccttaccaagcaacaagtgaaattgaggtcacaccttcagtccttcgagcaaatatgcctcttcatgttcgacgcagtagtgacccagctctaattggcctctccacttctgtcagtgatagtaatttttcctctgaagagccttcaaggaaaaatcccacacgctggtcaacaacagctggcttcctcaagcagaacactgctgggagtcctaaaacctgcgacaggaagaaagatgaaaactacagaagcctcccgcgggatactagtaactggtctaaccaatttcagagagacaatgctcgctcgtctctgagtgccagtcacccaatggtgggcaagtggctggagaaacaagaacaggatgaggatgggacagaagaggataacagtcgtgttgaacctgttggacatgctgacacgggtttggagcatatacccaacttttctctggatgatatggtaaagctcgtagaagtccccaacgatggagggcctctgggaatccatgtagtgcctttcagtgctcgaggcggcagaaccctggggttattagtaaaacgattggagaaaggtggtaaagctgaacatgaaaatctttttcgtgagaatgattgcattgtcaggattaatgatggcgaccttcgaaatagaagatttgaacaagcacaacatatgtttcgccaagccatgcgtacacccatcatttggttccatgtggttcctgcagcaaataaagagcagtatgaacaactatcccaaagtgagaagaacaattactattcaagccgttttagccctgacagccagtatattgacaacaggagtgtgaacagtgcagggcttcacacggtgcagagagcaccccgactgaaccacccgcctgagcagatagactctcactcaagactacctcatagcgcacacccctcgggaaaaccaccatccgctccagcctcggcacctcagaatgtatttagtacgactgtaagcagtggttataacaccaaaaaaataggcaagaggcttaatatccagcttaagaaaggtacagaaggtttgggattcagcatcacttccagagatgtaacaataggtggctcagctccaatctatgtgaaaaacattctcccccggggggcggccattcaggatggccgacttaaggcaggagacagacttatagaggtaaatggagtagatttagtgggcaaatcccaagaggaagttgtttcgctgttgagaagcaccaagatggaaggaactgtgagccttctggtctttcgccaggaagacgccttccacccaagggaactgaatgcagagccaagccagatgcagattccaaaagaaacgaaagcagaagatgaggatattgttcttacacctgatggcaccagggaatttctgacatttgaagtcccacttaatgattcaggatctgcaggccttggtgtcagtgtcaaaggtaaccggtcaaaagagaaccacgcagatttgggaatctttgtcaagtccattattaatggaggagcagcatctaaagatggaaggcttcgggtgaatgatcaactgatagcagtaaatggagaatccctgttgggcaagacaaaccaagatgccatggaaaccctaagaaggtctatgtctactgaaggcaataaacgaggaatgatccagcttattgttgcaaggagaataagcaagtgcaatgagctgaagtcacctgggagcccccctggacctgagctgcccattgaaacagcgttggatgatagagaacgaagaatttcccattccctctacagtgggattgaggggcttgatgaatcccccagcagaaatgctgccctcagtaggataatgggtgagtcaggtaaataccagctgtcccctacagtgaatatgccccaagatgacactgtcattatagaagatgacaggttgccagtgcttcctccacatctctctgaccagtcctcttccagctcccatgatgatgtggggtttgtgacggcagatgctggtacttgggccaaggctgcaatcagtgattcagccgactgctctttgagtccagatgttgatccagttcttgcttttcaacgagaaggatttggacgtcagagtatgtcagaaaaacgcacaaagcaattttcagatgccagtcaattggatttcgttaaaacacgaaaatcaaaaagcatggatttaggtatagctgacgagactaaactcaatacagtggatgaccagaaagcaggttctcccagcagagatgtgggtccttccctgggtctgaagaagtcaagctcgttggagagtctgcagaccgcagttgccgaggtgactttgaatggggatattcctttccatcgtccacggccgcggataatcagaggcaggggatgcaatgagagcttcagagctgccatcgacaaatcttatgataaacccgcggtagatgatgatgatgaaggcatggagaccttggaagaagacacagaagaaagttcaagatcagggagagagtctgtatccacagccagtgatcagccttcccactctctggagagacaaatgaatggaaaccaagagaaaggtgataagactgatagaaaaaaggataaaactggaaaagaaaagaagaaagatagagataaggagaaggataaaatgaaagccaagaagggaatgctgaagggcttgggagacatgttcaggtttggcaaacatcgaaaagatgacaagattgagaaaacgggtaaaataaaaatacaggaatcctttacatcagaagaggagaggatacgaatgaagcaggagcaggagaggattcaagccaaaactcgagaatttagggaacgacaagctcgagagcgtgactatgctgaaattcaagattttcatcggacatttggctgtgatgatgagttaatgtatgggggagtttcttcttatgaaggttccatggctctcaacgctagacctcagagcccacgagaagggcatatgatggatgctttgtatgcccaagtcaagaagccgcggaattccaaaccctcacctgtagacagtaacagatcaactcctagcaatcatgatcggatacagcgtctgaggcaagaatttcagcaagcaaagcaagatgaagatgtagaagatcgtcggcggacctatagttttgagcaaccctggccgaacgcacggccggcgacgcagagcgggcgacactcggtgtccgtggaggtgcagatgcagcggcagcggcaggaggagcgcgagagctcccagcaggcccagcgccagtacagctctctgcctcggcaaagcaggaaaaatgccagctcggtctcccaggactcttgggagcagaactactcccctggggaaggcttccagagtgccaaagagaaccccaggtactccagctaccaaggctccaggaacggctacctgggaggacatggcttcaacgccagggtcatgctggaaactcaggagctccttcgccaggaacagaggcggaaggagcagcagatgaagaagcagcctccttccgaggggcccagcaactatgactcgtataagaaagtccaggaccccagttacgcccctcccaaggggcccttccggcaagatgtgcccccctccccttctcaggttgcgaggctgaacagacttcagactcctgagaaagggaggcccttctattcctga

SEQ ID NO: 1010 - DNA, 2390 bp, human
ggatttgcggagcgccgcgccgctgccgggagccggcaggcccgagagtgaccggagtcacggcgggcgccggcggagctgcggcgtcggacccgcctcctggaggagctcagccccgaccaggcccggccccattcccgccccgcgccgcctccccgccgccgccgccgccgccgccgcgggagcgctcccctgcccaccccgcccccgcggccgagcccgggagtcgagtgggagtcggccggccggcgcgggcagcgccgggaccccgcgggggacactgcagccggagcccgggaggggccgcgccgccaccgtctgaactaggatgtcccgacatgaaggtgtcagctgtgatgcatgtttaaaaggaaattttcgaggtcgcagatataagtgtttaatttgctacgattacgatctttgtgcatcttgttatgaaagtggtgcaacaacaacaaggcatacaactgaccacccaatgcagtgcatattaacaagggtagattttgatttatactatggtggggaagctttctctgtagagcagccacagtcttttacttgtccctattgtggaaaaatgggctatacggagacatctcttcaagaacatgttacttctgaacatgcagaaacatcaacagaagtgatttgtccaatatgtgcagcgttacctggaggcgatcctaatcatgtcacggatgactttgcagctcatcttacacttgaacacagagcccctagagatttagatgaatcgagtggtgttcgacatgtacgtagaatgtttcaccctggccggggattaggaggtcctcgtgctcgtagatcaaacatgcactttactagcagttctactggtggactttcttcttctcagagttcatattctccaagcaatagggaagccatggatcctatagctgagcttttatctcagttatcaggagtgagacgttctgcaggaggacagcttaattcctctggcccttccgcttctcagttacaacaactgcagatgcagctgcagctagaacggcagcatgcccaggcagcacggcaacaactggagaccgcacgcaacgcaacccggcgtactaacacaagcagtgtcaccactacaatcacacaatccacagcaacaaccaacatagctaatacagaaagcagtcagcagactctacagaattcccagtttcttttaacaaggttgaatgatcctaaaatgtctgaaacggagcgccagtccatggaaagcgagcgtgcagaccgcagcctgtttgtccaagagctccttctgtccactttagtgcgtgaagagagctcatcctcagatgaggatgatcggggggagatggcagattttggtgctatgggctgtgtagatattatgcctttagatgttgctttagaaaacctaaatttaaaagagagtaataaaggaaatgagcctccaccacctcctctttgatgacatcccaattcgcagacaatgtcctctgtgctgtatttgccaatgaaagtggacaacaactatcttgggtttgtttggtgattgtaatttcaggtctgtcactcttgttacattgtgtacattcaaaaggaagagagaaaatatatatgataatcatttccacttaactaatttttacttctagcaggtaaatgtaggtagcagtgcaggggtgatctctgcttcctgtaccttgacatgcaaaaggctctcctaatactccacattcaaactgaagaggaaaattgaaatctctaatgaagctgctgtgtgtatttatgaatattaatgaataaaaactgcttggatggtttaccttaactactgcatgaggttttttgcagcgtgcatgagttttagtgaccttgttatttaagaagttaaatacaaggagtaaaacttaaaaaaaaaatacaaagcccaaagctttcccaaacattattcaatggttacacgacgaagtagcttttgaataatgtctgcctgaatcacctttctttgtgtgcctcctacgcacaaagccagctctgcagtggaatctggggattatagccgggtgtggcactccgccctgtgtgactgtcctgtcgccctgttagtcatcttgcctgtgtggagctcagcctgtctctttaactcatctgtagaagacacaccagtaaagctactgttggaatctgctgcaggggcctttgtgtgccctaaaaacaaatcctgttcatgtttgtttaaagtttttactttttgtggttgtttaaaattttttcaattgttaaatatgttttattcaggtgtagatgaatttcatttattgactgttcaacagagttaacctgaattatgttgtctttgtttttaaaaatctcacattctc

SEQ ID NO: 1011 - DNA, 3385 bp, human
ggcagtcgcggaaggcgcgggagcttgcgtgctgctgggcctgagctgtctgtctcgtttctgtccgcgcgccctgcatcccggccccgggcgcccgctggaggtcgccgaggagccacagggctgactggtctgctgcccgggcccaggagtgcctggtgtagcagtcgcggagccatcccggcgtctgctgccatgaccgactctcccctcagaggagactcttcctcagcggtggctgcagagacagatgagcggcggctcctggccgcgggaccgtgagacgggttcgtggccggccatttagggggacgctgcgaccaccgcctgcgcccctccggactggttccttgggccccggaagctcgcggcgggccctgcgggaggcggcatgctcccgcggaggctgctggccgcctggctggcggggacgcggggcgggggcctgctggcgcttctggccaatcagtgccgcttcgtcacgggcctgcgcgtgcggcgcgcgcagcagatcgcgcagctctacggccgcctctactccgagagctcacgccgcgttctcctcggccgcctctggcgccggctgcacggccgtcctggccatgcctctgccttgatggcggcgttagccggcgtcttcgtttgggacgaggagaggatccaggaggaggagttgcagagatctattaatgagatgaagcggttggaagaaatgtcaaatatgtttcagagctctggagtccagcaccaccctccagaaccaaaagcccaaacagaagggaatgaagattcagagggcaaagagcaacgttgggaaatggtgatggataagaaacactttaagctgtggcggcgcccaattacaggcacccacctttaccagtaccgagtttttggaacctacacagatgtgacacctcggcagttcttcaatgttcagctggacacagagtatagaaaaaaatgggatgccctggtaatcaagctggaggtgattgagagggatgtggttagtggttccgaggttcttcactgggtaacccattttccttatccaatgtactcacgggattatgtttatgttcggcggtatagtgtggatcaggaaaacaacatgatggtgttggtgtcgcgtgctgtggagcatccgagtgtgccagagtctccagaattcgtcagggtcagatcatatgaatcccaaatggttatccgtccccacaagtcatttgatgagaatggctttgactacttactaacatacagtgacaatccccaaacggtgtttcctcgctactgtgttagttggatggtttccagtggcatgccagatttcctggagaagctgcacatggccactctgaaagccaagaatatggagattaaagtaaaggactacatctcagctaagcctctggaaatgagtagtgaagccaaggccaccagccagtcctctgagcgaaagaacgagggcagctgtggccctgctcggattgagtatgcttgacaggctttgggataagaagggacaaggtgcttctagccctgtctcagtccgttatcactctgctgtagaagggggacatgccacatgtattagaaggcatctgctgtaacttccagtgcaagataattcaataactgatgtcccatttcattcagagcccttattgctcttatcaaaacagaagaaggctacatttgtgggagtgttgtcatattctcaggccaactgttttgaaattcggtatctcactgagctaatctggaacaaacctctcacctcaggccagaaggggatgacctccatttgcttctctgagtagtttcctctgctgacattccaaatcccaccatcgattgtgcagcgctttggatttccttcagttctccaggtccacctggaaagtatagttggccagttgagtctctcaaatgaggggctactgggagtgctcttggtaacaatcatgatgtgaatgggtgtgaacgatacttggctatgttaagtgccttgtccgcaccttgcttttatctctagagacatgaagttattattaattttttttttttttaagtagagatggagtttcactctgtttcccaggctggtcttgaactcctgggccatgcctggccagggacatgaatttgtacaaagaaatttccctccctgcctgcacaatatcacccattgactcaccttatccaaagcaagtttcctgtgaatcggccagttcttctatattcattggatcattgcctccttcctaaccttccccatttaccaagaacactgggagactaatccttttagatagtagctttttgatgctcaaaacatcacatttaaatttagtttaaaaattttttaacttttgtgtcaaataggagttgaggaattgagcaggattctaccctagtccgattgtatagaaaacaccattttgattcaggtattatttttcatatttcaggtttgacttgttcttttcagaaggctaaagtcagaggaatgggggctgggccactcccttggagctctcagatctacagacaagctgtgtgaatgcatagatgtaatcttgtctcaaatactaatacagtggagatttggtttatgttaccattaagttcctctaaaaagtttttcttcctctcttcagagccaaaataaaagtgaactacactgttcagataaggtcacaatctgatgctgtcagtttgaccgagctggttttgcttatggtcatgctgcaatttgttagaataatagggatcaagttttaaatcctcctccttcccttttttctggagtcttgagggccagagtttttgtttttgtttttgtttttgttttcctgcttgctactgttttgtggtgttgaaaagtggtttaaacctgagactaacttaaacacttccttgaccttcttgttgcctgttcatttttgtgccaaggaagtagctgccccagtgtatgtcttgccttctccgcgtcattgttggaagaggagagatgcatcgagcagtcccagctgcttttcatttattacttcttctttccaggacctgacagaagtcagggaagagtccctgggttatgtccaaacttagcacctgcaattgttgggatgtggatggatgtgtgcataagagagagagagaatatgtgtgtgtgtgtgtgcgtctgcgagcgcacacacatgcacaagtgcgaaggagttgcggttgctccatgttctgacttagggcaatttgattctgcacttggggtctgtctgtacagttactcatgtcattgtaatgatttcactcctaactgtgacatttttatcaaatgtgtgaataaatacataaagattggtacaaaaaaaaaaaaaaaaaa

SEQ ID NO: 1012 - DNA, 1019 bp, human
gaggcgacgccgcggtccgcgctgatctccaggcgctcagtccgcgccgcaggtggtgcttgtctgcagagtcatgacctctttccgcttggccctcatccagcttcagatttcttccatcaaatcagataacgtcactcgcgcttgtagcttcatccgggaggcagcaacgcaaggagccaaaatagtttctttgccggaatgctttaattctccatatggagcgaaatattttcctgaatatgcagagaaaattcctggtgaatccacacagaagctttctgaagtagcaaaggaatgcagcatatatctcattggaggctctatccctgaagaggatgctgggaaattatataacacctgtgctgtgtttgggcctgatggaactttactagcaaagtatagaaagatccatctgtttgacattgatgttcctggaaaaattacatttcaagaatctaaaacattgagtccgggtgatagtttctccacatttgatactccttactgcagagtgggtctgggcatctgctacgacatgcggtttgcagagcttgcacaaatctacgcacagagaggctgccagctgttggtatatccaggagcttttaatctgaccactggaccagcccattgggagttacttcagcgaagccgggctgttgataatcaggtgtatgtggccacagcctctcctgcccgggatgacaaagcctcctatgttgcctggggacacagcaccgtggtgaacccttggggggaggttctagccaaagctggcacagaagaagcaatcgtgtattcagacatagacctgaagaagctggctgaaatacgccagcaaatccccgtttttagacagaagcgatcagacctctatgctgtggagatgaaaaagccctaaagtttatgtttctaatgtgtcacagaataggacgatatgattctacaacataatcaactccctattaaattctttaatgaaaaaaaaaaaaaaaaaaaaaaaaaaaaaaaaaaaa

SEQ ID NO: 1013 - DNA, 3308 bp, human
tcccggtagccgcagctgtcttttccggcccccgtgcactctccgcccgagcggagccccccggctcgcggggatcgcccccgagcgctgcgtcctgcgggtcacctaacccatttgtggcttcctctacctgtgctcagccatggccagcgagagctcacctctgctggcctaccggctcctgggggaggagggggttgccctccctgccaatggggccgggggtcctggaggggcgtctgcccggaagctgtccaccttcctgggtgtggtggtgcccactgtcctgtccatgttcagcatagttgtttttctgaggattgggttcgtggtgggtcatgctgggctactgcaggccctggccatgctgctggttgcctacttcatcctggcactcaccgtcctctctgtctgtgccatcgccaccaatggagccgtgcaggggggcggagcctacttcatgatcagccgcacactggggcccgaggtcgggggcagcattgggctcatgttctacctggctaacgtctgtggctgtgccgtctccctcctggggctggtggagtctgtgcttgatgtcttcggggccgatgccacagggcccagtgggctccgggtcctgccccagggctacggctggaacctgctgtatggctccctgctgctgggccttgtgggtggggtctgcaccctgggagccggcctctatgcccgggcctcattcctcacattcctgctggtctctggctccctggcctctgtgctcatcagttttgtggctgtggggccgagggacatccgcttgactcctaggcctggccccaatggctcctccctgccgccccggtttggccacttcaccggcttcaacagcagtaccctgaaggacaacttgggcgctggctatgctgaggactacaccacgggagccgtgatgaattttgccagcgtctttgctgtcctctttaacggctgtacaggcatcatggctggggccaacatgtcaggggagctgaaggaccccagccgggcgatccctctgggcacgatcgtcgccgtcgcctacaccttcttcgtctatgtcctgcttttctttctctccagcttcacttgtgacaggaccctgctgcaggaagactatgggttcttccgcgccatcagcctgtggcccccactggtgttgatcggaatctatgccacagcgctctcagcgtccatgagctcgctcattggtgcctcccgcatcctccatgccctggcccgggatgacctctttggcgtgatcttggcaccggccaaggttgtgtcccgagggggaaacccctgggcagctgtactttattcttggggcctggtgcagctggtgctcctggctgggaagctgaacacactggctgctgtggtcactgtcttctacctggtggcctatgctgccgtggacctgtcctgcctgagcctggagtgggcctcggcccccaacttccgccccaccttcagcctgttctcctggcacacctgcctgctgggggtggcctcctgcctgctcatgatgttcctcatcagtcctggcgcggctggtggctccctgctcctcatgggtctgctggctgccctgctcaccgcgcgaggaggccccagtagctggggctatgtcagccaggccttgcttttccaccaggtgcgtaagtatctgcttcggctggacgtccggaaggatcacgtgaagttctggcggccccagctgctgctcctggtggggaacccccggggcgccctgcctctgctgcggttggccaaccagcttaagaagggggggctgtatgtgctgggccacgtcaccctgggagacctcgactccctgccctcggaccctgtacagccgcagtatggggcatggctcagcctggtggaccgtgcccaggtgaaggcttttgtggatctaaccctctcaccctccgtgcgccagggggctcagcatctgctgcgaatctccggcctcggtggcatgaagcccaacacgttggtcctaggtttctacgatgacgctccaccgcaggaccatttcctgacggacccggctttctctgagcctgcagacagcaccagggagggcagttccccagctctgagcaccctgttccctcctccccgggctcctgggagcccccgggccctcaatccccaggactatgtggccacggtggccgacgccctcaagatgaacaagaatgtggtgctggcccgggccagcggggccttgccccctgagcggctgagccgggggtctgggggcacctctcagctgcaccatgtggacgtgtggcccctcaacctgctgcggccccggggtgggcccggctatgtggatgtctgcggcctcttcctgctgcagatggcaaccatcttgggcatggtgcccgcttggcatagcgcccggctccggatcttcctgtgcctggggcctcgggaggcgcctggggcggccgaggggcggctgcgggcactgctgagccaactgaggatccgggctgaggtgcaggaggtggtgtggggcgagggggccggggctggggaacccgaggcggaggaggaaggggactttgtgaacagtgggcggggagacgcagaggcagaggccctggcacgcagcgccaacgccctggttcgggcccagcaggggcgcggcacaggaggagggccgggtgggccggagggtggggatgctgagggccccatcacagccctcaccttcctgtacttgcctcggccgccagccgatcccgcccgatacccccgctacctggcgctactggagactctaacccgagacctgggccccacgctgctggttcatggggtcactccagtcacctgcactgatctgtgatgcccctgcctccagggctaggtagagagggcccaggcaggcggcctatcctgatccttggaggaggaggaagaggaggccactgtggcccgtggccctgcccttgggacgtggagcccaggggaggtttgaaggggatcctgggcttgggcatcacgcccacctcctttggcagagggaccccagcacactaactctgggtggctgtccccaccgtgcaggggagggagtccgcagcctcccttcactggtgccttgatgctaggggccaggcctcctctgtgactctgggctacctcagtttccccattttggccagactcaccggcccactggggtggtgatgttttcgttctgttttatttttctaactctgctgaccatgaataaaagaccaaaacactacaaaaaaaaaaaaaag

SEQ ID NO: 1014 - DNA, 2913 bp, human
gttggtaaacagatccggagcgcgtggcgggcgtcagcgcggtggccagcgcgcagaggcgggcgcggaggcggctagaaggtgaccgcggatcccagcttcctgcagccagccctgaaggatggctgccatattgggagacaccatcatggtggctaaaggccttgtcaagctgacccaggcggccgtggaaacccacctgcagcacttgggcatcggaggggagctgatcatggcggccagggccctgcagtccacggctgtggagcagattggcatgttcttggggaaggtgcagggtcaggataaacatgaagaatattttgctgagaacttcggcggcccagaaggggagttccacttctcagtcccgcatgcagccggagcctccacagacttctcttcagcctccgctcccgaccagtcagcgcccccatccctgggtcatgcccacagcgagggcccagctcctgcctacgtggccagtggaccctttagagaagccgggttccccggccaggcctcctcccctctgggcagggccaacgggaggctctttgcaaaccccagagactcattctctgccatgggctttcagcgaaggttcttccaccaggaccaatcccctgttgggggcctcacagccgaggacattgagaaggcccggcaggctaaggctcgccccgagaacaagcagcacaaacagacgctcagcgagcatgcccgggagcggaaggtgcctgtgacgaggattggccggctggccaacttcggaggtctggccgtgggcctgggcttcggggcactggcagaggtcgccaagaagagcctgcgctccgaggacccctcagggaagaaggccgtgctgggttccagtcctttcctgtccgaggccaatgcagagcggatcgtgcgcacgctctgcaaggtgcgtggtgcggcactcaagctgggccagatgctgagcatccaggatgatgcctttatcaacccccacctggctaagatcttcgagcgggtgcggcagagcgcggacttcatgccactgaagcagatgatgaaaactctcaacaacgacctgggccccaactggcgggacaagttggaatacttcgaggagcggcccttcgccgccgcatccattgggcaggtgcacttggcccgaatgaagggcggccgcgaggtggccatgaagatccagtaccctggcgtggcccagagcatcaacagtgatgtcaacaacctcatggccgtgttgaacatgagcaacatgcttccagaaggcctgttccccgagcacctgattgacgtgctgaggcgggagctggccctggagtgtgactaccagcgagaggccgcctgtgcccgcaagttcagggacctgctgaagggccaccccttcttctatgtgcctgagattgtggatgagctctgcagcccacatgtgctgaccacagagctggtgtctggcttccccctggaccaggccgaagggctcagccaggagattcggaacgagatctgctacaacatcctggttctgtgcctgagggagctgttcgagttccacttcatgcaaacagaccccaactggtccaacttcttctatgacccccagcagcacaaggtggctcttttggattttggggcaacgcgggaatatgacagatccttcaccgacctctacattcagatcatcagggctgctgccgacagggacagggagactgtgcgggcgaaatccatagagatgaagttcctcaccggctacgaggtcaaggtcatggaagacgcccacttggatgccatcctcatcctgggggaggccttcgcctctgatgagccttttgattttggcactcagagcaccaccgagaagatccacaacctgattcccgtcatgctgaggcaccgtctcgtccccccacccgaggaaacctactccctgcacaggaagatggggggctccttcctcatctgctccaagctgaaggcccgcttcccctgcaaggccatgttcgaggaggcctacagcaactactgcaagaggcaggcccagcagtagggctgcgggccacgcccaggccggctccgcgggaactctctccctcagacaggccaaaaaccagtagcgaggtcgtggtgatgctctttttaactcctttgcccaataaggggggtggctgcctggagccccgtagccagcgctttccacggtttctgttgctaaatggttgtagggtgagaagtgcaagaatgaagatgaagccccactgctcggtcagtctgcctccgtgtgtcctctgaaataagcagatgaagatgaaagggcaactttgttttcttctttttcctgatgtgaatgttaagcagaagggagagagtccttactcccttccaatctctgttcagtgcaaaacccagaaacatgaacagatacgattgtgggattttatcatctgtgtagtaggtgtgtgtatgtgtttctagagtgagatttgtgttttctgcccttttcctctccagccaatgggctggagctgggagaggtgctgagctaacagtgccaacaagtgctccttaagcctgcgaggcccaggcctgtggggctggttctcacctttgacagctgaatgttcctaaagaactgctgccccacagtgagggtgggagcagcggaacagggaatgccagacacaggctcgctgctgctggaaggcggggtgggacttccttcctctgtccggagaggcacaggtgtcaccagttccagccaaaggctcctcacaggcgctgtgaatttttgtacaagtcttgtaattatcgaatcaacaacttgtttcaatttaataaaaatgctcatgggaagtgaaaaaaaaaaaaaaaaaaaaaaaaaaaaaaaaaaaaaaaaaa

SEQ ID NO: 1015 - DNA, 2105 bp, human
atggcagattttgggatctctgctggccagtttgtggcagtggtctgggataagtcatccccagtggaggctctgaaaggtctggtggataagcttcaagcgttaaccggcaatgagggccgcgtgtctgtggaaaacatcaagcagctgttgcaatgtttagtcccaggaagcaccactctgcacagtgctgagattttggctgaaatcgcccggatccttcggcctggtggatgtctttttctgaaggagccagtagagacagctgtagataacaatagcaaagtgaagacagcatctaagctgtgttcagccctgactctttctggtcttgtggaagtgaaagagctgcagcgggagcccctaacccctgaggaagtacagtctgttcgagaacaccttggtcatgaaagtgacaacctgctgtttgttcagatcacaggcaaaaaaccaaactttgaagtgggttcttctaggcagcttaagctttccatcaccaagaagtcttctccttcagtgaaacctgctgtggaccctgctgctgccaagctgtggaccctctcagccaacgatatggaggacgacagcatgtgcatcttctgtggatgtagtttaactcaccgttggcctcttgagcatgtggtcaggttgaacatgatgatcaaccaaaaggaggacagggtggacaccttctttaccctggactccaagtttcctctcgaagcctgcagtcactttagcttttcattagcagagaccacgactgtatcactcattgctttgaacactctccaggatctcattgactcagatgagctgctggatccagaagatttgaagaagccagatccagcttccctgcgggctgcttcttgtggggaagggaaaaagaggaaggcctgtaagaactgcacctgtggccttgctgaagaactggaaaaagagaagtcaagggaacagatgagctcccaacccaagtcagcttgtggaaactgctacctgggcgatgccttccgctgtgccagctgcccctaccttgggatgccagccttcaaacctggggaaaaggtgcttctgagtgatagcaatcttcatgatgcctaggaggttcctgacatgggacccatctgctcctccagccaactcctgtccctcacatcccaccatggtggctcctcccacctcctctggatttgttcactctgagatctgtttgcagagtgggtgcttagcagacagagtgaagctggctggggggcacagtggtgtgtagtgctgctgtgtatcaaaagaccaaggtattatgggacctggtttcagaatgggatgggtttcttcacctcatgttaagagaagggagtgtgtcctgaagaagcccttcttctgatgttaaaatgctgaccagaacgctcttgagcccaggcatcgttgagcattaacactctgtgacagagctgcagacccctgccttgagtctcatctcagcaatgctgccaccctcttgtctttcagagttgttagtttactccattctttgtgacacgagtcaagtggctcacaacctcctcagggcaccagaggactcactcactggttgctgtgatgatatccagtgtccctctgcccccttccatccccaaccacatttgactgtagcattgcatctgtgtcctgttgtcatttatgttaaccttcaggtattaaacttgctgcatatcttgacatatcttgagattctgcatgtcttgtaaagagaggggatgtgcatttgtgtgtgatgttggatagtcatccacgctcagtttggaccattggaggaacttagtgtcacgcacaaatggggctattcctacgcttagaatagggcttgtctgcccactttagaagagtccaggttggtgagcatttagagggaagcagggcagaactctgaacgacaatacgtctctctgagcagagacccctttgttcttgttatccacccatatggacttggaatcaatcttgccaaatatttggagagattgtgtggatttaagagacctggatttttatattttaccagtaaataaaagttttcattgatatctgtccttgaaacttga

SEQ ID NO: 1016 - DNA, 3946 bp, human
cgtttaaaagccatcagatttgagagcaataagtcttcaaaaccgggaatttacattgtttttcagctgaccgacttccaggaaaaggactcaaccgcatctacccaaataccgtggcactgcttgcgctctttgccaccggatactccccttccaatgagactttctgattgtgtctaccaactctcctattaggaaacccgtgggttgcatgcagctattctgttgtattctcattctcactctccctcccttctctcactctcactcttgctggaggcgagccactaccattctgctgagaaggaaaagcccgcaactactttaagagattaagacaatatgcgcaatcctcgcctttcctagcaatcactatttaaatctggcaagaactgacaacagtctttgcaagaatggaatccgtaaaacaaaggattttggccccaggaaaagaggggctaaagaattttgctggaaaatcactcggccagatctacagggtgctggagaagaagcaagacaccggggagacaatcgagctgacggaggatgggaagcccctagaggtgcccgagaggaaggcgccgctgtgcgactgcacgtgcttcggcctgccccgccgctacattatcgccatcatgagcggcctgggcttctgcatctccttcggtatccgctgcaacctgggcgtggccattgtggacatggtcaacaacagcaccatccaccgcgggggcaaggtcatcaaggagaaagccaaattcaactgggacccggaaaccgtggggatgatccacggttccttcttttggggctacatcatcactcagattccgggaggctacatcgcgtctcggctggcagccaacagggttttcggagctgccatacttcttacctctaccctaaatatgctaattccatcagcagccagagtgcattatggatgtgtcatctttgtcagaatactgcagggacttgttgagggtgtgacctacccagcatgtcatgggatatggagcaaatgggccccacctctagagaggagtagactggcaaccacctccttttgtggttcctatgccggagctgtgattgcaatgcctttagctggcattcttgtgcagtacactggctggtcttcagtgttttatgtctacggaagctttggaatggtctggtacatgttttggcttttggtgtcttatgaaagtcctgcaaagcatcctactattacagatgaagaacgtaggtacatagaagaaagcattggagagagtgcaaatcttttaggtgcaatggaaaaattcaagactccatggaggaagttttttacatccatgccagtctatgcaataattgttgcaaacttctgcagaagctggactttttatttattgcttattagtcagccagcatattttgaggaagtctttggatttgaaattagcaaggttggtatgctatctgctgtgccacacttagtaatgacaattattgtgcctattgggggacaaattgcagattttctaagaagcaagcagattctttcaactacgacagtgagaaagatcatgaattgtggtggttttggcatggaagccacactgctcctggtcgttggctattctcatactagaggggtagcaatctcattcttggtacttgcagtgggattcagtggatttgctatatctggtttcaatgttaaccacttggatatcgctccaagatatgccagtatcttaatgggcatttcgaatggtgttggcacattgtcaggaatggtttgtcctatcattgttggtgcaatgacaaagaataagtcacgtgaagagtggcagtatgtcttcctgatcgctgccctagtccactatggtggagttatattttatgcaatatttgcctcaggagagaaacaaccctgggcagacccggaggaaacaagtgaagaaaaatgtggatttattcatgaagatgaactcgatgaagaaacaggggacattactcaaaattatataaattatggtaccaccaagtcttatggtgccacaacacaggccaatggaggttggcctagtggttgggaaaagaaagaggaatttgtacaaggagaagtacaagactcacatagctataaggaccgagttgattattcataacaaaactaattactggatttatttttagtgtttgtgattaaattcattgtgattgcacaaaaattttaaaaacacgtgatgtaaacttgcaagcatatcaaccaggcaagtcttgctgtaaaaatgaaaacaaaacaaacccatgaggttaccatcaagtgcaatctgtaaaattgtgaagttccatcatttccattcaagtcatccattcttgcatttgtgacttaaaggttgactggtcaaaattgtagaaacaagtagttacccattggattcatatgagctaaaactcatcactatttactaaagcacaacatctcatcctacaaaagttaagaagccaaagctacttgatcatgcaaaatgcacttatatatttgttacactgtattgcaagatagcacacagaagttggctgcgtcaagtagaggcgacatttattaagtgaaaatcatggagttgggatatctctcaattaaagaaatacattgtgaactatcagctacaaagttgtactgaataactattagaattgcataatgtgagatattttgttagtcctcaaaaggaatatcttgcagtgttttctatgaaatgcttgggcacaaacacttatttctgtgaaagagaacatgtaagttgaggggtatgcttcatgttcttccatccatttacctaatagtatgaaacagttcacatttcaataaaatcaaacttttcatgtagcgtatcacataacttttttgcaaaaaatataaaaagaaataaacttcaatgtattttttattacaactttgtactggttgtaacttgcattagaaaaaaaaaagagatatataaaccacaaagaatctaataagaaatttattatggagatatagcccttaaaatgcaatattaagaacaaagaaatagaaaatggtttagatatctttcttccttcataattaaatactatatgaaacttgtgccacagagctatatgtaatatgaaaagattaacttcatagagatattgtaagtaggtaattttattatttaaagtcctattaagaaatatttgtcttaaatatataggacaatacattatattaaaatggtctctctctatatatatctgtatatcttatacatgtccatacacagaaacataataaacaatcttcacacgaaaccaaaaatagcatacacctaatgttgggttagggaattgcaatttctactttcatagagtcatagaattttaggtggggaagaggcattttgcttgtcatttcttaatataactcaacaagaattgcaacatttgtgtaccaagcaataagtgcaatgcataaaatttcctgtctgtatattaccttcattttgcttgtagtagctgtttgggtggttggaataattttatttttcttttaaaaaagctaacatcagacccctttataatgtcctaaaattatgataatacatttcccaattcaactcaaaatattattggtgtattttgtctattctggatatttgatctgtttaatgtactgtgctagtgactggaggccctgctactgcaaatataaaacctaaagtttgtttaaaaaaatgcaaatcattctttaccttaagaaaaaaaaaataccctttgctttgtgcctcaaagtgatgtaatgtgatcacagcttttgttgtgttgaatgaaaatatgtggactgtcattttgttgcagcaaaaaagtgttaataaaatgctctatttatccttttttaaaaaaaaaaaaaaaaaaaaaaaaa

SEQ ID NO: 1017 - DNA, 3830 bp, human
ccagtgcaggacgcgctgacagctcgagtgagcggactgcccaggacttcggaactagacgagttctgtagaaatcctgtcaaagaatatgaagaaaaacagagaaagattctgcaatagagagagagaatttgtatataaatttaaagtaggaagtcagtgcttagaactgagagtgccactcaaatttcctgttcaagagaatgccagtcatttgcatggacgtctgatgctgctgcacagtttaccgtgctttatagaaaaagacttaaaagaagctctgactcagtttatagaagaagaatccctcagcgattatgatagagatgctgaagcatccctggcagctgtgaaatcaggtgaagtagatttacatcagctggcgagtacatgggccaaagcttatgctgagaccacgttagagcatgcaaggcctgaagaacccagctgggatgaagattttgcagatgtgtaccatgacttaattcattctcctgcctctgaaactctcttaaatttggaacataattactttgttagtatctcagaactgattggtgaaagagatgtggagctgaaaaaattacgagagagacaaggtattgaaatggaaaaagtcatgcaggaattgggaaaatcactgacagatcaagatgtaaattcactggctgctcagcattttgaatcccagcaagacctagaaaataaatggtcgaatgaattaaaacaatcaactgccatccaaaaacaagagtatcaagaatgggtaataaaacttcaccaagacctaaaaaaccccaacaacagctcccttagtgaggaaattaaagttcagccaagtcagttcagagaatctgtagaagcaattggaaggatttatgaggaacagagaaagttagaagaaagttttaccattcacttaggagcccagttgaagaccatgcataatttgagattgctgagagcagatatgctggacttctgtaagcataaaagaaatcatcgaagtggtgtgaaacttcatcggctccaaacagctctgtcactttattctacatctctctgtggcctggttttactagtagataatcgaattaattcatatagtggtattaaaagagattttgccacagtttgccaagaatgcactgacttccatttcccccgaattgaagagcaattagaagttgtccaacaggtggtactttatgctagaacccagcgcaggagtaaattgaaagaatcacttgattctggaaaccaaaatggaggaaatgatgataagactaagaatgctgagaggaactatttaaatgttttacctggggaattttatattacacggcattctaatctctcagaaatccatgttgctttccatctctgtgtggatgaccatgtgaaatcgggaaacatcactgctcgtgatcctgccattatgggactccgaaatatactcaaagtttgctgtacccatgacatcacaacaataagcattcctctcttgctggtacatgatatgtcagaggaaatgactataccctggtgcttaaggagagcggaacttgtgttcaagtgtgtcaaaggtttcatgatggaaatggcttcatgggatggaggaatttctaggacagtgcaatttctagtaccacagagtatttctgaagaaatgttttatcaacttagtaacatgcttccccagatcttccgagtatcatcaacactcactctgacatccaagcactaaacccttatagattgacatgctggcagaagatgattgttaaactctccaggaacttgtgctatgctgggaatctgtcaagcaaaagatgcccagaaagagaacttgcagctcaatccacaaatcaagatacatgtgtgtgaaaccattccaaaaatttatatactgcacaaactggtgatcaacccctaacttaaacacttaaagtctctttatgaatttctctttttttcttctctgtgttacctgtgaatattagtaatctaaaactttttatttatcacacatggacacttgggaaaggaaacttgattatatttacatggaggcatttgactttttcaagaggcttgactcgtctcaggtgcaatccttaattaaacatacaaacaaaattttccttttactttctttgccaaaacaaaatgtaaaagcactgaaatatacattgcaagtacaaatttcctgtgaaaatctttttatagaaacacaaatgtataagacaaatgtgcttgttcttttaaattctcctgtttcagaatctctttttaatctactcctaaggatgtacaagttagagtcagaagacgttttagattttttccctctctctcatcctcccgctgtgcccttgcacttgcatattaataacatttcatggactgggaaatagtgttcttttttgcaagcttgatgtcaagttagtctaaaccagcacctggcagtattttagtgctcatcaacattgtgacaatcacacaaggaagatcatttctacatttctgtcctccctgcgttctcagcttgcttaaccattcctctacctcttgcatttttttgcggataaatgtatccccatttctgcttctctgtttcccctccttttccattgtttttccttatggtactactttctcaggtgctacatatcatatatttgtcccatctataacatatttaaatgctataagtagtaactccattaaacaaaggcatttacaaaagcacacaggtgtttagaaaagcaatagtttcatcaattccaagttatgtggatattgtaactggccacaagaatgaaatggagggcatttggtgtcataagatggcatgtcttgatgacaagaaacaaaacgcccttcattaatatgcctcagtgtaataactattatagaaactgttggcaagcagagtgctttcctataacagaatgtgtcttaattttctactcgagggaaaggtttgtccaggtaacaacactaaagacaaccctaagaacacccactccagcagtatgtccattagacactaaaactctccaaattatttgtcagggagcctggcgattctgccaagaaggcaggtgttttgcccttagagcctatacagttctcttggagaaattgtctttcaggcaccactgttaatcactgagactgattctaatgcaaagcagggaagacagaggcagaaaccaggagagtggtagatcagtgcagcccagatatcggaatggaggagcaaagtttcattcacggatgtttgttgaatgctgctgcccaactcttcctttgtcacctctaggctattccactaagttacttataaactggtggctttaactgagggctgtgtaaaggtactatttggcatgtgaagtcaggataaatttatcgaatgtccgttttccacatgcaactgtgttacagaagtagtaaaattggaagaatcatgtttatggtgttaccactgatggaaacacacaaacaccaagctaataataaatatataacttaaaaagctaattatatgcactgaaatggtgggaattttagtgatgcagtaattgaggagtctggagttttgtatttggaccaagaattatgagatgaggatctttttctgagtgttctaaagggcttcttgagggggagtggtttaaagcacttcatgaatgatgtgaagaaggtaccttgggctgagacagcattctaggtacagatggcactctgttcaaccaactgtggatggaaaatattctgaaaaaaaatacaataaaaattttaaaaatacaaaaaaaaaaaaa

SEQ ID NO: 1018 - DNA, 2235 bp, human
cggcgcgcggcggcggcaggaagtctgtgcccgagaacagcagaaataagagccagggagggaccgcggccgcggcggcggcggcgagagcgaaagaggaaactgcagaggaggaagctgcgccgcagcccgagccgcccggcatccccgccgcctctgcgcccgcgccgcgcccccggcgccccctccccagcgcgcccccggccgctcctccgcgccgcgctcgtcggccatggcccgggagaacggcgagagcagctcctcctggaaaaagcaagctgaagacatcaagaagatcttcgagttcaaagagaccctcggaaccggggccttttccgaagtggttttagctgaagagaaggcaactggcaagctctttgctgtgaagtgtatccctaagaaggcgctgaagggcaaggaaagcagcatagagaatgagatagccgtcctgagaaagattaagcatgaaaatattgttgccctggaagacatttatgaaagcccaaatcacctgtacttggtcatgcagctggtgtccggtggagagctgtttgaccggatagtggagaaggggttttatacagagaaggatgccagcactctgatccgccaagtcttggacgccgtgtactatctccacagaatgggcatcgtccacagagacctcaagcccgaaaatctcttgtactacagtcaagatgaggagtccaaaataatgatcagtgactttggattgtcaaaaatggagggcaaaggagatgtgatgtccactgcctgtggaactccaggctatgtcgctcctgaagtcctcgcccagaaaccttacagcaaagccgttgactgctggtccatcggagtgattgcctacatcttgctctgcggctaccctcctttttatgatgaaaatgactccaagctctttgagcagatcctcaaggcggaatatgagtttgactctccctactgggatgacatctccgactctgcaaaagacttcattcggaacctgatggagaaggacccgaataaaagatacacgtgtgagcaggcagctcggcacccatggatcgctggtgacacagccctcaacaaaaacatccacgagtccgtcagcgcccagatccggaaaaactttgccaagagcaaatggagacaagcatttaatgccacggccgtcgtgagacatatgagaaaactacacctcggcagcagcctggacagttcaaatgcaagtgtttcgagcagcctcagtttggccagccaaaaagactgtctggcaccttccacgctctgtagtttcatttcttcttcgtcgggggtctcaggagttggagccgagcggagacccaggcccaccactgtgacggcagtgcactctggaagcaagtgactggccctggaggtggggcccggggtcggggctggggaaggggagccccagggtcgccagtgcggcgagccactccagcgagaccccaccttgcatggtgccccttcctgcataggactggaagaccgaagtttttttatggccatattttctactgcaattctgaagtgttcatttctcacaaactgtactgactcgaggggcgctgatttcataggatctggtgctgtatatacgaatcttgcaaagctctaactgaacggaccttcttattcctctcccctaacaccatcgtttccactcttctcagtgtaggtaaccgtctatggtgtgttttttcattaatgacaaaaaaaaaaaggtttcaactggattatttaaatattggtaaatattgtgcattagggtttgtttttccttttaagaagtatgtcctttgtatctctaagttacatgacctatatcttttcctctttaatagtagttttatgttaacctttaagagatttgtttttcctcaaaggagaatttaaaggtattttttaaaattctaataagaggatcagccgggtgcaatgactcatgcctgtaatcccagcacgttgggaggccaagtcgggcggatcacaaggtcaggagatcaaggccatcctggccaacatggtgaaaccccacgtctactaaaaatacaaaaaattagccgggcgtggtggcacacacctgtagtcccggctactcgggaggctgaggcaggagaattgcttgaacccgggagacggaggttgcagtgagctgagatcgtgccactgcactccagcctgggtgacagagcaagactctgtctc

SEQ ID NO: 1019 - DNA, 3131 bp, human
gttttagggacagactgcttccgggtcgaagggcttgcttccggagagcgggaaggctaaaacgcggtagctaaactgcagccaactttggttgtgtgtggaaaaggctttagccatggacaggagtggctttggagagatatcatcccctgtaatccgggaggcagaggtgacacggactgcacggaaacagagtgctcagaaaagagttttacttcaggcatctcaagatgaaaattttggtaatactacaccaagaaaccaggttatccctcgaactcctagctcatttcgacagccttttaccccaacaagccgaagcttactaaggcagccagatatttcctgcattcttggaacaggagggaagtcgccccgacttacgcagtcttcagggttctttggaaatctctccatggttactaatctggatgacagtaactgggcagctgcattttcatcacagcgttccgggctgttcacaaacacagagccccacagtataacagaagatgtaactatcagtgctgttatgttacgtgaggatgatcctggagaagctgcatccatgagtatgttttctgatttcctgcagtcttttctgaagcactcttcgagtacagtttttgatcttgtggaagagtatgaaaacatctgtggtagtcaggtgaatatactgagtaaaatagtgagtcgagcaacacctggacttcaaaaattttcaaaaacagccagtatgctctggcttcttcaacaggagatggtcacatggaggctgctggcttctttgtatagagacagaatacagtctgcattagaagaggaaagtgtattcgcagttactgctgttaatgccagtgaaaaaacagttgtggaagcgttatttcagagggattcacttgttcgacaaagtcagctggtggtagattggttagagagtattgccaaagatgaaattggagaattttctgataatattgagttttatgcaaaatcagtatattgggaaaatactctgcataccttaaaacaacggcagctgacttcttacgttggaagtgttcgtccgcttgtcactgaattggaccctgatgctcccataagacagaaaatgccccttgatgatctggatagagaagatgaagttagattactcaaatatctctttactctaatccgtgctggaatgacagaagaggcacaacgactctgtaaacgctgtggtcaagcatggagagctgcaacacttgaaggctggaaactgtaccatgaccctaatgttaatggaggaacagaattagaacctgttgaagggaatccatatagacgcatttggaaaataagttgctggagaatggcagaagatgagctttttaatagatacgagagagcaatttatgcagctttaagtgggaatcttaagcagctgcttcctgtctgtgacacctgggaagacacagtttgggcctacttccgggtgatggtggacagtctggtagaacaggagatccagacatcagtagcaactctggatgaaactgaagaactccctagagaatatctgggagcaaactggacgttagaaaaggtttttgaggaacttcaagctactgacaaaaagagagttctggaagagaatcaagaacattatcatatagttcaaaagtttcttatcctgggagacattgatggtttgatggatgagtttagcaaatggctttccaaaagcagaaacaatctacctggacacctgcttcgctttatgactcaccttattttgtttttccgtactctgggactacagaccaaggaggaagtttctattgaagttttaaagacatacatacagcttttaataagagagaaacatacaaatcttatagcattttatacctgtcatttgcctcaagacctagctgttgcccagtatgcattatttttggaaagtgttacagaatttgaacagcgccaccattgcctggagttggctaaagaagcagatttggatgttgcaacaataacaaaaactgtagttgagaatattcgaaagaaagataatggtgaatttagtcatcatgacctggccccagccctagatactggcactactgaggaggatcgtttaaaaattgatgtaattgactggttggtatttgacccagcgcagagggcagaagcactgaaacaaggcaatgcaattatgagaaaattcttggcatcaaaaaagcacgaagctgcaaaagaagtatttgtgaaaattcctcaggattctatagcagaaatctataatcagtgcgaggaacaaggaatggaaagtccacttcctgctgaagatgataatgctatccgagaacatttgtgcatcagagcttatttggaagcccatgaaacctttaatgagtggtttaagcatatgaattcagttccacaaaaacctgctttgatacctcaaccaacttttactgagaaagtggctcatgaacacaaagaaaagaaatatgaaatggattttggtatttggaaagggcatttggatgccctaactgctgatgtgaaggagaaaatgtataacgtcttgttgtttgttgatggagggtggatggtggatgttagagaggatgccaaagaagaccatgaaagaacacatcaaatggtcttactgagaaagctttgtctgccaatgttgtgttttctgcttcatacgatattgcacagtactggtcagtatcaggaatgcctacagttagcagatatggtatcctctgagcgccacaaactgtacctggtattttctaaggaagagctaaggaagttgctgcagaagctcagagagtcctctctaatgctcctagaccagggacttgacccattagggtatgaaattcagttatagtttaatctttgtaatctcactaattttcatgataaatgaagtttttaataaaatatacttgttattagtaattttttcttttgcattaccatgtaaaatttagacatttgaattttgtacttttcagaatattatcgtgacactttcaacatgtagggatatcagcgtttctctgtgtgcttgttaataaaactatataaaaattaaaattttctgtttttacaaaaaaaaaaaaaaa

SEQ ID NO: 1020 - DNA, 1499 bp, human
ccgcccccgaagcggcgcgggacgcctggcgccgtccgcgatccgcagggctgcccgcttaggcttaggcccggcccgctggcaaagccgagccgcagcattttatttcgttcgtggtttccgcacaggctggagtttcgtgggttgggtcgtacttgggacctcggcgaagaggacccgtttatttttttttctttccaaaatggcagcctccagtcgcgcacaagtgttatctctgtaccgggcgatgctgagagagagcaagcgtttcagcgcctacaattacagaacatatgctgtcaggaggataagagatgccttcagagaaaataaaaatgtaaaggatcctgtagaaattcaaaccctagtgaataaagccaagagagaccttggagtaattcgtcgacaggtccacattggccaactgtattcaactgacaagctgatcattgagaatcgagacatgcccaggacctagcaagccggggaccagccaccagtggcggccagggaccaccttcagcatccactctctgtttgagatgggggctcccaaaaccagcttacaatagccttttgcgctgcctgtcctgtgggagctgataaaccaagtcacatttgcattctgttgcaggcttagtgaaaaaggactgctgtctttccttggttcaagtgttagaatggagagctggagttcgttcagaatagtgctgtgtgttaccacgtctcccctgcaccccattcctaccttgtagctcatgaccattgtgtatagcatttctacactttgtttcttggtccttggcaataaaaagaatgatctccctgagcctttgaccccagataaacccctcccaattaatgcattttcatttcctactgatacaaggcctggagagggctgttgggggccctcagggagggttcaactctgagacgagaactgccttggtgaaggcaagttcaagcaccacttgagactgggggcagcatggagtagggcagggctacggggatacacggtgcaccctgcaacttatacctgagcccagtacaacaaaggtgacgggtgtgtaggtacacacccagagatggagcactgcagatcagcaacctcagccccacctgggaatttgctggaaatgcaggctcaagcccctccccacacctggtgaatgagagagccccagcctgacccaagcccagggcgactcccataccctgaagcctggggcatgctgggcagcaccggtgcccaaatctggctggtggacagaagcacctggagagttggagagctttttaaaaagacatctctcagcacttccctctctgcagattctgactcagtaagtgaggggtgaggcacagtcatttttctctattctgaagctctcccactgttttcaatgtttaaccaactggggacccctgctctttaagtatattacaggtaataaagatattgtttgtatgcttttaaaaaaaaaaaaaaaaaa

SEQ ID NO: 1021 - DNA, 3483 bp, human
atggagaagtgggaggagctgaacagccatcagccaggagaggagtacgaccccagcaaagcgacctttgtgaaggtggtgccaacccccaacaatggctccacggagctcgtggccctgcaccgcaatgagggcgaagacgggcttgaggtgctgtccttcgaattccagaagatcaagtattcctacgatgccctggagaagaagcagtttctccccgtggcctttcctgtgggaaacgccttctcatactatcagagcaacagaggcttccaggaagactcagagatccgagcagctgagaagaaatttgggagcaacaaggccgagatggtggtgcctgacttctcggagcttttcaaggagagagccacagcccccttctttgtatttcaggtgttctgtgtggggctctggtgcctggatgagtactggtactacagcgtctttacgctatccatgctggtggcgttcgaggcctcgctggtgcagcagcagatgcggaacatgtcggagatccggaagatgggcaacaagccccacatgatccaggtctaccgaagccgcaagtggaggcccattgccagtgatgagatcgtaccaggggacatcgtctccatcggccgctccccacaggagaacctggtgccatgtgacgtgcttctgctgcgaggccgctgcatcgtagacgaggccatgctcacgggggagtccgtgccacagatgaaggagcccatcgaagacctcagcccagaccgggtgctggacctccaggctgattcccggctgcacgtcatcttcgggggcaccaaggtggtgcagcacatccccccacagaaagccaccacgggcctgaagccggttgacagcgggtgcgtggcctacgtcctgcggaccggattcaacacatcccagggcaagctgctgcgcaccatcctcttcggggtcaagagggtgactgcgaacaacctggagaccttcatcttcatcctcttcctcctggtgtttgccatcgctgcagctgcctatgtatggattgaaggtaccaaggaccccagccggaaccgctacaagctgtttctggagtgcaccctgatcctcacctcggtcgtgcctcctgagctgcccatcgagctgtccctggccgtcaacacctccctcatcgccctggccaagctctacatgtactgcacagagcccttccggatcccctttgctggcaaggtcgaggtgtgctgctttgacaagacggggacgttgaccagtgacagcctggtggtgcgcggtgtggccgggctgagagacgggaaggaggtgaccccagtgtccagcatccctgtagaaacacaccgggccctggcctcgtgccactcgctcatgcagctggacgacggcaccctcgtgggtgaccctctagagaaggccatgctgacggccgtggactggacgctgaccaaagatgagaaagtattcccccgaagtattaaaactcaggggctgaaaattcaccagcgctttcattttgccagtgccctgaagcgaatgtccgtgcttgcctcgtatgagaagctgggctccaccgacctctgctacatcgcggccgtgaagggggcccccgaaactctgcactccatgttctcccagtgcccgcccgactaccaccacatccacaccgagatctcccgggaaggagcccgcgtcctggcgctggggtacaaggagctgggacacctcactcaccagcaggcccgggaggtcaagcgggaggccctggagtgcagcctcaagttcgtcggcttcattgtggtctcctgcccgctcaaggctgactccaaggccgtgatccgggagatccagaatgcgtcccaccgggtggtcatgatcacgggagacaacccgctcactgcatgccacgtggcccaggagctgcacttcattgaaaaggcccacacgctgatcctgcagcctccctccgagaaaggccggcagtgcgagtggcgctccattgacggcagcatcgtgctgcccctggcccggggctccccaaaggcactggccctggagtacgcactgtgcctcacaggcgacggcttggcccacctgcaggccaccgacccccagcagctgctccgcctcatcccccatgtgcaggtgttcgcccgtgtggctcccaagcagaaggagtttgtcatcaccagcctgaaggagctgggctacgtgaccctcatgtgtggggatggcaccaacgacgtgggcgccctgaagcatgctgacgtgggtgtggcgctcttggccaatgcccctgagcgggttgtcgagcggcgacggcggccccgggacagcccaaccctgagcaacagtggcatcagagccacctccaggacagccaagcagcggtcggggctccctccctccgaggagcagccaacctcccagagggaccgcctgagccaggtgctgcgagacctcgaggacgagagtacgcccattgtgaaactgggggatgccagcatcgcagcacccttcacctccaagctctcatccatccagtgcatctgccacgtgatcaagcagggccgctgcacgctggtgaccacgctacagatgttcaagatcctggcgctcaatgccctcatcctggcctacagccagagcgtcctctacctggagggagtcaagttcagtgacttccaggccaccctacaggggctgctgctggccggctgcttcctcttcatctcccgttccaagcccctcaagaccctctcccgagaacggcccctgcccaacatcttcaacctgtacaccatcctcaccgtcatgctccagttctttgtgcacttcctgagccttgtctacctgtaccgtgaggcccaggcccggagccccgagaagcaggagcagttcgtggacttgtacaaggagtttgagccaagcctggtcaacagcaccgtctacatcatggccatggccatgcagatggccaccttcgccatcaattacaaaggcccgcccttcatggagagcctgcccgagaacaagcccctggtgtggagtctggcagtttcactcctggccatcattggcctgctcctcggctcctcgcccgacttcaacagccagtttggcctcgtggacatccctgtggagttcaagctggtcattgcccaggtcctgctcctggacttctgcctggcgctcctggccgaccgcgtcctgcagttcttcctggggaccccgaagctgaaagtgccttcctgagatggcagtgctggtacccactgcccaccctggctgccgctgggcgggaaccccaacagggccccgggagggaaccctgcccccaaccccccacagcaaggctgtacagtctcgcccttggaagactgagctgggacccccacagccatccgctggcttggccagcagaaccagccccaagccagcacctttggtaaataaagcagcatctgagattttaaa

SEQ ID NO: 1022 - DNA, 2222 bp, human
gcggccggaagccgggcgccgcggctctgcttccctcggggatctggcgacatggccagaaaggctctcaagcttgcttcgtggaccagcatggctcttgctgcctctggcatctacttctacagtaacaagtacttggaccctaatgactttggcgctgtcagggtgggcagagcagttgctacgacggctgtcatcagttacgactacctcacttccctgaagagtgtcccttatggctcagaggagtacttgcagctgagatctaaggtgcaccttcgctctgccaggcgtctctgtgagctctgctgtgccaaccggggcaccttcatcaaggtgggccagcacctgggggctctggactacctgttgccagaggagtacaccagcacgctgaaggtactgcacagccaggctccacagagcagcatgcaagagatccgccaggtcatccgagaagatctgggcaaggagatccatgatttgttccagagcttcgatgacacccctctggggacggcctccctggcccaggtccacaaggcagtgctgcatgatgggcggacggtggccgtgaaggtccagcacccaaaggtgcgggctcagagctcgaaggacattctcctgatggaggtgctcgttctggctgtgaagcagctgttcccagagtttgagtttatgtggcttgtggatgaagccaagaagaacctgcctttggagctggatttcctcaatgaagggaggaatgctgagaaggtgtcccagatgctcaggcattttgacttcttgaaggtcccccgaatccactgggacctgtccacggagcgggtcctcctgatggagtttgtggatggcgggcaggtcaatgacagagactacatggagaggaacaagatcgacgtcaatgagatctcacgccacctgggcaagatgtatagtgagatgatcttcgtcaatggcttcgtgcactgcgatccccaccccggcaatgtactggtgcggaagcaccccggcacgggaaaggcggagattgtcctgttggaccatgggctttaccagatgctcacggaagaattccgcctgaattactgccacctctggcagtctctgatctggactgacatgaagagagtgaaggagtacagccagcgactgggagccggggatctctaccccttgtttgcctgcatgctgacggcgcgatcgtgggactcggtcaacagaggcatcagccaagctcccgtcactgccactgaggacttagagattcgcaacaacgcggccaactacctcccccagatcagccatctcctcaaccacgtgccgcgccagatgctgctcatcttgaagaccaacgacctgctgcgtggcattgaggccgccctgggcacccgcgccagcgccagctcctttctcaacatgtcacgttgctgcatcagagcgctagctgagcacaagaagaagaatacctgttcattcttcagaaggacccagatctctttcagcgaggccttcaacttatggcagatcaacctccatgagctcatcctgcgtgtgaaggggttgaagctggctgaccgggtcttggccctaatatgctggctgttccctgctccactctgagtggaattgctctccctgccccattctggtgtctttccactcctcagcccctcatcttgcctccacccagctgctccatttttgccacatcgtggcccgcagccccagagtcactgtccatgtcaccatcctcctcctcctttggaatcctctccgcacactgtggcccttgtctcagggcccacaagctgaactgtggcatagctctctcttcttctccaagaagactcagcagcctacattcccattcctggtatgtgccattgggttggatgtccccactacttccgttaacccttcccattgtcaagatgtgccacgggtgccactgggggcacactgaacttgtagggagtgtgattttgttggaggtgcacatggtctctgaatttgacagagaacaccttccctttccttgccatgtcaccctccagaggaagtcacacctcagcgaggtggtttggcatctggggccaactccattacagctatgagctcactgctgtcagtgacgtttggtgttttctgtactgtgtttcaataaaaactccttcaaggttaaaaaaaaaaaaaaaaaaaaaaaaaaaaaaaaaaaaaaa

SEQ ID NO: 1023 - DNA, 5610 bp, human
acatccgggcttctgctactagtgagaggaagatggcggccgcggctgtggtggttcccgcagagtggataaagaactgggagaaatcagggagaggcgaatttttgcatttatgtcggatcctcagtgaaaataaaagccatgatagttcaacatacagagatttccagcaagctctctatgagttgtcatatcatgtaattaaaggaaatctaaagcatgaacaggcatctaatgttcttagtgacattagtgaatttcgtgaggatatgccctccattcttgctgatgtattctgcatattagacattgagacaaattgtttagaagaaaaaagcaagagagactattttacacagttggtattagcatgtttgtatttagtttcagacacagttctaaaggaacgcctggatccagaaacactggaatcattagggcttatcaaacaatcacagcaattcaatcaaaagtcagttaaaatcaagacaaaactcttttataagcagcaaaaattcaatttgttaagagaagagaatgaaggttatgccaagctgattgctgaattggggcaagatttatctggaagtattactagtgatttaatcttagaaaatatcaaatctttaataggatgctttaatctggatcccaatagagttttggatgtcattttagaagtgtttgaatgcaggccagaacacgatgacttctttatatctttgttagaatcttacatgagtatgtgtgaaccgcaaacactgtgtcatattcttgggttcaaattcaagttttaccaggaaccaaatggcgagacaccatcatctttatacagagttgcagcagtacttctacaatttaatcttattgatttagatgatctttatgtacatcttcttccggctgataattgcattatggatgaacacaaacgagaaattgcggaagctaagcaaattgttagaaagcttacgatggttgtgttgtcttctgaaaaaatggatgagcgagagaaagaaaaggaaaaagaagaggagaaagtagagaaaccacctgataaccaaaaacttggcttgttggaagccttattaaagattggtgattggcaacatgcacagaacattatggatcagatgcctccatactatgcagcttcacacaagctaatagcccttgctatttgcaagctcattcatataactattgagcctctctaccgaagagttggagttcctaaaggtgctaaaggctcacctgttaatgctttgcaaaacaagagagcaccaaaacaagctgagagctttgaagatttgaggagagacgtgttcaatatgttctgttaccttggtcctcacctttctcacgatcccattttatttgcaaaagtggtgcgcataggcaagtcatttatgaaggagtttcagtctgatggaagcaaacaagaagataaagaaaaaacggaagttatccttagctgtttgcttagcattactgaccaggtactacttccatctctttctttgatggactgcaatgcttgtatgtctgaggaactatggggaatgtttaaaacatttccatatcagcatagatatcgtctgtatggccagtggaagaatgaaacttataacagtcacccacttttagtaaaagttaaagctcaaacaatagacagagccaaatatatcatgaagcgcctaaccaaggaaaatgtgaagccttctggaagacaaattgggaagttgagccacagcaatccaaccattttgtttgattatatcttgtcacaaatacagaagtatgataacttaataacacctgtagtagattcattgaaatacctcacttcactgaattatgatgtcttggcctattgtatcattgaagctttagctaatccagaaaaggaaagaatgaaacatgatgacacaaccatctcaagctggcttcagagtctggctagtttctgtggtgcagtttttcgtaaatatccaattgatcttgctggtcttcttcagtatgttgccaatcagctaaaggcgggcaaaagttttgacctgcttatattgaaagaagtggtacaaaaaatggcaggaatagaaattacagaggaaatgacaatggagcaactagaggctatgactggtggagagcagctaaaagctgagggtggttattttggtcagatcagaaacactaaaaaatcctctcagagattaaaggatgctctattggaccatgatcttgcccttcctctctgtctgcttatggctcagcagagaaatggggtaatctttcaggaaggtggagagaaacatttgaaacttgtgggaaagctctatgaccagtgtcatgataccctggtgcagtttggtgggtttttagcatctaatctgagcacagaagattatataaagcgagtgccttcaattgatgtactctgtaatgaatttcatacaccccatgatgcagcatttttcctgtctaggccaatgtatgcccatcatatttcgtcaaagtatgatgaacttaaaaaatcagaaaagggaagtaaacagcaacataaagttcataagtacattacatcatgtgagatggtgatggcgcctgtccatgaagcagtggtctccttacatgtttccaaagtctgggatgacatcagccctcaattctatgctacattctggtcattgacaatgtatgaccttgcagttccacacaccagctatgaacgagaagtcaataaacttaaagtccagatgaaagcaattgatgacaatcaggaaatgcccccaaataaaaagaaaaaagagaaggagcgctgtactgcccttcaggacaagcttcttgaagaagaaaagaaacagatggaacatgtacagagagttctacagagattgaaactggaaaaggacaactggcttttagcaaaatctaccaaaaatgagaccatcacaaaatttctacagctgtgtatatttcctcgatgtattttttcagcaattgatgctgtttactgtgctcgttttgttgaattggtacatcaacagaaaactccaaatttttccacacttctttgctatgatcgagttttctctgacataatttacacagttgcaagctgtactgaaaatgaagccagtcgatacggaaggtttctttgctgcatgttagagactgtgaccaggtggcatagtgatagagccacatatgaaaaggaatgtggaaactatccaggattccttaccatattacgggcaactggatttgatggtggaaataaggctgatcaattagactatgaaaattttcgacatgttgtacataaatggcattacaaactaaccaaggcatcggtacattgccttgaaacaggcgaatatactcacatcaggaatatcttgattgtgctaacaaaaatacttccttggtacccaaaagttttgaatctgggtcaagctttggaaagaagagtacacaaaatctgccaagaagaaaaagagaagaggccagatctatatgcattggctatgggctactctgggcagttgaaaagtagaaagtcatacatgatacctgaaaatgagtttcatcacaaagacccccctccgaggaatgcagttgccagtgtgcaaaatgggcctggtggtgggccttcttcatcatcaataggaagtgcatctaaatcggatgaaagcagtactgaggagactgataaatcaagggagagatctcagtgtggtgtgaaagctgttaataaagcttctagtaccacacctaaagggaattcaagcaatggaaatagtggctctaacagcaacaaagctgttaaagaaaatgacaaagaaaaagggaaagagaaagaaaaagagaaaaaagaaaagactccagctactactccagaggccagggtacttggtaaagatggtaaagaaaaaccaaaggaagagcggccaaataaagatgaaaaagcaagagagaccaaggaaagaacgccgaagtctgacaaagagaaagaaaaattcaagaaggaagaaaaagctaaagatgagaaatttaagaccactgtccccaacgcagaatcaaaatcaactcaagaaagggaaagagagaaggagccatccagagaaagagatatagcaaaggaaatgaaatcaaaggaaaatgttaaaggaggagaaaaaacaccagtttctgggtccttgaaatcacctgttcccagatcagatattccagagcctgaaagggaacaaaaacgccgcaaaattgatactcacccttctccatcacattcctccacagtaaaggacagtctcatcgaactcaaggaatcttcagcaaagctctacattaatcatactcctccaccactgtccaagagtaaggagagagaaatggacaagaaagatttggacaagtcaagggaaagatccagagaaagagagaaaaaagatgaaaaggacaggaaagagcggaaaagggatcactcaaacaacgaccgtgaagtgccaccggacttaaccaagagacgtaaagaggagaatggaacaatgggggtttcaaaacataaaagtgaaagtccttgtgaatctccttatccaaatgagaaagacaaggaaaaaaataagtcaaaatcttcaggcaaagaaaaaggcagtgattcatttaaatctgagaagatggataaaatctcctccggtggcaaaaaggagtccaggcatgataaagaaaagatagaaaagaaagagaaacgggacagttcaggaggaaaggaagagaagaaacatcataagtcctcggacaagcacagataatgaagactttccatcaaggtgagatcggactggaactgttcggctgcgaccagaaatttattttcctgagtaaattgccgagaattaagaatgaagagggccatttgcatctccttaaattattcagttacctgctttattgctccatgtggaaaacttaaaattgttaagttgtgcattactgtattttaacttgttgcttagtttctacatgtttattttcagtaatggctgaaagtgttaactgttccatacttttagcacaatgtgctgcataaggttacctgtgtacagagttttactttagattaactaaatattgcctgggttcagtttttatttccattctgaaatgcttcctttttattgtttgaaactgaaaataaacaattgttgaacccttttgattttacctcattttaaaactgttttaatttattatttggcttgttcttaatattagtcactaaaagcagtgggagcattgtcttatgaaatgcttaggaatcattttatatagtacatgtacaacattaaacgtgtttaaaaaagaaaaaggtaccagcgatcacttgtcccttgccattttttcttgtaattatgttagacaaatcttggcggcggggggatcaaaacataattgttttaattctacagctgtaggagctttgtattgctgaactttcatctggaaaagtttcacagtgacatttttaaaagagaatttttttatctgccgaattctaccagtgtaaccttttttctaaataaacaatagttttctcaaatggttgta

SEQ ID NO: 1024 - DNA, 5894 bp, human
ctctgcctttcctctcgcagccacccttcctctcagaccagtacggtggccgacgggagtcagacgctggggatgaatgaaggatcaacaaacagtaataatgactgaatgtacaagtcttcagtttgtcagcccttttgcttttgaggcaatgcagaaggtggatgttgtttgcctggcatctttaagtgatccagaattaagacttcttctgccctgtttggtacggatggcactttgtgcacctgctgaccagagccaaagctgggctcaggataagaaactcatccttcgccttctttctggagtggaagctgtcaactccattgttgcattgttgtccgtggactttcatgctttagaacaagatgccagcaaagaacagcagcttaggcataaacttggaggaggcagtggagagagcatcctggtatcacagcttcagcatggactgacgttagagtttgaacacagtgattcacctcgtcgattgcgtcttgtgcttagtgaactgttggcaattatgaacaaggtgtctgagtccaacggagaattttttttcaagtcttctgaactttttgagagtccagtatatttggaggaagctgcagatgtactttgtattttacaagcagagctcccttccttgctccctatagttgatgtagctgaagctttgctacatgttagaaatggtgcctggttcttgtgtctcttggtggccaatgttcctgatagttttaatgaagtttgtaggggcctgataaaaaatggagaacgacaagatgaagaaagtcttggaggaaggcgcaggacagatgccttacgcttcttgtgtaaaatgaatccttctcaggccctcaaggtccgaggcatggtggtggaagaatgtcacttgccaggccttggtgtggctttgacattggatcatactaaaaatgaagcttgtgaggatggagtgagtgacttggtttgttttgtaagtggtttgcttcttggaacaaatgcgaaagtccggacttggtttggaacttttatccgaaatggacagcagagaaaaagagagaccagcagttctgtcctttggcagatgagaaggcagcttcttctggagttgatgggcattcttcccacagtaagaagcacccgaattgtggaagaagctgatgtggatatggagcccaatgtgtctgtgtattcggggctgaaagaagagcatgttgtgaaagccagtgcactcttacgtctgtactgtgctttgatggggatcgctggactcaaaccaactgaagaagaagctgagcaattactgcagttgatgacgagccgtcctcctgctacgccagctggggttcgctttgtttcactttccttttgtatgctactggccttttctacacttgtcagtacacctgaacaggagcagctgatggtggtgtggctaagttggatgataaaagaagaagcgtattttgagagtacttcaggcgtctctgcttcttttggggagatgttattattggtggctatgtactttcacagcaaccagcttagtgctatcattgacttggtctgttccactttggggatgaagattgtaattaagccaagctccttgagcaggatgaagacaatcttcacacaggaaatttttactgagcaggttgtcacagctcatgcagttcgggtccctgtcaccagcaacctgagtgccaacattactggatttttgcctattcattgtatttaccagcttctcaggagccgttcctttaccaagcacaaagtgtcaataaaagattggatttatagacagctgtgtgaaacctctactccacttcatcctcaattacttcctttgattgatgtgtacataaattctatacttactcctgcgtcgaaatctaatccagaagccacaaatcagccagtcacagaacaggagatactcaatattttccaaggagtcattgggggtgacaacatccgccttaatcagcgtttcagtatcacagcacagcttttggtgctctactatatactgtcttatgaagaggctcttctagcaaacacgaagactttagctgccatgcaaagaaagcccaaatcatattcttcttctttaatggatcagattcctatcaaattccttattcgacaggctcaagggctgcagcaggagttgggagggttgcattcagctttactacgtctccttgctactaactacccacatttatgtattgtggatgactggatttgtgaagaagaaatcacagggactgatgccctgctacggcgaatgctcctgactaataatgctaaaaatcattctcccaaacaactccaagaagcattttcagctgtcccagtaaatcacacacaagtgatgcagattatagaacacttgactctactctctgccagtgaacttataccatatgcggaagtgttaacatccaatatgagccagctattgaattcaggggttccacggagaattctgcaaacagtcaataaactatggatggttcttaatactgtgatgcctagaaggctatgggtaatgacggttaatgcacttcagccttcaataaagtttgtacgacaacaaaagtatactcagaatgacctgatgatagatcctctcattgtcctaaggtgtgatcagagggttcacagatgccccccactgatggatattaccctacacatgttgaatggatatcttcttgcatctaaagcctaccttagtgctcatctgaaggaaacagagcaagataggccttcccagaataatacaattggtttagttggacaaactgatgctccggaagttaccagggaagaattgaaaaatgcattactggccgctcaggatagtgcagctgtccagattctcttagagatttgcctacctactgaagaggagaaagcaaatggtgtcaatccagatagcttgttaagaaatgttcaaagtgttattaccaccagcgctccaaataagggaatggaggaaggagaagacaatttgctctgtaaccttcgagaagttcagtgccttatctgttgtctcttgcaccaaatgtacattgcagatcccaacattgctaagcttgttcactttcagggttatccatgtgaacttttgcctctgacggtcgcaggtattccatctatgcacatctgtctagatttcatacctgagcttattgcacagccagaacttgagaaacagatatttgctatccagttgctttctcacttgtgtatacaatatgcattaccaaagtcacttagtgtggctcgtttagctgtcaatgtcatgggaactttgttaacagttttaacacaggctaagcggtatgctttttttatgccaactctgccaagtttggtctctttttgtcgagcatttcctccattgtatgaggatattatgtctttgctgatccaaatagggcaagtttgtgcctctgatgttgccactcagacaagagacattgatccaattattacacgtcttcaacaaataaaggagaaaccaagtggatggtctcaaatctgtaaagattcatcttataaaaatggatccagggacactggaagcatggatcctgatgtacagctctgtcactgtattgaaagaacagtaattgaaataataaatatgagtgttagtggaatttaaaacaaaatttaaaacaacaaaaagttgtttgctgcatatacccaacatgaatctgcatattagtaacaactctaaactgaatgggaacagtaaagtattgtcttggaatcactaaaacaattcaattcaacatgagtatagtttagaactttatgagaattatgcttgcttgtttctgattggcacatctttggatctactttgctgatatgtttctattgtagcagctgagctttttttttttccactgggaacacatgtaagaaactcattattggaaagggaatttggccttgtatttagcttttgaagtgaagactgccatgcctttaatttcttataaaaatgagtctgtgggtagccctagtgtttattttaactgtgagcttgtaacagaatgtgacaaagatgcaaagatgggagaggaaaaaagggtaaagggaaaggagaattaaggaaataataggagttaaaaacacaagtagaaatctcaaagatttgcagtgcaagtaatagtaatgcaagttggaattctagttctcaagaaagagtattgagaagacttttaaaaaggcaagtagcttttgtaaatgatttctgtggaaatacagatgaggatttaaagatttcacatatttgcttcaatttttattaatatatgaagccatatgtttaaagagatacttgaataatttggaattttaagatactggtgtaaaagtgtttacagaaacatctttgttcaaagaagaacctgagagatctcatttagttttatgttttaaatttatttttataatgctttattaacttacctaatgctcagaggggggaaatatgtatcaaattaaatgaaggtagagcaataaaacccactggattaaagagctcttggtttgtcatcaggattataattcatatcttactttgagaagatctttgagtaagaaaatgcagtgtttgaacctgaggaaaagttaaagtgtagaaaatattgtcttgccgaaggattttgcagtcctctgtcagtaacttccattgattaggcagacatattcaggtaaaccctaatcattaaaaaaaaattatcaatgtagaaagtaattcccttttttctctctgagatatacctcaatcacacacttccccacccccacttgaaacagacctcttcacttgtgttttttttttttttttcctgaggtggagtcttcccctgttgcccaggctggagtgcagtgggatgatcttggctcactgcaacttctgccacctgggttcaagggattctcgtgcctcaacctcctgagtagctgggactgcaggcacgcgccacctgtatttttgtatttttagtagagacgggggtttgccatgttgcccagactggttttgaactcctggcctcaggtgatctgcccaccttggcctcccaaagtgctgggattacaggtgtgagccaccgcacctggccagaccgcttcacttgtaaaagaaattaggctaataagaaggtgtagtttttgagaaatgaaatttaactttagccttttcactagtaaatagtcacatctcattttcttcctttgtaaaatggggttactactggccctacctcatattctatgagaatgagtttgtagctgtttcaaatcatgaagtgcatagtatcacatgtgatagaatatttataactttttattagatgcttaatgttcaattaagtaattttgatgtgaaaaataaaagtaataaaagtatcttaaaaatagcataagaattttcatatttttaaacaaggcagttttgtagtcccttaagattaaatacaactgctccttttttttttaaactgaggccttgcgatattttgtgtgaatagatatgccctaggagttcagaaaaagttaaaagtatgttttctaattaaatgcagtgcacattcctggatcaatattcaaagactggtcataacctgctgtgttaaaataatcacatatgctctttttcatcagatttgttgatgatgtaaataaaatgtgtaaatatattagtaaatgttaatattcatgtattttaagttaaggttataaaatttgtcacaatgtgtttttttattcaagtgaaaacagatgtgtgcagctattttgaatattggtttataaacattcatattctttatcaaacaaaaaaaaaaaaaaaa

SEQ ID NO: 1025 - DNA, 3144 bp, human
aatctcggaaaggcgagaaagaagctgtctccatcttgtctgtatccgctgctcttgtgacgttgtggagatggggagcgtcctggggctgtgctccatggcgagctggataccatgtttgtgtggaagtgccccgtgtttgctatgccgatgctgtcctagtggaaacaactccactgtaactagattgatctatgcacttttcttgcttgttggagtatgtgtagcttgtgtaatgttgataccaggaatggaagaacaactgaataagattcctggattttgtgagaatgagaaaggtgttgtcccttgtaacattttggttggctataaagctgtatatcgtttgtgctttggtttggctatgttctatcttcttctctctttactaatgatcaaagtgaagagtagcagtgatcctagagctgcagtgcacaatggattttggttctttaaatttgctgcagcaattgcaattattattggggcattcttcattccagaaggaacttttacaactgtgtggttttatgtaggcatggcaggtgccttttgtttcatcctcatacaactagtcttacttattgattttgcacattcatggaatgaatcgtgggttgaaaaaatggaagaagggaactcgagatgttggtatgcagccttgttatcagctacagctctgaattatctgctgtctttagttgctatcgtcctgttctttgtctactacactcatccagccagttgttcagaaaacaaggcgttcatcagtgtcaacatgctcctctgcgttggtgcttctgtaatgtctatactgccaaaaatccaagaatcacaaccaagatctggtttgttacagtcttcagtaattacagtctacacaatgtatttgacatggtcagctatgaccaatgaaccagaaacaaattgcaacccaagtctactaagcataattggctacaatacaacaagcactgtcccaaaggaagggcagtcagtccagtggtggcatgctcaaggaattataggactaattctctttttgttgtgtgtattttattccagcatccgtacttcaaacaatagtcaggttaataaactgactctaacaagtgatgaatctacattaatagaagatggtggagctagaagtgatggatcactggaggatggggacgatgttcaccgagctgtagataatgaaagggatggtgtcacttacagttattccttctttcacttcatgcttttcctggcttcactttatatcatgatgacccttaccaactggtacaggtatgaaccctctcgtgagatgaaaagtcagtggacagctgtctgggtgaaaatctcttccagttggattggcatcgtgctgtatgtttggacactcgtggcaccacttgttcttacaaatcgtgattttgactgagtgagacttctagcatgaaagtcccactttgattattgcttatttgaaaacagtattcccaacttttgtaaagttgtgtatgtttttgcttcccatgtaacttctccagtgttctggcatgaattagattttactgcttgtcattttgttattttcttaccaagtgcattgatatgtgaagtagaatgaattgcagaggaaagttttatgaatatggtgatgagttagtaaaagtggccactattgggcttattctctgctctatagttgtgaaatgaagagtgaaaacaaatttgtttgactattttaaaattatattagaccttaagctgttttagcaagcattaaagcaaatgtatggctgccttttaaaatatttgatgtgttgcctggcaggatactgcaaagaacatggtttattttaaaatttataaacaagtcacttaaatgccagttgtctgaaaaatcttataaggttttacccttgatacggaatttacacaggtagggagtgtttagtggacaatagtgtaggttatggatggaggtgtcggtactaaattgaataacgagtaaataatcttacttgggtagagatggcctttgccaacaaagtgaactgttttggttgttttaaactcatgaagtatgggttcagtggaaatgtttggaactctgaaggatttagacaaggttttgaaaaggataatcatgggttagaaggaagtgtttgaaagtcactttgaaagttagttttgggccagcacggtagctcacccttgtaatcccagcactttgggaggctgaggtgggtagattacttgagcccaggaattcaagaccagcctgggcaacatggtgaaaccctgtttctataaaaaataatctgggctttgtagcatatgcctgtggtcccagctactgaggaggctgaggtgggaggattgcttgagcccaggaggcagaggttgcagtgagccaaggtcacgtcactgcactctagcctgggcaacagagtaagacaaaaaaatatatatatattgaaaatcaaaggaggcaaaattttgacagggaaggaagtaactgcaaaacactaggctttagtaggtacttatataaaatctagtccagttctctcatttaaaaaaatgaagacactgaagtacagacttaaatagctcagatagctaattaggaaatttcaagttggccaataatagcattctctctgacatttaaaaataatttctattcaaaatacatgcataattgattttacacctcattactggtggataatttatgtgatgtggattgctggtgtccagcatgacccataaacaggtcagaagaatgatggaatgttttagaataaactcctgcttatagtatactacacagttcaaaagatgtttaaaatgcttttgtatttactgccatgtaattgaaatatatagattattgtaacctttcaacctgaaaatcaagcagtatgagagtttagttatttgtatgtgtcactagtgtctaatgaagcttttaaaatctacaatttcttctttaaaaatatttattaatgtgaatggaatataacaattcagcttaattccccaaccttattctgtgtgtagacattgtattccacaattttgaatggctgtgttttacctctaaataaatgaattcagagaaagtgaaaaaaaaaaaaaaaa

SEQ ID NO: 1026 - DNA, 3996 bp, human
gcctcgtgggagtggtggttcgacggtgtcctatgcctgctttccttgcgggcggaggaactacaattcccagcgtgacccggaggcagcccgggcagaagggcggttgctgcagctttggccgaggttcgggctcgaacttggaaaatgctcctggcgcctcagggaaggtccttctcaaagaaaaggatggggctgaatcgctggaaacggttcacaaggaagccgagtcccaagcctacttttggtcctgacagtgtggaacactggataaagagagtggagaaagcctcagagtttgcagtgtcaaatgcattttttactagaaattcagatttacctagaagtccctggggccaaatcacagatttgaaaacatctgagcaaatagaggatcatgatgaaatctatgcagaagctcaggagctggtcaatgactggttagacaccaaacttaagcaagaattagcaagtgaggaagaaggtgatgctaaaaacactgtgtcaagtgtcactattatgccggaagccaatggccatttgaaatatgacaagtttgatgatttatgtggctatttggaggaagaagaggaaagtaccaccgttcaaaaatttatagaccatctgctccataaaaatgtggtagattctgcaatgatggaagatcttggaaggaaggaaaaccaagacaagaagcagcagaaggatcctcgtcttaccatggagatgagacataagcaggtaaaagaaaatcgcttaagacgtgagaaagaactggagtaccagagaatagaaaagaccctgaaaaaatcggccttcttggaggctcagtgtctggtgcaagaagagaagaaaaggaaggctctggaggccaagaaagaggaagaggagattcaaagggagatggtgaagctgcggagggagataattgagaggagacgcactgtgaaagcagcatggaaaatagagaagaaaaggcaagaagagaattctcaaaatagttcagaaaaagtcatgtttcaaagtactcacattcttccagatgaggaaaaaatggtgaaggaaagaaaaaggaaattgaaagaagtattaatccaaactttcaaagaaaatcaacagtgtcaaaaacggtatttcgctgcctggcacaagctgattcttgatcataggattaagctggggaaagctgggaccctgtctgactggaagattcagctgaaggtcctgcgggcctggagagactacacaagattccagaagttggagcgggagactcaagccttggaaaatgatcttagggaagaaaacagaaaacaacaactggccactgagtataaccggaaacaagttctccgacactgctttacagaatggcagcattggcatggcgccgagctcctgaagagagagctggctctcacaaaagaggaaactaggaagaagatggatgcactgctgcaggcagcatcactggggaaactcagtgccaatgggttatcaggcatcagtctacctgaggaggcaacagccatggtgggtccaccagtaaaaaatggacaggagactgctgtgccccctttgtgggaaaagcctcccttgggaagcagtggttgtatgctcagtcctcccctgggaagaacaacaacaggcaacttgcagggttcccttcagaatgtctctctgagtgcacctggcaataagcagcacaagaccctgggtgctgaaccctctcaacagcctggcagcaacgagacactcagaactaccagccagaaagcagaaccgctttgcttgggtcatttccacaaccgccatgtcttccagcaacagctgattgagaagcaaaagaagaaacttcaggaacagcagaaaacaattctcgagctgaagaaaaacctgcagctggcagaggctcagtgggcagcagagcatgccttagcagtcacagaagcacagagccacctgctgtcaaagcccagagaagaggaaccaagaacctgccagatgcttgtgaattcacctgttgcttcccctgggactgaaggcagaagtgactcccgaaattctctttctggactcagaaggaaaccaaagcaattgatgacaccgcatcccatactaaaagctatggaagagagagcaattcaacgagctgaatgtaggcggatcttggcagagaagaagaaaaaacaagaagaagaaaaattggcccagttaaaggcccaagaggaggaacgtcagaaaagggaggcagaagaaaaggaggcacagcttgaaagaaaacgagaagagaagagactgaagaaaatgaaagaacttgagaagcagaagagaattaagaggaaccagcagctggaagcaatagccaaagaacattatgaaagggtcttgctaaggaaaaaaggtctagagccttggaagagattgagaatgcaaagcaaacaaaacatccaggtggcagaagaacattactctttgttcctgcagaggaaatacatgctgacgtggttccagcgtagtcaggaaagtctggctagaaagatggcccaggctgatcaattttattcccaaatactgcttaagagagtcatccagagctggctacagtacgtgattgatctgcaggaagaagtaagaaaattttgtgtacattttcttcaaaagaagattttcagggcctggtttaacatggtcagggaggtgaagatcgattctcagggcaagcatgagattgcagcggagcacagtgacaggaggatcctctggatcacccttcggacatggaagaagtttgtaaaatttatgaaagaggaaagagtaaaagaagaaaggcgacagcaacttcgtaggaaggtagttgaaattcttccagacttccaggtacctggaaggtaccacgagctatatcagcaatcagatacttggtccttgagtaagacaagtctggtgaacgaatgagccagattagtgtaatatttaggacaggaagctcgactagtctgtatgtgtgttatctccacccacccacacacatacatacatacacctggtttattctctacgagctacttcttagatcaaaggaattattttgagaatttttattcccttctttgacttttcctggattgctagtcattcactatagcatttatcacagtgggatcatccaaaggaacattctagagatcgtctgttcaaatatatcctatatatttttagcatagtaaactttaaaaaggacaagtgtttgcctgactgagcctgtgaagaaaatgtgtccgtatagcacgacaggagttgctgatgtgaccttaatgaaacagaaataaacaggggtgagtgctcggaaaggaagggcgggccaaggcactcagccttctagtgcagtagcatcagtgacacgcaccccaccagacctcgtccactttcaccacccctgaaggcagaccatgtatgaaaaggttctctacacagctgctgcagaggacagcagcttatcctgatttcagagaaactgaggcaccagagatgcttctcttccgtgcaccttgataagcatgaaggacattccaaaaggtaataactctatcatgacagtccagcaattcattaaattatctgttcatgctcccacctgcaactgctgaataatacactcagtttgtcttctagtactcagctcagtttgatctagatattgagatacctatcttgaattcaaagaatgttttcatctttaagatgctataaagactgataaaatgctctcttctatgaattgtgttagagaattacctgctagaaaaataatttttcattataaaatacacatttattatataacaaattcaagtagtccataaatgcatatggtaaaatgagaaagtcctgtgcagtcctgagatgattactcttatttggtgtgctgaaaatttgagttgacaaaataaaattctgtggttttttaagtgaaaaaaaaaaaaaaaaaaaaaa

SEQ ID NO: 1027 - DNA, 3705 bp, human
aacatgcaagatggcggcccatcaccggcagaacacagcagggcggaggaaagtgcaggtttcctatgttattcgagatgaagtggagaagtacaaccgaaatggagtcaatgctctgcagctggatccagcactaaatagacttttcacagccggtcgagactctatcataagaatatggagtgtcaatcagcacaagcaagatccatatatagcatctatggaacaccatactgattgggtaaacgacattgtactctgttgtaatgggaaaacattaatatctgcttcttctgacacgacagtaaaagtatggaatgcacacaagggattttgcatgtcaacattaaggacacataaggattacgtaaaggccttagcatatgccaaggataaagaactagtagcatcagctgggttggacagacaaatattcctttgggatgtgaatactctaacagcattgactgcctcaaataacactgtcacaacttcttctttaagtggaaacaaagattccatttatagcctggccatgaatcaactgggaacaatcattgtatcagggtccactgaaaaggtgttacgggtatgggatccaagaacatgtgcaaaactaatgaagcttaaagggcacacggataatgtgaaggcattgctattaaacagagatggcacgcaatgcctgtcaggcagttctgatgggacaattcgcctttggtcccttggccagcagagatgtatagcaacataccgagtccatgatgaaggtgtttgggcgctgcaagtcaatgatgccttcacacatgtgtattctggtggaagggacaggaagatttattgtacagacctaagaaaccctgacattcgggtgctaatttgtgaagaaaaagcaccagttctcaagatggagcttgatagatcagctgatcctcctcctgcaatttgggttgcaacaactaagtctacagtaaataaatggactttgaaaggaattcataattttagagcctctggagattatgacaatgactgtacaaatcctataacacctctttgtacacaacctgaccaggttattaaagggggtgctagtattattcagtgccacattcttaatgataagagacatatattaaccaaagataccaataataatgtggcatattgggatgtattgaaggcatgtaaagttgaagatctgggcaaagtggattttgaagatgaaattaagaaaagatttaaaatggtgtatgtgccaaattggttctcagtagacttaaaaacagggatgttaactattactttggatgaaagtgattgttttgctgcctgggtttctgcaaaagatgctggtttcagcagccctgatgggtcagatccaaaattgaatttaggaggacttttactccaagcactcctggaatattggcctagaacacatgtgaatccaatggatgaagaggaaaatgaagtaaaccatgtaaatggggagcaggagaaccgagtgcagaagggaaatggatattttcaagtgcccccacatacacccgtgatctttggtgaagctggaggtcgcacactgttcaggctgctctgccgagattccgggggtgagactgagtctatgcttcttaatgaaacagtgccacaatgggtaattgacatcactgtggataaaaatatgcccaaattcaacaaaattcctttctacctccaacctcatgcatcttcaggagcaaaaaccttaaaaaaagatagactctctgctagtgacatgctccaagtccgaaaagttatggaacatgtttatgaaaaaattatcaacttggataatgagtctcaaaccactagctcttctaataatgaaaaaccaggagaacaggaaaaagaagaagatattgctgtgttggcagaggagaaaattgaacttttgtgccaagaccaggttttggatccaaatatggaccttcgaacagtgaaacacttcatatggaagagcggtggagacctcaccctccattaccgtcagaagtccacgtgaaggctgggctaatgctcctggatattcatttacgaccttcctctatggccccaagagtagtcctaggaagcccactgatccccaacgggagcaagacttctaacggctgattggtatggaccgagattatctttcaattgaagtgactaatcgagatgtaatatagaaaccagtctccatgtgtagattaagctgtccccagggaagcagagtgcaagagcagaagagccccaagcagactatgtctttcaagatgtacagaagactgacaacaggccagtgcagactttgcttcctccttttgtttcaaaggaccttatctacccattaacacttgttagagacacctcagtcgggccacaactgtctctgtttcaactttaagcccacacactctgtagcttttctaaaacagtacattccattcatgcagtagatatgaaggctttttccaagtttgtcatataaagtaatcaaattgttttcaccgtttaagacagttatttttaatgggaatttgctgttgcacaatttgagaaccagcccatttcataataaaagattaatgttgggcttgttgttaatattgcatctcagatgtgttcttgtaggaagatctgttgaaattccaggtgctggatcatagcacttggactgttgggccggagtttgtgcagcccatgcctagcgatgctgcacctcccatgatgtcctggctttgtggcaaccccagggaggtgcagcagtttcactccttcctccactgtgtccagttttatttacacaaagcgagctgagaccacaggttcttgctctggatgagcagcatgacaccatcaaaatttaagaccatgatgaaatttcagtttcattcaaatgttacctaaaatttatggtgtcagaataaagggagatcatagtgagttaatttgatattcatatcgtggaagtatacatatttgtttttccaaagttttatatgcaggtttttgttgtacctgtatccagatcttcttttcactgttctaacaatctaacactttcatagaatcatttggatcttgtatagagtgtaacttattggggataaacacttcaacttttggcagaaaatactttggattctccccaaggtcatttgtattcagagtaaatcagtggtccacccccataaaactgtaagacaagcctcctgtatgaagccagaagcacaagtgccttcagagggcagttgattccagtccagttgcctccctagcttgtgtgtggcctgcctccaccatagcagggactagggagggaggcagggaacgttttttcttttctacatcttcacaggttcggctgggggcagctgataggcctaaggccataccttactatttaagatactctgatcgcacaactgcagagacagggttccctcactgctagtcagcttcttttggaaactggacaggccattgccacctgcactttgaagaagtgagcaaagacgtggccacatttctaataagttgaaatggtctttctcccttcctcagagagcaaccagcttctttttttttaaaagtcctttctatctgttggatacaacagtgtgcttttggtgcacattttttagcaatagttgtgaattaatggcaaaaaaaaaaaaaaaa

SEQ ID NO: 1028 - DNA, 6387 bp, human
gactgcagctggcattggccgggactggaagtgcgggcttctgcagcagccgaagctggagctgctagggcagcagcggctcccctgttgtatggacattctgcacccgaaactgatagctgagtcctgaagttttatgttatgaaacagaagaactttcatcccagcacatgatttgggaattacactttgtgacatggatgaatctgcactgacccttggtacaatagatgtttcttatctgccacattcatcagaatacagtgttggtcgatgtaagcacacaagtgaggaatggggtgagtgtggctttagacccaccgtcttcagatctgcaactttaaaatggaaagaaagcctaatgagtcggaaaaggccatttgttggaagatgttgttactcctgcactccccagagctgggacaaatttttcaaccccagtatcccgtctttgggtttgcggaatgttatttatatcaatgaaactcacacaagacaccgcggatggcttgcaagacgcctttcttacgttctttttattcaagagcgagatgtgcataagggcatgtttgccaccaatgtgactgaaaatgtgctgaacagcagtagagtacaagaggcaattgcagaagtggctgctgaattaaaccctgatggttctgcccagcagcaatcaaaagccgttaacaaagtgaaaaagaaagctaaaaggattcttcaagaaatggttgccactgtctcaccggcaatgatcagactgactgggtgggtgctgctaaaactgttcaacagcttcttttggaacattcaaattcacaaaggtcaacttgagatggttaaagctgcaactgagacgaatttgccgcttctgtttctaccagttcatagatcccatattgactatctgctgctcactttcattctcttctgccataacatcaaagcaccatacattgcttcaggcaataatctcaacatcccaatcttcagtaccttgatccataagcttgggggcttcttcatacgacgaaggctcgatgaaacaccagatggacggaaagatgttctctatagagctttgctccatgggcatatagttgaattacttcgacagcagcaattcttggagatcttcctggaaggcacacgttctaggagtggaaaaacctcttgtgctcgggcaggacttttgtcagttgtggtagatactctgtctaccaatgtcatcccagacatcttgataatacctgttggaatctcctatggtcgcattatcgaaggtcactacaatggtgaacaactgggcaaacctaagaagaatgagagcctgtggagtgtagcaagaggtgttattagaatgttacgaaaaaactatggttgtgtccgagtggattttgcacagccattttccttaaaggaatatttagaaagccaaagtcagaaaccggtgtctgctctactttccctggagcaagcgttgttaccagctatacttccttcaagacccagtgatgctgctgatgagggtagagacacgtccattaatgagtccagaaatgcaacagatgaatccctacgaaggaggttgattgcaaatctggctgagcatattctattcactgctagcaagtcctgtgccattatgtccacacacattgtggcttgcctgctcctctacagacacaggcagggaattgatctctccacattggtcgaagacttctttgtgatgaaagaggaagtcctggctcgtgattttgacctggggttctcaggaaattcagaagatgtagtaatgcatgccatacagctgctgggaaattgtgtcacaatcacccacactagcaggaacgatgagttttttatcacccccagcacaactgtcccatcagtcttcgaactcaacttctacagcaatggggtacttcatgtctttatcatggaggccatcatagcttgcagcctttatgcagttctgaacaagaggggactggggggtcccactagcaccccacctaacctgatcagccaggagcagctggtgcggaaggcggccagcctgtgctaccttctctccaatgaagccaccatctcactgccttgccagacattttaccaagtctgccatgaaacagtaggaaagtttatccagtatggcattcttacagtggcagagcacgatgaccaggaagatatcagtcctagtcttgctgagcagcagtgggacaagaagcttcctgaacctttgtcttggagaagtgatgaagaagatgaagacagtgactttggggaggaacagcgagattgctacctgaaggtgagccaatccaaggagcaccagcagtttatcaccttcttacagagactccttgggcctttgctggaggcctacagctctgctgccatctttgttcacaacttcagtggtcctgttccagaacctgagtatctgcaaaagttgcacaaatacctaataaccagaacagaaagaaatgttgcagtatatgctgagagtgccacatattgtcttgtgaagaatgctgtgaaaatgtttaaggatattggggttttcaaggagaccaaacaaaagagagtgtctgttttagaactgagcagcacttttctacctcaatgcaaccgacaaaaacttctagaatatattctgagttttgtggtgctgtaggtaacgtgtggcactgctggcaaatgaaggtcatgagatgagttccttgtaggtaccagcttctggctcaagagttgaaggtgccgtcgcagggtcaggcctgccctgtcccgaggtgatctcctggaagacaagtgccttctccctccatggatctgtgatcttcccagctctgcatcaacacagcagcctgcagataacacttggggggacctcagcctctattcgcaactcataatccgtagactacaagatgaaatctcaataaattatttttgagtttattaaagattgacattttaagtacaacgtttaaggactaattactgtgatggacacagaaatgtagctgtgttctggaactgaatcttacatggtatacttagtgctgctgggtaatttgttggtatattatctggttagtggttaatgcttcctttaaaaataattgagtcatccattcactctttttcagttttatctgtcaatagtagctacatttttaatgggagcaccttttatcccaaagtgctttataaattgagtggactgatatatatcacacccaggtatcactgtgctgtcctttgctgtcagatttagaaatgtttttaagagctatatgaaaacagacaatattagtttaggtcgggaactgagatattgtaatcaaatagttaacatcaggaagttaatttggctggcaaaattctagggaaacttggccagaaaactggtgttgaaggcttttgctcatataaacaagtgccattgagtttcaaatgaccagcaaatatatttagaacccttcctgttttatgtctgtacctcgtccacccctcaggtaatacctgcctctcacaggtacagctgtttcttggaaatcctccaaccaaatagcagttttcctaacttgattagcttgagctgacagactgttagaatacagttctctggccacagctgatgagggctttctgtactgcacacagattgtgtactgcaccccagtccaggtgactggtacccactcgagttgtgccgtgcacaacctgtccagtatatgcatgtggtggccctactgactggtaatggttagaggcatttatggatttttaactttgaggaaaaaccatgacttttaacaaatttttatgggttatatgcctaaacccttatgccacatagtggtaaataattatgaaaaatggtctgttcataattggtaggtgccttttgtgagcagggagcataattattggtttattatggtaattatggtgattttttaaatatcatgtaatgttaaaacgttttctaacagtttactgttgcttatctccaagatattatggaattaagaatttttccagatgagtgttacatagattctttgaatttagtataaaagtactgagaattaagtttgtacttccataagcttggattttaaacactgatagtatctcatgagtaatgtgtgttttgggagagggagggatgctgattgatatttcacattgtatgaaataccatgtttgaaactcatagcaataatgctatgctgttgtgatccctctcaagttctgcatttaaaatatattttttctttataggaattgatgtataccatgaagtcattgtcagttgtagtagctctgatgttgaaagagatatcatgttttagcattccattttactgactagggtagaagaacacttttcttggctacatttggaggatacccagggagtcttgggtgttccttatctggggaagcaaacatttcactagtctctttttttcatcctttaaattgtaaattaaggattactcaagctcaccattattcaagattgggactcgcttcccagtcgacactctgccctgcctgtcattgctgcaaagagctgctgctttgccaacctaagcaaagaaaatacggcttctcttgcattattttcccttttggttggtttgttttctagaagtacgttcagatgctttggggaatgcaatgtatgatttgctagctctctcaccacttaactcactgtgaggataaatatgcatgctttttgtaattaactggtgctttgaaaaccttttttaagggagaaaaatctcaaccaaagttatgctcatccagacaagctgacctttgagttaatttcagcacaactcattcttcagtgcctcatgactgaaaacaaaaaacaaaaaaacgaaagcatcttcacaatgaagcttccagatagcaccgttttgctaaaagatacattctcattgttttccaacagtgatggcttccacataaggttaaacaaactaggtgcttgtaaataatttattacagtttactctatcgcatttctgtaacatgaaatgcatgcccttcttcaggggaagactgtggtcaagttaaaaaaaaaaacaatattaaacaacatgaaactgcagtctgtttttgaaaatgagaatgtcctaagtgattcagaagagaggagggaagttgtgcactctgaaaatgcatgaaaaacaaaggcaaaaactagtgggaaatgtgtagaactgttaactgagacggcttcgagtcttccttctggaatctgttaaatttcacaaagtcatgagggtaaatggagaaaatatttctgggattacaatgaatgtaagcccaaattgtggaattgccagtaacctggatggggaaaagcatttcccatggcactccatgtaatatgagtgctctgtgagatgttcatcagtgttttatagaaatggtgttgctgggaaaccaagtttgcacctggaaacttacaatgcactttagcgcagtaagggcttggcatccggtagtgaaaaactgtctaacccagcattgcccaaactattttgacaccaggacctttttctcctttgggatacttatgaacctctcactaatgtcctgtggagaacattttgggaaacactatgttagatagttctttaaggagacaaaacggtaatgaacagatagcactggggcagaatatgcatgcattttgtaacgtccagtgtggcgttgaatagatgtgtatttcctcccctgcagaaaataagcacagaaaattataatgtaggtgatcggagctctttcctttgatagagagaacagccccaatgatcctggctttttcactgaacgtatcagaatacatggatgaattggggtaaataaggttttaattcagatctagaagaaagtattgtacgtttgaatgcagatttttatccacagatagttgtagtgtttagacatgacaggacctatcgttgaggtttctaagacttactatgggctgtaaacctgttttttaaaactattttagaaacctgagacttgccgtctggcattttagtttaatacaaactaatgattgcatttgaaagagattcttgaccttatttctaaacgtctagagctctgaaatgtcttgatggaaggtattaaactatttgcctgttgtacaaagaaatgttaagactcgtgaaaagaattactataaggtactgtgaaataactgcgattttgtgagcaaaacatacttggaaatgctgattgatttttatgcttgttagtgtattgcaagaaacacagaaaatgtagttttgttttaataaaccaaaaattgaacatacaaaaaaaaaaaaaaaaaaa

SEQ ID NO: 1029 - DNA, 6470 bp, human
tcgtttaccttcgctagtcgccctgcagccccgccctgtccggaggccccgccctccatgaatcagctgatcccgcggacccactgggttgccaagctcgcgccggatgcggagcgcggtgctgccggtggagcttcaggtcttgatagactttctgtaaagaaggaatgatttggtgatggagtgttcccactgaccgatggactcaaagaagagaagctcaacagaggcagaaggatccaaggaaagaggcctggtccatatctggcaggcaggatcctttcccataacaccagagagattgccaggctggggaggaaagactgttttgcaggcagccctcggagtgaaacatggagttcttctgactgaagatggtgaggtctacagctttgggactcttccctggagaagtggaccagtggagatttgtccaagtagccccattctagaaaatgccctggttgggcaatatgttattactgtggcaacaggaagcttccatagtggagcagtgacagacaatggtgtcgcgtacatgtggggagagaattctgctggccagtgtgcagtagccaaccagcagtatgtgccggaaccaaatcctgtcagcattgctgattctgaggccagccctttgttagcagtcaggattttacagttggcgtgtggcgaggagcacactctggcattgtcaataagcagagagatttgggcatggggtaccggttgtcagttgggtctcattaccactgccttcccagtgacaaagccgcaaaaggtagaacatcttgctgggcgagtggtgcttcaagttgcctgtggtgctttccacagcttagcccttgtacaatgcctcccttcccaggatctgaagccagtcccagaacgatgcaaccagtgcagccagctcttgattactatgactgacaaagaagaccatgtgattatatcagacagtcattgttgcccattaggtgtgacactgacagaatctcaggcagaaaaccatgccagcactgctctcagcccctccactgaaacccttgacaggcaggaagaagtatttgagaacactcttgtagcaaatgatcagtctgttgctactgaactgaatgcagtaagtgctcagatcacaagcagcgatgccatgtcctctcaacaaaatgtcatgggaacaactgaaatttcctctgccagaaacataccatcataccctgacacccaagcagtcaatgaatacctacggaaactgtcagatcattcagtaagagaggactcagagcatggtgaaaagccagtgccatctcagcctcttttagaagaagcaattcctaatctccacagcccgcctaccacaagcacctcagccctaaacagcctggtggtctcttgtgcatctgctgttggtgtgagagtggctgctacttatgaagctggtgccttgtcactgaagaaagttatgaacttttatagtacaaccccttgtgaaactggagctcaggcaggcagtagtgccattggccccgaaggtttgaaagatagcagggaagaacaggttaaacaggaatcaatgcaaggaaagaaaagttcaagtcttgtggatatcagagaagaagaaacagagggaggcagtcgaagactctccctccctggattgttgtcacaagtttcccccaggctcttaagaaaggctgcacgggtgaaaacgaggacagtggttctgacccccacatacagtggagaagcagatgcgctcctgccttctctgagaacagaagtgtggacctgggggaaagggaaggaagggcagctggggcacggcgatgttctgcctaggcttcaaccgttgtgtgtaaaatgtctggatggcaaagaagtaatccatctggaggcaggtggttaccattctcttgcacttactgcgaaatcccaggtttactcatggggtagcaatacctttggtcaacttgggcattccgattttccaacaacagttcctcgtcttgcaaagataagcagtgaaaatggagtctggagcatagctgcaggcagggattattccctgtttttagtggatacagaagacttccagcctgggttatattacagtggccgacaggaccctacagaaggtgacaaccttccagagaatcacagtggttctaagactccagtacttctctcctgtagtaagcttggatatataagcagagtgacagcaggaaaagatagctatttagccttggtggataaaaacattatggggtatattgccagtctccacgagttagctactacagaaagacgattctattcaaaactaagtgatatcaaatctcagattctcaggcctcttctcagtttagaaaatttgggcactacaactacagtccagctgttgcaggaggtggctagccgattcagcaagctgtgttacctcattggtcagcatggagcctcattgagcagcttccttcatggggtaaaggaagccaggagtttggtcatcctgaagcattcaagtctcttcttggatagttatacagagtattgcacatctattacaaatttcctggttatgggaggattccagcttcttgctaagcctgccattgatttcctaaataaaaaccaagagctgttgcaagatttgtcagaagtgaatgacgaaaacactcagttgatggaaatactgaatactttgtttttcttgccaatcagacgacttcataattacgcaaaagttttgctaaagcttgctacttgttttgaagtggcatctccagaatatcagaaactgcaggattccagttcttgttatgagtgtcttgctctccatctcggcaggaaaaggaaggaagcagaatacacactgggcttctggaagaccttccccggaaaaatgacggattccttgaggaagccagagcgtcgactgctgtgtgagagtagtaaccgagccctgtctctgcagcatgctgggaggttttccgtgaattggttcattctctttaatgatgccctggtccatgcccagttctccacgcaccatgttttccctctggccacgctgtgggcagagccactgtctgaagaagctggtggtgtgaatggcttaaagataactacacctgaggagcagttcactctcatttcatctacaccccaggaaaagacaaagtggctacgagctataagccaagccgtagatcaggctttgagagggatgtctgatctccccccttatggaagtggtagcagtgttcagagacaggaaccacccatttcacgcagtgccaaatatactttctacaaggatcctcgcctaaaggatgccacctatgatggacgctggctttcagggaagcctcatggcagaggggttttgaagtggcctgatggaaagatgtattctggcatgttcaggaatggcttggaagatgggtatggagaatacagaatcccaaacaaggcaatgaacaaagaagaccattatgtgggccattggaaagaaggaaaaatgtgcggtcaaggagtctacagctatgcttctggtgaagtatttgagggctgttttcaagataatatgcgtcatggtcatggtcttctacgaagtgggaaattgacgtcctcttctcctagtatgttcattggccagtgggtaatggataagaaagcaggatatggtgtctttgatgatatcactaggggggaaaagtatatgggaatgtggcaagatgatgtgtgtcaagggaatggtgtggtggttacccagtttggattatactacgagggcaactttcaccttaataaaatgatgggaaatggggttttgctttccgaagatgatactatctatgaaggagaattttcagatgactggactcttagtggaaagggaacactgactatgccaaatggagactacattgaaggttattttagtggagaatggggatctgggataaaaatcactggaacctacttcaaacctagtctatatgagagtgataaagacagacctaaagttttcaggaagctaggaaacctggcagtgccagctgatgagaagtggaaagcggtgtttgacgaatgttggcgccaactgggctgtgagggcccaggccaaggggaagtttggaaagcatgggacaatattgctgtggccttgaccaccagtcggcgccagcacagagacagtccagaaatactgagtcgttcacagactcagacactagagagtttggaattcattccacagcatgttggtgccttctctgtggagaaatatgatgacatcaggaaatatttaataaaggcctgtgacactcctctgcaccccctgggcaggcttgtggagacactggttgcagtgtatagaatgacatacgtgggcgtaggagccaaccgcaggttattgcaggaggctgtaaaggagattaagtcctatcttaagcgaattttccagctggtgaggttcttatttcctgagctgcctgaagaaggcagcacaattcctctctctgctcctctgccaaccgaaaggaagtctttttgcactgggaagtcagattcccgatctgaatcaccagagccaggttatgtagtaacgagttctggattattgcttcctgtgctgctacctcggctctacccaccgctgtttatgctttatgctttggataatgatcgcgaggaagacatttactgggaatgtgtccttcgactaaataagcagccagatattgctctcctgggctttcttggggtgcagaggaaattttggccagcaaccttgtcaatccttggagagagtaaaaaggttttgccaaccacgaaagatgcttgttttgcctcagcagtagaatgtctgcagcagatcagcacaacatttaccccatcagacaaacttaaggtcatccagcagacttttgaggagatctctcagagtgtcctggcgtcactccacgaagacttcttgtggtccatggatgacttgtttcctgttttcttatatgtggtgctacgggccaggattaggaatttaggctctgaggtacacctcattgaggatctaatggacccctatcttcagcatggggaacagggtataatgttcaccaccttgaaggcatgttactaccagattcagcgtgagaagcttaactaggctgcataacagcttgaaaactggattatctactacagagtgttataacaccatctggagtcttcctgtagtggcaaaaaagaacagtgttgaaattggaaaggactttgtgttatttaggttgttagaatgagccttaccaataataagagccctgagcccagaaaaaaggactgtatagtttaaagggaggattgaaagggaggtaaaaaatcagattagaccagttcttggcctatgataagttccaaaaataccatttatctactatttgaaaaaagaagaggatatcccttcctacagtaaagggtatgtcagctacatgaagttgtaagaaaagcttccagtagagcttcttatattaaagaagttgatggatatttttgaatttctggtttgcctgaatccacctgcagttaccccgatccgtttgcaagaaccagatcgtacttgaaactatagtggccacactctgccttcctgagtcccttccagtcatgtgtgcatcatgtctctttgccaagggaggggagaaaggaacttttaaactgcagttttaactttttctaagctgtttcttgatgggagaggttctgtgcaaaactaccacattctgtccccaaaatgtggaatgcatccaaataggagtcttctgcctcttaacttaaaagaacataggaattttgtttttggtttctttatcatgctacagagagtgaatacactggaattcagacaccgactctgagctgctaggaacctcatttgtccatgtgcaaacgctgtattccaaggcctgtgaatggcagcctgaggaagttttgcatgcaggctgtgttttcgagcaggactaacaactgggaaataagcaaaaaactgcatcgatccccagcctggtgttgttcttccctatacttcacactgaactcaggatgggaagaaaaaggaaacaagctttggctttttccatctcaaaagtattgtggcacctcaacatttcagtgttttgctttttaaaaaatgccctattgtaagttgttggtttatactgtataagtaacactagtagctgttttgaataacataggtgctcttcctcatctcatctcctacaccgtggtgagcatacagagtgtcctgatttgtgttaagtgactgagaagatgttaattacttttgaaaaaggatcatggtttttgctctactttataatcaagacaagtgtttattaaaatactgttttggaatgttggctgtaatgtaacagcaattttcataataaaaggcattcatcttt

SEQ ID NO: 1030 - DNA, 4972 bp, human
ctggaagaaggaggcgggcggcccgggcctcaggcccctcccaggctctgagtctcccggctgcaggcggattggatggggcttcttcaggcggtggcggcagcagcgaaggtggcggcggcagcagcggcagcggctatggtgtggtcgctcgattctcccagtgcctggctgagtttcggacgtggttaagaaccaactggttgaggttcaatgcagacaagacggatgtgatgctgaaaatgtgcatcagatgtttatgtttaattggtttacagactgtctgtggactcttttcctgtcaaattacccagccatctgttgaatcttcaagtccaggaggttcagcaacatcagatgaccatgaatttgatccatcagctgacatgctggttcatgattttgatgatgaacgaacattagaagaggaagaaatgatggaaggagaaacaaacttcagctctgaaatagaagatcttgcaagggaaggcgacatgccaattcatgaacttctcagcctttatggttatggtagtactgttcgactacctgaagaagatgaggaagaggaagaagaggaagaagaaggtgaagatgatgaagatgctgataatgatgacaacagtggctgtagtggggaaaataaagaggagaatataaaggattcatcaggtcaggaggatgaaactcagtcttccaatgatgatccatcacaatctgttgcttctcaagatgcccaggaaataatccgcccacgtcgatgtaaatattttgatacaaatagtgaagtagaagaagaatctgaagaagatgaagattatattccatcagaagactggaaaaaggagattatggtgggctccatgtttcaagcagaaattccagttggcatttgtagatacaaagaaaatgaaaaagtatatgaaaatgatgatcagctcctgtgggaccctgagtacttaccagaagataaagtgattatatttcttaaagatgcatctagaagaacaggtgatgagaagggtgtagaagcaattcctgaaggatctcacataaaagacaatgaacaggctttatatgaattggttaaatgcaattttgatacagaagaagcattgagaagattaagatttaatgtaaaagcagctagagaggaattatctgtttggacagaggaagagtgtagaaattttgaacaagggctgaaggcctatggaaaggattttcatttgattcaggctaataaagtccgaacaaggtcagttggtgaatgtgtagcattctattacatgtggaaaaaatctgaacgttatgatttctttgctcagcaaacacgatttggaaagaagaaatataatcttcatcctggtgtaacggattacatggatcgtcttctagacgaaagtgaaagtgctgcatctagtcgagcaccatcccctcccccaactgcatcaaacagtagtaacagccagtctgagaaagaagatggcactgtaagcactgctaatcaaaatggagtgtcatctaatggaccaggtgaaatattaaacaaagaggaagtaaaagttgaagggttacacattaatggaccaacaggtggaaataagaaaccacttcatgcagatatggatactaatggttatgaaacagataaccttaccactgacccaaaacttgcccatatgactgcaagaaatgaaaatgattttgatgaaaaaagtgagagacctgccaaaaggcgaagggtaaacagcaatggaaaagaaagtccaggttcttctgaatttttccaagaagcagtctcacatgggaaatttgaagaacttgaaaacacagatgactaaattttagacctattttactttctttggagtaaattctggtgtgactaaaattttcagggttgatgggttaccttaaaaagttgatttccttgaagcagtttgaaaatttgaattgagtcttaactttaggaaatgaggtttcataattctgccttttgcagattttttttactttaaagctgtcagactcttttaagggtattttaaaaattagtaaatttgaatgaactaaagatatatctctaccttctcatttgaatatctttagttcattcagatttactaattttggtaaatctgaatgaactaaagatgtatctgtaccttctcatttgatgtattaatcataaaatttcactacaaggtaatttttgcttagtttgatggatgaatgggaaactcaagtccaaatttctgcttaataccaatttctctgagtttcttgaaatgtctttaaaacagacatttttctcaccaaacagtttgagtatctttattaaggaaacccttacgaatcctgaaaattatgctagcatgatttttttatatatagaagtttaaaaataaaccaggtcaggtttgtatatgtaaaattgttgacatcaatgatgtctttccatattcttatctgggcttaagaaatacattctgtatttttccagattctttgtagcctttgaaagatttttacagtacatatgtcttgactgagctgtcctttcttaatacaaaagcgtgtataattttcttaacttgtacagttggtaaacttttatgagaggaattgttattctgagtctgtcagctttcattttattttgctaaggtttttctaatgaatttttaagtgtttgtgtagtaattaagtcatatttcttatccaggtggttaaagcattcataaaggattataaaatttttttttttttttttttaaatttctacttaagggcaagtaatttgagaattctgaaattaagcatgatgcttagattgcagtttgttttgcatttgctctaattttcaaaattatttttgaagcaagacaaaagtttaatgtcagcttaagtgcttaaatatatcatgctgaccagaatcctgttatttttatatgcatcataaaatttcccatttctgcattaaataaacagaggaggggggtcaagtgatacttagatattggcacacacaaggaacaactgttggcaggcagtatcgattttatgaagagaaagtgaagtttgaaaacttttcaaacttttctagttacaatccaatttttcagatttgataatgcttttccaaagtgaaaataagatacacaataatcattgctttttgtgattacagataggattatccatctgcatagccttgtaaaagtgccattttatttttagtgctaaattcttgttaaataatgtagttttatatagctgatagaccaacctatatccaaacttttataaaatattaattattcttgtttttctcacacaggcatactccaaatgcttcttccagttcatttttcagccatcagttcaagagccaatgcctttttaaaataaagcttctgtggtcttgtttttaatggctcaactgtctgatgtaattgagtgaaggtttgcactgagaaattagcattcaggccttacccccatgaagtattactgttaacatatgttcggactgcttcccttcaccaatgtgaacaactttttttcccaaacagtattaaaagccactttgcaacacttgacttcatcttaatgtacattcactgttgttacatacatatctaagtaaatcaaagttttgggtggaagtgttgagaagtatgagttttttgttgtttttgttttacttaaaacttttaatttatccagaatggcagtagctttagcaagcagatggtcacaatctgttttctaaatcattttttattaaatgaatccaaagtatcctagctctttgtcaaagatggtctgtagaaatgtttttaaagattagggatgctgtactttttgaattgttgcagtgttggagatgccattttcacctttttaaaaagatgcattttatttgcaggtttgtgaagttcttgcaaactcttactacagaaatgttttaaatacattctcaggcatgtttgcaaaaatatggcacatgtatacattttaggaaatgttacttttgttaatctttaaaaaatacacctaatgaaagacattccactattatgcgtaatgctcagctttttgtaaagaaatatttaattgtattttgtgtttatacaggtatttcacacaataatttgttcttaatgcagccactataacttgataagtcattgcactatttaaaaagttttagtaatatcatgaatttaatttgcttaagatttagtacatttcagaacttttgaacttttgacaaattgcattgggaaaagaagtctgttaatagtgatttagtctccccgcctcattcccacccccaacaaagcactatcattttcatttggaatgggtatttttctgtttcatgatgtattttcaaatagagttcaggatctgcaattcagttcaacacaagtttgttgagctttaaaatgtatttgaagtaatatttaaataggcatttaaaatttcaaattagatgttaaatttatgcatagtaattttgcactgtaaaataattcccttctcccattccttgtctgccattctgaatatgcttattaaaatatttttttaaacatatttgcctacataatactgtgtgaatattttcattagattaattcactaagattttattagagattgtttgaatgatgcatgttattgacaaggcaaatatatatatatacacagtctgtttcttctattcctagacatattgcactactttttcagtggttcttggtcccctttaccacatcttgggtgatgtatttttgtcttcttcccctttgccacaagagatcctttcagtccctagacctccattcactctgtttctcttctgctggattatataatttaaaaataatgtgttcccgtattttgtagtggagttcatatcacattatgttttgcaaaataaaacttgttttgtcacaat

SEQ ID NO: 1031 - DNA, 2153 bp, human
gcgcctttgtcctacggcgggcaggtgggccgacgcggaggcggcagcggcgggcctgaggcgaaggagcggccgggagcccgccgcgctggtagcgatattaataaggcagcggaaagaagaaatatgaatacggctccatcaagacccagccccacacgaagggatccatatggctttggagacagtcgagattcaaggcgtgatcgatccccaattcgaggaagtccaaggagagagcccagggatggcagaaatggccgggatgcccgggacagcagagacattcgagacccccgagacttgcgggaccacagacatagtagagatttgcgggatcacagagacagcaggagtgtgcgcgacgttcgggacgtgagggatcttagagactttcgtgatctaagagactctagggattttcgagatcagcgagaccccatgtacgacagatacagagacatgagagactcccgagatcctatgtacaggagagaaggctcttatgaccgatacctacgaatggatgactattgcaggagaaaggatgactcttattttgaccgttacagagatagctttgatggacggggccctccaggcccagaaagtcagtctcgtgcaaaagagcgtttgaaacgtgaggaacggcgtagagaagagctttatcgtcaatattttgaggaaatccagagacgctttgatgccgaaaggcccgttgattgttctgtgattgtggtcaacaaacagacaaaagactatgctgagtctgtggggcggaaggtgcgagacctgggcatggtagtggacttgatcttccttaacacagaagtgtcactgtcacaagccttggaggatgttagcaggggaggttctccttttgctattgtcatcacccagcaacaccagattcaccgctcctgcacagtcaacatcatgtttggaaccccgcaagagcatcgcaacatgccccaagcagatgccatggtgctggtggccagaaattatgagcgttacaagaatgagtgccgggagaaggaacgtgaggagattgccagacaggcagccaagatggccgatgaagccatcctgcaggaaagagagagaggaggccctgaggagggagtgcgtgggggccaccctccagccatccagagcctcatcaacctgctggcagacaacaggtacctcactgctgaagagactgacaagatcatcaactacctgcgagagcggaaggagcggctgatgaggagcagcaccgactctctgcctggcccgatttcccgccaaccactcggggcgacctcgggtgcctcgctgaagacacagccaagctcccaaccgctccagagcggccaagtgctcccctctgctacacccactccatctgcaccccccacctcccagcaagagcttcaggccaaaatcctcagcctcttcaatagtggcacagtgacggccaatagcagctctgcatccccctcggttgctgccggaaacaccccaaaccagaatttttccacagcagcaaacagccagcctcaacaaagatcacaggcttctggcaatcagcctccaagcattttgggacagggaggatctgctcagaacatgggccccagacctggggctccttcccaagggctttttggccagccttccagtcgcctggcacctgctagcaacatgactagccagaggcctgtgtcttccacaggtatcaactttgacaatccaagtgtacagaaggctctggataccctgatccagagtggccctgctctctcccacctggttagccagaccacagcacagatggggcagccacaggcccccatgggatcttaccagaggcattactgaagctaaatctttcaactctccccagtcccctcatcccctggcctcctcccacttacttgttctaaatagagctgtttggaggatgttctctgcgctcccaggccggcatcgagtgtcatcaatttctaccacctgctctctcttctgcccaaggctgtgttgcttattccttacaaagtttatactgcatttggggctgtatctttttttgttttgtttttttttttttcctctttggaactcttgtgttgttaataaaatgaaatgattactttttaattaaaatg

SEQ ID NO: 1032 - DNA, 12689 bp, human
aaaattccttagttgctggctttgaccttttatgttgctgagttttacacatctattttctcaactgccatatcctagggggcttggagtacccataatacagtgagcccaccttcctggtccccagacatttcagaaggtcgggaaatttttaaacccaggcagcttcctggcagtgccatttggagcatcaaagtgggccgtgggtctggatttccaggaaagcggagacctcgaggtgcaggactgtcggggcgaggtggccgaggcaggtcaaagctgaaaagtggaatcggagctgttgtattacctggggtgtctactgcagatatttcatcaaataaggatgatgaagaaaactctatgcacaatacagttgtgttgttttctagcagtgacaagttcactttgaatcaggatatgtgtgtagtttgtggcagttttggccaaggagcagaaggaagattacttgcctgttctcagtgtggtcagtgttaccatccatactgtgtcagtattaagatcactaaagtggttcttagcaaaggttggaggtgtcttgagtgcactgtgtgtgaggcctgtgggaaggcaactgacccaggaagactcctgctgtgtgatgactgtgacataagttatcacacctactgcctagaccctccattgcagacagttcccaaaggaggctggaagtgcaaatggtgtgtttggtgcagacactgtggagcaacatctgcaggtctaagatgtgaatggcagaacaattacacacagtgcgctccttgtgcaagcttatcttcctgtccagtctgctatcgaaactatagagaagaagatcttattctgcaatgtagacaatgtgatagatggatgcatgcagtttgtcagaacttaaatactgaggaagaagtggaaaatgtagcagacattggttttgattgtagcatgtgcagaccctatatgcctgcgtctaatgtgccttcctcagactgctgtgaatcttcacttgtagcacaaattgtcacaaaagtaaaagagctagacccacccaagacttatacccaggatggtgtgtgtttgactgaatcagggatgactcagttacagagcctcacagttacagttccaagaagaaaacggtcaaaaccaaaattgaaattgaagattataaatcagaatagcgtggccgtccttcagacccctccagacatccaatcagagcattcaagggatggtgaaatggatgatagtcgagaaggagaacttatggattgtgatggaaaatcagaatctagtcctgagcgggaagctgtggatgatgaaactaagggagtggaaggaacagatggtgtcaaaaagagaaaaaggaaaccatacagaccaggtattggtggatttatggtgcggcaaagaagtcgaactgggcaagggaaaaccaaaagatctgtgatcagaaaagattcctcaggctctatttccgagcagttaccttgcagagatgatggctggagtgagcagttaccagatactttagttgatgaatctgtttctgttactgaaagcactgaaaaaataaagaagagataccgaaaaaggaaaaataagcttgaagaaactttccctgcctatttacaagaagctttctttggaaaagatcttctagatacaagtagacaaagcaagataagtttagataatctgtcagaagatggagctcagcttttatataaaacaaacatgaacacaggtttcttggatccttccttagatccactacttagttcatcctcggctccaacaaaatctggaactcacggtcctgctgatgacccattagctgatatttctgaagttttaaacacagatgatgacattcttggaataatttcagatgatctagcaaaatcagttgatcattcagatattggtcctgtcactgatgatccttcctctttgcctcagccaaatgtcaatcagagttcacgaccattaagtgaagaacagctagatgggatcctcagtcctgaactagacaaaatggtcacagatggagcaattcttggaaaattatataaaattccagagcttggcggaaaagatgttgaagacttatttacagctgtacttagtcctgcgaacactcagccaactccattgccacagcctcccccaccaacacagctgttgccaatacacaatcaggatgctttttcacggatgcctctcatgaatggccttattggatccagtcctcatctcccacataattctttgccacctggaagcggactgggaactttctctgcaattgcacaatcctcttatcctgatgccagggataaaaattcagcctttaatccaatggcaagtgatcctaacaactcttggacatcatcagctcccactgtggaaggagaaaatgacacaatgtcgaatgcccagagaagcacgcttaagtgggagaaagaggaggctctgggtgaaatggcaactgttgccccagttctctacaccaatattaatttccccaacttaaaggaagaattccctgattggactactagagtgaagcaaattgccaaattgtggagaaaagcaagctcacaagaaagagcaccatatgtgcaaaaagccagagataacagagctgctttacgcattaataaagtacagatgtcaaatgattccatgaaaaggcagcaacagcaagatagcattgatcccagctctcgtattgattcggagctttttaaagatcctttaaagcaaagagaatcagaacatgaacaggaatggaaatttagacagcaaatgcgtcagaaaagtaagcagcaagctaaaattgaagccacacagaaacttgaacaggtgaaaaatgagcagcagcagcagcaacaacagcaatttggttctcagcatcttctggtgcagtctggttcagatacaccaagtagtgggatacagagtcccttgacacctcagcctggcaatggaaatatgtctcctgcacagtcattccataaagaactgtttacaaaacagccacccagtacccctacgtctacatcttcagatgatgtgtttgtaaagccacaagctccacctcctcctccagccccatcccggattcccatccaggatagtctttctcaggctcagacttctcagccaccctcaccgcaagtgttttcacctgggtcctctaactcacgaccaccatctccaatggatccatatgcaaaaatggttggtacccctcgaccacctcctgtgggccatagtttttccagaagaaattctgctgcaccagtggaaaactgtacacctttatcatcggtatctaggccccttcaaatgaatgagacaacagcaaataggccatcccctgtcagagatttatgttcttcttccacgacaaataatgacccctatgcaaaacctccagacacacctaggcctgtgatgacagatcaatttcccaaatccttgggcctatcccggtctcctgtagtttcagaacaaactgcaaaaggccctatagcagctggaaccagtgatcactttactaaaccatctcctagggcagatgtgtttcaaagacaaaggatacctgactcatatgcacgacccttgttgacacctgcacctcttgatagtggtcctggaccttttaagactccaatgcaacctcctccatcctctcaggatccttatggatcagtgtcacaggcatcaaggcgattgtctgttgacccttatgaaaggcctgctttgacaccaagacctatagataatttttctcataatcagtcaaatgatccatatagtcagcctccccttaccccacatccagcagtgaatgaatcttttgcccatccttcaagggctttttcccagcctggaaccatatcaaggccaacatctcaggacccatactcccaacccccaggaactccacgacctgttgtagattcttattcccaatcttcaggaacagctaggtccaatacagacccttactctcaacctcctggaactccccggcctactactgttgacccatatagtcagcagccccaaaccccaagaccatctacacaaactgacttgtttgttacacctgtaacaaatcagaggcattctgatccatatgctcatcctcctggaacaccaagacctggaatttctgtcccttactctcagccaccagcaacaccaaggccaaggatttcagagggttttactaggtcctcaatgacaagaccagtcctcatgccaaatcaggatcctttcctgcaagcagcacaaaaccgaggaccagctttacctggcccgttggtaaggccacctgatacatgttcccagacacctaggccccctggacctggtctttcagacacatttagccgtgtttccccatctgctgcccgtgatccctatgatcagtctccaatgactccaagatctcagtctgactcttttggaacaagtcaaactgcccatgatgttgctgatcagccaaggcctggatcagaggggagcttctgtgcatcttcaaactctccaatgcactcccaaggccagcagttctctggtgtctcccaacttcctggacctgtgccaacttcaggagtaactgatacacagaatactgtaaatatggcccaagcagatacagagaaattgagacagcggcagaagttacgtgaaatcattctccagcagcaacagcagaagaagattgcaggtcgacaggagaaggggtcacaggactcacccgcagtgcctcatccagggcctcttcaacactggcaaccagagaatgttaaccaggctttcaccagacccccacctccctatcctgggaacattaggtctcctgttgcccctcctttaggacctagatatgctgttttcccaaaagatcagcgtggaccctatcctcctgatgttgctagtatggggatgagacctcatggatttagatttggatttccaggaggtagtcatggtaccatgccgagtcaagagcgcttccttgtgcctcctcagcaaatacagggatctggagtttctccacagctaagaagatcagtatctgtagatatgcctaggcctttaaataactcacaaatgaataatccagttggacttcctcagcatttttcaccacagagcttgccagttcagcagcacaacatactgggccaagcatatattgaactgagacatagggctcctgacggaaggcaacggctgcctttcagtgctccacctggcagcgttgtagaggcatcttctaatctgagacatggaaacttcattccccggccagactttccgggccctagacacacagaccccatgcgacgacctccccagggtctacctaatcagctacctgtgcacccagatttggaacaagtgccaccatctcaacaagagcaaggtcattctgtccattcatcttctatggtcatgaggactctgaaccatccactaggtggtgaattttcagaagctcctttgtcaacatctgtaccgtctgaaacaacgtctgataatttacagataaccacccagccttctgatggtctagaggaaaaacttgattctgatgacccttctgtgaaggaactggatgttaaagaccttgagggggttgaagtcaaagacttagatgatgaagatcttgaaaacttaaatttagatacagaggatggcaaggtagttgaattggatactttagataatttggaaactaatgatcccaacctggatgacctcttaaggtcaggagagtttgatatcattgcatatacagatccagaacttgacatgggagataagaaaagcatgtttaatgaggaactagaccttccaattgatgataagttagataatcagtgtgtatctgttgaaccaaaaaaaaaggaacaagaaaacaaaactctggttctctctgataaacattcaccacagaaaaaatccactgttaccaatgaggtaaaaacggaagtactgtctccaaattctaaggtggaatccaaatgtgaaactgaaaaaaatgatgagaataaagataatgttgacactccttgctcacaggcttctgctcactcagacctaaatgatggagaaaagacttctttgcatccttgtgatccagatctatttgagaaaagaaccaatcgagaaactgctggccccagtgcaaatgtcattcaggcatccactcaactacctgctcaagatgtaataaactcttgtggcataactggatcaactccagttctctcaagtttacttgctaatgagaaatctgataattcagacattaggccatcggggtctccaccaccaccaactctgccggcctccccatccaatcatgtgtcaagtttgcctcctttcatagcaccgcctggccgtgttttggataatgccatgaattctaatgtgacagtagtctctagggtaaaccatgttttttctcagggtgtgcaggtaaacccagggctcattccaggtcaatcaacagttaaccacagtctggggacaggaaaacctgcaactcaaactgggcctcaaacaagtcagtctggtaccagtagcatgtctggaccccaacagctaatgattcctcaaacattagcacagcagaatagagagaggccccttcttctagaagaacagcctctacttctacaggatcttttggatcaagaaaggcaagaacagcagcagcaaagacagatgcaagccatgattcgtcagcgatcagaaccgttcttccctaatattgattttgatgcaattacagatcctataatgaaagccaaaatggtggcccttaaaggtataaataaagtgatggcacaaaacaatctgggcatgccaccaatggtgatgagcaggttcccttttatgggccaggtggtaactggaacacagaacagtgaaggacagaaccttggaccacaggccattcctcaggatggcagtataacacatcagatttctaggcctaatcctccaaattttggtccaggctttgtcaatgattcacagcgtaagcagtatgaagagtggctccaggagacccaacagctgcttcaaatgcagcagaagtatcttgaagaacaaattggtgctcacagaaaatctaagaaggccctttcagctaaacaacgtactgccaagaaagctgggcgtgaatttccagaggaagatgcagaacaactcaagcatgttactgaacagcaaagcatggttcagaaacagctagaacagattcgtaaacaacagaaagaacatgctgaattgattgaagattatcggatcaaacagcagcagcaatgtgcaatggccccacctaccatgatgcccagtgtccagccccagccacccctaattccaggtgccactccacccaccatgagccaacccacctttcccatggtgccacagcagcttcagcaccagcagcacacaacagttatttctggccatactagccctgttagaatgcccagtttacctggatggcaacccaacagtgctcctgcccacctgcccctcaatcctcctagaattcagcccccaattgcccagttaccaataaaaacttgtacaccagccccagggacagtctcaaatgcaaatccacagagtggaccaccacctcgggtagaatttgatgacaacaatccctttagtgaaagttttcaagaacgggaacgtaaggaacgtttacgagaacagcaagagagacaacggatccaactcatgcaggaggtagatagacaaagagctttgcagcagaggatggaaatggagcagcatggtatggtgggctctgagataagtagtagtaggacatctgtgtcccagattcccttctacagttccgacttaccttgtgattttatgcaacctctaggaccccttcagcagtctccacaacaccaacagcaaatggggcaggttttacagcagcagaatatacaacaaggatcaattaattcaccctccacccaaactttcatgcagactaatgagcgaaggcaggtaggccctccttcatttgttcctgattcaccatcaatccctgttggaagcccaaatttttcttctgtgaagcagggacatggaaatctttctgggaccagcttccagcagtccccagtgaggccttcttttacacctgctttaccagcagcacctccagtagctaatagcagtctcccatgtggccaagattctactataacccatggacacagttatccgggatcaacccaatcgctcattcagttgtattctgatataatcccagaggaaaaagggaaaaagaaaagaacaagaaagaagaaaagagatgatgatgcagaatccaccaaggctccatcaactccccattcagatataactgccccaccgactccaggcatctcagaaactacctctactcctgcagtgagcacacccagtgagcttcctcaacaagccgaccaagagtcggtggaaccagtcggcccatccactcccaatatggcagcaggccagctatgtacagaattagagaacaaactgcccaatagtgatttctcacaagcaactccaaatcaacagacgtatgcaaattcagaagtagacaagctctccatggaaacccctgccaaaacagaagagataaaactggaaaaggctgagacagagtcctgcccaggccaagaggagcctaaattggaggaacagaatggtagtaaggtagaaggaaacgctgtagcctgtcctgtctcctcagcacagagtcctccccattctgctggggcccctgctgccaaaggagactcagggaatgaacttctgaaacacttgttgaaaaataaaaagtcatcttctcttttgaatcaaaaacctgagggcagtatttgttcagaagatgactgtacaaaggataataaactagttgagaagcagaacccagctgaaggactgcaaactttgggggctcaaatgcaaggtggttttggatgtggcaaccagttgccaaaaacagatggaggaagtgaaaccaagaaacagcgaagcaaacggactcagaggacgggtgagaaagcagcacctcgctcaaagaaaaggaaaaaggacgaagaggagaaacaagctatgtactctagcactgacacgtttacccacttgaaacaggtgaggcagctctctctgctccctctaatggaaccaatcattggagtgaactttgcgcactttcttccttatggcagtggccaatttaatagtgggaatcgacttctaggaacttttggcagtgctaccctggaaggggtttcggactactattctcagttgatctacaagcagaataatttaagtaatcctccaacaccccctgcctctcttcctcctacaccacctcctatggcttgtcagaagatggccaatggttttgcaacaactgaagaacttgctggaaaagccggagtgttagtgagccatgaagttaccaaaactctaggacctaaaccatttcagctgcccttcagaccccaggacgacttgttggcccgagctcttgctcagggccccaagacagttgatgtgccagcctccctcccaacaccacctcataacaatcaggaagaattaaggatacaggatcactgtggtgatcgagatactcctgacagttttgttccctcatcctctcctgagagtgtggttggggtagaagtgagcaggtatccagatctgtcattggtcaaggaggagcctccagaaccggtgccgtcccccatcattccaattcttcctagcactgctgggaaaagttcagaatcaagaaggaatgacatcaaaactgagccaggcactttatattttgcgtcaccttttggtccttccccaaatggtcccagatcaggtcttatatctgtagcaattactctgcatcctacagctgctgagaacattagcagtgttgtggctgcattttccgaccttcttcacgtccgaatccctaacagctatgaggttagcagtgctccagatgtcccatccatgggtttggtcagtagccacagaatcaacccgggtttggagtatcgacagcatttacttctccgtgggcctccgccaggatctgcaaaccctcccagattagtgagctcttaccggctgaagcagcctaatgtaccatttcctccaacaagcaatggtctttctggatataaggattctagtcatggtattgcagaaagcgcagcactcagaccacagtggtgttgtcattgtaaagtggttattcttggaagtggtgtgcggaaatctttcaaagatctgacccttttgaacaaggattcccgagaaagcaccaagagggtagagaaggacattgtcttctgtagtaataactgctttattctttattcatcaactgcacaagcgaaaaactcagaaaacaaggaatccattccttcattgccacaatcacctatgagagaaacgccttccaaagcatttcatcagtacagcaacaacatctccactttggatgtgcactgtctcccccagctcccagagaaagcttctccccctgcctcaccacccatcgccttccctcctgcttttgaagcagcccaagtcgaggccaagccagatgagctgaaggtgacagtcaagctgaagcctcggctaagagctgtccatggtgggtttgaagattgcaggccgctcaataaaaaatggagaggaatgaaatggaagaagtggagcattcatattgtaatccctaaggggacatttaaaccaccttgtgaggatgaaatagatgaatttctaaagaaattgggcacttcccttaaacctgatcctgtgcccaaagactatcggaaatgttgcttttgtcatgaagaaggtgatggattgacagatggaccagcaaggctactcaaccttgacttggatctgtgggtccacttgaactgcgctctgtggtccacggaggtctatgagactcaggctggtgccttaataaatgtggagctagctctgaggagaggcctacaaatgaaatgtgtcttctgtcacaagacgggtgccactagtggatgccacagatttcgatgcaccaacatttatcacttcacttgcgccattaaagcacaatgcatgttttttaaggacaaaactatgctttgccccatgcacaaaccaaagggaattcatgagcaagaattaagttactttgcagtcttcaggagggtctatgttcagcgtgatgaggtgcgacagattgctagcatcgtgcaacgaggagaacgggaccatacctttcgcgtgggtagcctcatcttccacacaattggtcagctgcttccacagcagatgcaagcattccattctcctaaagcactcttccctgtgggctatgaagccagccggctgtactggagcactcgctatgccaataggcgctgccgctacctgtgctccattgaggagaaggatgggcgcccagtgtttgtcatcaggattgtggaacaaggccatgaagacctggttctaagtgacatctcacctaaaggtgtctgggataagattttggagcctgtggcatgtgtgagaaaaaagtctgaaatgctccagcttttcccagcgtatttaaaaggagaggatctgtttggcctgaccgtctctgcagtggcacgcatagcggaatcacttcctggggttgaggcatgtgaaaattataccttccgatacggccgaaatcctctcatggaacttcctcttgccgttaaccccacaggttgtgcccgttctgaacctaaaatgagtgcccatgtcaagaggcctcacaccttaaacagcaccagcacctcaaagtcatttcagagcacagtcactggagaactgaacgcaccttatagtaaacagtttgttcactccaagtcatcgcagtaccggaagatgaaaactgaatggaaatccaatgtgtatctggcacggtctcggattcaggggctgggcctgtatgctgctcgagacattgagaaacacaccatggtcattgagtacatcgggactatcattcgaaacgaagtagccaacaggaaagagaagctttatgagtctcagaaccgtggtgtgtacatgttccgcatggataacgaccatgtgattgacgcgacgctcacaggagggcccgcaaggtatatcaaccattcgtgtgcacctaattgtgtggctgaagtggtgacttttgagagaggacacaaaattatcatcagctccagtcggagaatccagaaaggagaagagctctgctatgactataagtttgactttgaagatgaccagcacaagattccgtgtcactgtggagctgtgaactgccggaagtggatgaactgaaatgcattccttgctagctcagcgggcggcttgtccctaggaagaggcgattcaacacaccattggaattttgcagacagaaagagatttttgttttctgttttatgactttttgaaaaagcttctgggagttctgatttcctcagtcctttaggttaaagcagcgccaggaggaagctgacagaagcagcgttcctgaagtggccgaggttaaacggaatcacagaatggtccagcacttttgcttt

SEQ ID NO: 1033 - DNA, 3097 bp, human
agactatctttctagacaaggcagttgaggaggagggagcgcttgagggggactggcctggcgtgcactccgcacctcggggacattattgcgcgtggaacggctgcttttggaaggcacaacttcctgaatggaccatgactcccaccaaagatccctgtctctgattcaccaaacagcttcaaccctgaaaccaggacgagaagttgacaacatctgagtggacagctaattgacctaagacttcagaccagactattgcccagaagaaaagatgtttggttttcacaagccaaagatgtaccgaagtatagagggctgctgtatttgcagagctaagtcctccagttctcgattcactgacagtaaacgctatgaaaaggacttccagagctgttttggattgcatgagactcgttcaggagacatctgcaatgcctgtgtcctgcttgtgaaaagatggaagaagttgccagcaggatcaaaaaaaaactggaatcatgtggtagatgcaagggctggacccagtctaaagactacattgaaaccaaagaaagtgaaaactctatctgggaacaggataaaaagcaaccagatcagtaaactgcagaaggaatttaaacgtcataattctgatgctcacagtaccacctcaagtgcctccccagctcaatctccttgttacagtaaccagtcagatgacggctcagatacagagatggcttctggttctaacagaacaccagttttttcctttttagatctcacttactggaaaagacagaagatatgttgtgggatcatctataaaggccgttttggggaagtcctcattgacacacatctcttcaagccttgctgcagcaataagaaagcagctgctgagaagccagaggagcaggggccagagcctctgcccatctccactcaggagtggtgactgaggtttttatgtagaaggggaacaaaaaaaaaaatctgaattttgaaaaaccacaaagctacaaactgaccctctttttttttttttttttttgagacggagttttgctcttgttacccaggctggagtgcagtggcgtgatcttggctcactgcaacttccgtctcccgggttcaagtgattctcctgcctcagcctcccaagtagctgggtttataggtgcccgccaccagacccggctaattttttagttttagtagagacggggtttcaccacgttggccaggctggtcttaaatgaccctcttatttttaacttggatacctgctattctgccaaaagacaatttctagagtagttttgaatgggttgatttcccccactcccacaaactctgaagccagtgtctagcttactaaaaaaagagttgtatataatatttaagatgctgagtatttcataggaaagctgaatgctgctgtaaagtgctctttaagtctttttttttttaatccccttctaatgaatgaaactaggggaatttcaggggacagagatgggatttgttgtatgataaactgtatgtagtttttagtctttctgttttgagaagcagtggttggggcatttttaagatggctggctactcttgttttccctcatgataataaatttgtcataactcagtaacatgaacttgcccctagaggtagttgttaataattttgaaatattaaggtcttgccaagcttctgatgattcacacctgtactactgattattaagcaggacagactgagctttctgttgcaaataccttggaggagaaagtaatttctaaatatacagagaggtaacttgactatatatgttgcatcctgtgcctcccttcatattaatatttgataaagattttaatttatgtaaaacttctaaagcagaatcaaagctcctcttggggaaatggcaagtctttaggataggcaagaccctgtatgaatagtaccaaagcattaccgcatggtagagaacacactcgattaaaaatgttaagctatctgaaaaataaaatgtgcaagtcttcaggatggcacaaaacaaaggttaatgcttcttggggcacatttcttagagggcttgctgagtgtgtaaatataatcgacttttgtttgtgttacatgacttctgtgacttcattgaaaatctgcacaattcagtttcagctctggattacttcagttgacctttgtgaaggtttttatctgtgtagaatgggtgtttgacttgttttagcctattaaatttttattttctttcactctgtattaaaagtaaaacttactaaaagaaaagaggtttgtgttcacattaaatggttttggtttggcttcttttagtcaggctttctgaacattgagatatcctgaacttagagctcttcaatcctaagattttcatgaaaagcctctcacttgaacccaaaccagagtactcttactgcctcttttctaaatgttcaggaaaagcattgccagttcagtcttttcaaaatgagggagaaacatttgcctgccttgtaataacaagactcagtgcttattttttaaactgcattttaaaaattggatagtataataacaataaggagtaagccaccttttataggcaccctgtagttttatagttcttaatctaaacattttatatttccttcttttggaaaaaacctacatgctacaagccaccatatgcacagactatacagtgagttgagttggctctcccacagtctttgaggtgaattacaaaagtccagccattatcatcctcctgagttatttgaaatgattttttttgtacattttggctgcagtattggtggtagaatatactataatatggatcatctctacttctgtatttatttatttattactagacctcaaccacagtcttctttttccccttccacctctctttgcctgtaggatgtactgtatgtagtcatgcactttgtattaatatattagaaatctacagatctgttttgtactttttatactgttggatacttataatcaaaacttttactagggtattgaataaatctagtcttactagaaaaaaaaaaaaaagaaaaaaaaaaaaaaaaa

SEQ ID NO: 1034 - DNA, 2039 bp, human
cctttgtcattctagctgcctgctgcctccgcagcgtccccccagctctccctgtgctaactgcctgcaccttggacagagcgggtgcgcaaatcagaaggattagttgggacctgccttggcgaccccatggcatcccccagaaccgtaactattgtggccctctcagtggccctgggactcttctttgttttcatggggactatcaagctgacccccaggctcagcaaggatgcctacagtgagatgaaacgtgcttacaagagctatgttcgagccctccctctgctgaagaaaatggggatcaattccattctcctccgaaaaagcattggtgcccttgaagtggcctgtggcatcgtcatgacccttgtgcctgggcgtcccaaagatgtggccaacttcttcctactgttgctggtgttggctgtgctcttcttccaccagctggtcggtgatcctctcaaacgctacgcccatgctctggtgtttggaatcctgctcacttgccgcctgctgattgctcgcaagcccgaagaccggtcttctgagaagaagcctttgccagggaatgctgaggagcaaccctccttatatgagaaggcccctcagggcaaagtgaaggtgtcatagaaaagtggaagtgcaaagagtggaccttccaggcagttgcgtccatgacaccaggaagatgtcagtgtgtgtttttcatttgatttatttatcttggggaaagtgaaaaatgtaatctgcaagttaatgaccctattggcttgtgtacatctatatgctaaaatgacttccccacattgacatttgtgcgccacctttaatcactctggggcaactctcacatcttgctgcatgtacatgtatacggctactattgaagtgtaattgtgagatggactccaacaagcatgtgactgtgagattgtgtgtgggaaaatgtatttaactactctgtgtgtgtgtgtgtgtgtgtgtgcgcacgcgcgcacgcgcacacactcacgcacacacaagcagagaaggcgctgatcttgaactaatcctgcacaggcatccttccctttatagattgattccagcaaaggcggaataaaacaaatttcctatgaagagaatcctgatatgaaacaagtcatgtagtctcatggccgggaatctctccacagatactaacaacttaaacttactactttaggagaaaaaaaaaaacattcaatttcggacactgagttatatatgaaattaattaggctctagtccaacagttgtttacattttaaatagtccatattgaatttaattaaaacaagggatgcatgcagtcaaattgatagtttaattcttcaagtgataatataggaagtttcaccttgcctttgtccaagccccacctattaaaaccctttactcacagtttgaaactgaagcagtaaacttgtttccagacatctttttcagattgtcttaagcccaaagttgcctcacttccactattctcagcagccaaccaggatttggcagctgctccactgttacggttgagggaacagggatcagccctgttagaagtctgtgagcctcaaactctacctgttctctgcaatcatccaaaatttgaaaaagaagctatatccagtgtttcactgccaaacagattcactactcttactgattcttcactgagctttgctagtataagcagagttccaagtctcccctagggttgtctctacatttctttatcattccagtgggtagggtttagctgggggaaggacatttcataagggttagttggactgagcagtatggacatttgcttttttcattacgtactgttgtttttccttgttaggtgtgctttggtggttttaatattattgtgccagggatggggaaatggggggggttgtgtgggaagagtacttattattgtgttttcttcagtgtaattgttcttggtaattgatacctctctgttttatttctctcattctttcaaaataaaactttttgaaatttggagg

SEQ ID NO: 1035 - DNA, 4215 bp, human
ggagcctagcggctctccccgcgtccaagatggcggcagaagcagctggtgggaaatacagaagcacagtcagcaaaagcaaagacccctcggggctgctcatctctgtgatcaggactctgtctactagtgacgatgtcgaagacagggaaaatgaaaagggtcgccttgaagaagcctacgagaaatgtgaccgtgacctggatgaattgattgtacagcactacacagaattgacgacagccattcgcacataccagagcatcacagagcgcatcactaactcccgaaataaaataaagcaggtaaaagagaacctgctttcatgcaagatgctgctgcactgcaaacgggatgagcttcggaaactgtggattgaaggaattgagcataagcatgtcctgaacttgttggatgaaattgagaatatcaagcaagtgcctcaaaagctggaacagtgcatggccagcaagcactatctcagtgccactgacatgttggtgtcagcagttgagtctttggagggccccctgctccaggtggaaggactgagtgaccttcgactagagcttcacagcaagaagatgaaccttcacttggttctcatagatgaactacaccggcacctgtacatcaaatcgactagccgagttgtgcagcgtaacaaggaaaaagggaaaatcagctccctcgtgaaagatgcttctgttcctctgattgatgttacaaacctccctactcctcgaaaattccttgatacctctcactattctactgctggaagctcaagtgtgagggagataaatctgcaggacatcaaggaagatttagaattggatccagaggaaaacagcaccctgtttatgggtatcctcattaagggcttggcgaaactgaagaagatcccagaaacagttaaggcaatcatagagcgcttggagcaggagttgaagcaaattgtgaagaggtctacaacccaggtggcagacagtggctatcagcggggggagaacgttactgtggagaaccaaccaaggttgcttctagaactgctggagttactgtttgacaagtttaatgctgtagccgctgcacactctgtggtcctgggatacctgcaggacactgtagtgactccactgactcagcaggaagatatcaaactgtatgatatggcagatgtatgggtgaagatccaagatgttctacagatgctattaactgagtacttggatatgaaaaatactcgtacggcctctgaaccatcagctcaactaagctatgccagcactggacgagagtttgcagccttttttgccaagaagaaacctcaaaggccaaaaaattctcttttcaagttcgaatcgtcctcccatgccatcagtatgagcgcctatctgcgagaacagagaagggagctctatagtcggagtggagaactgcaagggggtcctgatgacaacttaattgaaggtggaggaacaaaatttgtctgcaaacctggagccagaaacattaccgtcatattccacccattactaagatttattcaggagattgagcatgctctgggtcttggcccagccaaacagtgtcctcttcgagagtttctcaccgtgtacatcaaaaacatctttctcaatcaagtcttggctgagatcaacaaggagattgaaggagtcactaaaacatctgaccctttgaagattctggccaacgcagacaccatgaaggtgctgggagtgcagcggcctctcctacagagcacaatcattgtggagaagacagttcaagacctcctgaacctgatgcatgacttgagtgcatattcagatcaattcctcaacatggtgtgcgtgaagctccaggagtacaaggacacctgcactgcagcttacaggggtattgtccagtcagaagaaaaacttgtcatcagtgcatcctgggcaaaagatgatgatatcagcagactcttgaaatctctaccaaactggatgaatatggctcaacccaaacagctgaggccaaaaagagaggaggaagaagatttcataagggcagcttttggcaaggagtctgaagttcttattgggaacctgggtgataaattaatccctccacaagacatccttcgtgacgtcagtgacctcaaagccttggccaacatgcatgaaagcctggaatggttggcaagtcgaacaaagtcagctttctccaatctttctacatcccagatgctttctcctgctcaagacagccacacgaacacggatctccccccagtgtcagagcagatcatgcagactctcagtgaacttgccaaatcgttccaggatatggctgaccgctgcttgcttgtcttacatctggaagtgagggttcactgtttccactatcttatccctcttgcaaaggaggggaactatgccattgtggctaatgtggaaagtatggattatgaccccctggtggtcaagctcaacaaagatatcagcgccattgaagaggccatgagcgccagccttcagcagcacaagttccagtatatcttcgaaggcctgggccacctgatctcctgcatcctcattaatggtgcccagtacttcaggcgcatcagtgagtctggcatcaagaaaatgtgtaggaacatttttgttcttcagcagaatttgaccaacatcaccatgtcgcgggaggcagacctggactttgcaaggcagtactacgagatgctttacaacacagctgacgagctcctgaacctggtggtggaccagggtgtgaagtacacggagctggagtacatccacgctctgaccctgctgcaccgcagccacactggggtgggggaactgaccacccagaacacgaggctgcagaggctcaaagagatcatctgcgagcaggctgccatcaagcaagccaccaaggacaagaagataactaccgtttagcagggcgtactgcggttggtgacgggggtcccctcagtcacactcacttttttccttggtatgttattgagtatattctgagcttagttttctctacagtgatactttagtggagaggaggtgtaaggattctttctctctggttttggcttttcatataaatgctaaaggaaggcgacagtacagagtgttttggttgaacaactactttaatgcagtcaaatctaacgggactagggtgggatagggaggaaggtggtatcaaattgttggactctgaaaaacaagtggatggattactaatatttgatttattactcaatatatatataattccagccttggaaagtaggaaagtaggctgctacctaacttttagtcccttccaaaaccatttagtagggttctattacataaacagtagggtttttcctctcctgaccttatccgtttacagttcaatgaaataagtgtatgtgcattgctgtctgtctctattgccaaaatcaaataaatggcttctcagctgctgtttacaacaaacttccctaaccaaaacagaacctctaatttagggctaggaatagaagtcttttgatcccagtccctgggacagttttgtatgctgtatcttgtacacaggttgtaggttggtttattgccattttgttttatttctgctgtataaaaaccaagagccagacaattagacaactatggaggaatgaaaggcaattcaaacatctgcttgattcccgccccgccacccctaatttctgagagaataatggttagagaacattgcatctcacttgaaacatcctttgggggtaaatgattcttaggtgctcacttggtctgagctcagctgaatgcagggaagatgggacagagtgacatttctcctctgtgcggcctccagctgagcctgtctctgaattgttccctcccccgcaatgtgggcacttaccatgttcctggcacactggacctcaccatgtcccccggtcaccagtcctcttgctgcccatggttcataggtcatagaaggcagcaatgcactgactgggccacatcttgaaaactcgtggaaagggaaaggggaggagatgggactttgaccacacacagtgatgcctcacaccctgaaggtgggggattttgtacctgtttgtacaactttggtcttgatgggaaaaatggagaattaaaaagtgttttgagaagcttaaaaaaaaaaaaaaaaaaaaaaaaaaaaaaa

SEQ ID NO: 1036 - DNA, 2103 bp, human
ctgggctttgggagggagaaagagggacctagcgcgggccagcggcgcacggtgggcagctgcaatggcgctgtcgtgtacccttaacaggtatctgctcctcatggcgcaggagcatctggagttccgcctgccggaaataaagtctttgcttttgctttttggaggtcagtttgccagcagtcaagaaacttatggaaagtcaccattttggattcttagcattccctctgaagatattgcaagaaatttgatgaaacggacagtgtgtgccaagtctatatttgaactatggggtcatggacaatctcctgaggagctgtacagttctcttaaaaactaccctgtggagaagatggttccatttctacattcggactctacatataaaataaagattcacacttttaataagacattgacacaagaagagaaaatcaagcgaatagatgcacttgaatttctgccatttgaaggaaaagtgaatttaaagaaaccgcaacatgtattttctgttttggaggattatggtttagacccaaactgcatccctgagaatccgcataatatttattttggtagatggattgcagatggacagagagagcttattgagtcatacagtgtcaaaaagagacactttattggaaatacaagtatggatgctggtttgtcattcattatggctaaccatggaaaagtgaaagaaaatgatattgtctttgatccatttgttggaacaggtggcctgctgatagcatgtgctcattttggtgcatatgtgtatgggacagacatagactacaacacagttcatggcttggcctgctcaacatgaaggtgatgaggatgaagacctttatgatgatccacttccacttcatgaatagtaaatctatttttactgaataaagtaattatggaaaatattttaaactctagaagcttcaataatgatgtgtgattggatggaattgaatcaaactgaaaaagtatttcttatagcttaatggaaaggctactaggaaaaaccagaagtggagaggaccagatgaaaacattagggccaatcttcgtcaatatggtttagagaagtattaccttgatgtcctggtttcagatgcatctaaaccttcctggaggaagggcacatattttgatgcaatcattactgatcctccatatggtatcagagaatctacaagaagaacaggttcacagaaggagataccaaaggggatagaaaaatgggaaaaatgtccagaaagccatgttcctgtttccttgagttatcatctgagtgatatgtttcttgacctgttaaacttcgcagctgagaccctcgttttaggtggaagactagtctattggttaccggtgtatacgccagaatacactgaagagatggtgccttggcaccttgcctggaactcgttagcaactgcgagcagaagctttccagtcacacatcaaggcgcttgatcacaatggaaaaggtgaagaaatttgagaatcgggaccagtattcacatctgctaagtgatcattttctgccataccaaggtcataattccttccgtgagaaatattttagtggggtaacaaaaagaattgccaaggaagaaaaatccacccaggaatgaaaattaagattttgacaatgaagaaagaataagaatttgatttaaaaagacatctggatgtgaactttcatgtatgatccagaaaataggtacggttttaaaatattttatatagaaaagctacaaagtaaattgagcaatgcttttaaagttatctttgttttatagacttttttgttgtatgtattacagtctttataatcttatttaatgtatatttgtactttcaagtactgatggagatagactcaaaacagttatttttttacaattaatctacaaagggaattaatattgttgacttttaaaacatctgctggatatattatatgcaattaatagtagttaagaatttattcatttggtagatatgtttatttggtttttggttgtcatcgatttacattgccactaataaaccatattgagaatttctaaaaaaaaaaaaaaaaaaaaaaaa

SEQ ID NO: 1037 - DNA, 3194 bp, human
cgctgccgcttcctgggctgagtccgcccgcggtcccggcggcgccaggtgcgttcactctgcccggctccagccagcgtccgccgccgccgtagctgccccaggctccccgccccgctgccgagatggcgacgcgctcctgtcgggagaaggctcagaagctgaacgagcagcaccagctcatcctatccaagcttctgagggaggaggacaacaagtactgcgccgactgcgaggccaaaggtcctcgatgggcttcctggaatattggtgtgtttatttgcatcagatgtgctggaattcatagaaatcttggggttcatatatccagggtcaaatcagtcaacctagaccaatggacagcagaacagatacagtgcatgcaagatatgggaaatactaaagcaagactactctatgaagccaatcttccagagaactttcgaagaccacagacagatcaagcagtggaatttttcatcagagataaatatgaaaagaagaaatactacgataaaaatgccatagctattacaaataaagaaaaggaaaaaaaaaaggaagagaaaaagagagaaaaggagccagaaaagccggcaaaaccacttacagctgaaaagctgcagaagaaagatcagcaactggagcctaaaaaaagtaccagccctaaaaaagctgcggagcccactgtggatcttttaggacttgatggccctgctgtggcaccagtgaccaacgggaacacaacggtgccacccctgaacgatgatctggacatctttggaccgatgatttctaatcccttacctgcaactgtcatgcccccagctcaggggacaccctctgcaccagcagctgcaaccctgtctacagtaacatctggggatctagatttattcactgagcaaactacaaaatcagaagaagtggcaaagaaacaactttccaaagactccatcttatctctgtatggcacaggaaccattcaacagcaaagtactcctggtgtatttatgggacccacaaatataccatttacctcacaagcaccagctgcatttcagggctttccatcgatgggcgtgcctgtgcctgcagctcctggccttataggaaatgtgatgggacagagtccaagcatgatggtgggcatgcccatgcccaatgggtttatgggaaatgcacaaactggtgtgatgccacttcctcagaacgttgttggcccccaaggaggaatggtgggacaaatgggtgcaccccagagtaagtttggcctgccgcaagctcagcagccccagtggagcctctcacagatgaatcagcagatggctggcatgagtatcagtagtgcaacccctactgcaggttttggccagccctccagcacaacagcaggatggtctggaagctcatcaggtcagactctcagcacacaactgtggaaatgaaaactgcaatacaagtttcatccagaactaccacctgacattccttgctgaaacgcatctagttcccctgtttattcatatgcatattttttttctttttacccatttgttcatattaagaatgatctgattgaccgtgttggtctgtactgattcaatttgatgtggtgaaaagcaggttgataaatcattttatgtcaagggcagctttgctcatatttcccatgatttcatgtactgcattatttgagaagctgctcaacttgcaaaatcagttttcctctcaataaaattatagctctaatgtttgcatataagggaagtagttatcatgttagtaatacctctaatagtataaaccccaccccaaaattagccagtaatcctgtaggaaggtactgtatgatcaaatgtttaatcatataaatagaatgtaaatgtctcactgagcactgttttctagtgtatcaaaatgctcttatttcatcattcacttcactgtgctgttgttatgatgtgcttaacagggaacgtgattagtgaaaggaagataaacgtggatgttactccaaaacttcgtttaatgaatgcttaaagaattcaaattttatctgcctctcttgtaatttggatctcttcttaatgtacatagtgctaacatgaagacctttttctgcactatatgcaaacagggtaactaactaaaacaaagccactttcaatcttcaatccttgaaggtatatctaggtttatgacagtaattgtgtttacattttatggtgcctagtattgacaaaatgttatttccctacattaaacatgactccatagaccttttcatttgtgggtttttatttcctatgatgtatactgccactaaccttccaaaaattacttagtattgcaaagtcaggaatcatcaggaacgtttagctgacaaaatacttgtctgttttaaaaacctgttcaagtctaccaacctgttcaagtctaccaattataagggcaaattggagaaaaagaaaaaatatatactcaagagtggtatcttgcagtatcggcactgtacaaaaaaatcttccaatttagttgttgtagagaaaacatgcagaacaaatgaagacaaaacatacattttgtaccaaccatccaattagcttatggtaactgacaagctccatttaaacagatgtccatcagatgacaagaaaggctgctgtactgaagtaaaacaaacaatacctgaatgctctgtagcctaaactccaaacatcctcttccatatggatccactggctggacaaactgcaccagttgctgcttcaatttatacctcaattttcactgtgtccaggtggtactttggctcgttggctagattaaccttctctgtccgagtgtgccacacgagaacctgaaggggaaggaaatagcttgggtagcgcactcttcatggtgacactcgaggtcgggcagcacaagtgtaatgaataccttagtgcagttatttgctttcggttccagttcttcgactgttgttatctgtttgagaaagtcagattcttgcatccctggctgggatccacgacgcttaaatacagcttttggattggacaaaatgacttgaagacttacagcaaatcctttgtgaaaaataaaaaaaaaaaaagagactttaaaaaaaaaaaaaaaaaaaaaaaaaaaaaaaaaaaaaaaaaaaaaaaaaaaaaaaaaaaaaaaaaaaa

SEQ ID NO: 1038 - DNA, 2477 bp, human
gcagaggtgcggccggggaggcgcgcggaggctggagctggaggcgcggcgccggtgagctgagaaccatgtgtgctcagtattgcatctcctttgctgatgttgaaaaagctcatatcaacattcgagattctatccacctcacaccagtgctaacaagctccattttgaatcaactaacagggcgcaatcttttcttcaaatgtgaactcttccagaaaacaggatcttttaagattcgtggtgctctcaatgccgtcagaagcttggttcctgatgctttagaaaggaagccgaaagctgttgttactcacagcagtggaaaccatggccaggctctcacctatgctgccaaattggaaggaattcctgcttatattgtggtgccccagacagctccagactgtaaaaaacttgcaatacaagcctacggagcgtcaattgtatactgtgaacctagtgatgagtccagagaaaatgttgcaaaaagagttacagaagaaacagaaggcatcatggtacatcccaaccaggagcctgcagtgatagctggacaagggacaattgccctggaagtgctgaaccaggttcctttggtggatgcactggtggtacctgtaggtggaggaggaatgcttgctggaatagcaattacagttaaggctctgaaacctagtgtgaaggtatatgctgctgaaccctcaaatgcagatgactgctaccagtccaagctgaaggggaaactgatgcccaatctttatcctccagaaaccatagcagatggtgtcaaatccagcattggcttgaacacctggcctattatcagggaccttgtggatgatatcttcactgtcacagaggatgaaattaagtgtgcaacccagctggtgtgggagaggatgaaactactcattgaacctacagctggtgttggagtggctgctgtgctgtctcaacattttcaaactgtttccccagaagtaaagaacatttgtattgtgctcagtggtggaaatgtagacttaacctcctccataacttgggtgaagcaggctgaaaggccagcttcttatcagtctgtttctgtttaatttacagaaaaggaaatggtgggaattcagtgtctttagatactgaagacattttgtttcctagtattgtcaactcttagttatcagattcttaatggagagtggctatttcattaagatttaatagttttttttggactaagtagtggaaaaacttttatacttaactgagacattttgtcaaggctaaaaaaaagtcttgcaaaatggggcagtggactgacaggctgacatagaaaataaactttgcccaatcacaacttgtgcctcccatccctggagtactgactggcaccggtaagacagaatctctctgaatccattactccatgcccccttgaggcactgttgaagaaatctcacttttcagccagggtactggttctggtacatatggatcataagtccatttggggaagactcgtttatacaggttcatcagtactgtgtcttgagattttagcttcccatcaaagctgcatttcatgtggccatgggtacctagaaagacatcagaacaagtcggtcaaattaaaagtagaaaattttaaagcaatgacttccaacccaacagtcatttagcaacactgcagaaatgcagacatggtctcaaatcccgtgtttccttacctaaaggttccttgatatgtcctctccggccccacttcgttctcagttccactggtttaaaccacagcacatcctcttagaatcaaacacattaaagaccaagatgaaacatttacccacaaaatgtaaacccaacctttataccacaaaggcaatcagatcccatcctcctccttcatacccacctctgttgaagaacatgtaacgtactactgccatcttagtaaaaattttgaaaggatgaccactcagaacaactctcttgatgaccattctgtctggatctactgacataagatggcctgtagcaatgaggctgtgcattcctaaaggacaaaagcaaagaagctatttaggaatttacaggccaaagtcttcatttattgcccagtccatttaaagacccatgcaagagcctggtttgtcatccctgccctagcccaatctgaggctaagattggtaaactgtaagcccacacttaaccttgtcaataggttcttgaaaacttgtacttcaagagaaatgatgtataacaaaaccatactttttctcatcagttgttacaaggaaaggatgttgaacaaaaggcagttatttgaggactggctatacactgtttcacgtaaaagttggagttttcattgttctattaacaatgttaaatgaagacttactgtattttgaaaaccatcattaccttctccataccatttggctcccaaatttaaataaacaagagaaaacggtgttcatct

SEQ ID NO: 1039 - DNA, 2510 bp, human
gctcccgggtcagctggtgctggcgtcaggcgctgggcgggctcgccaggacctggcaaggcttgtttactatggccgatgatctggagcagcagtctcaaggctggctgagtagctggctgcccacgtggcgccccacttccatgtctcagctgaagaatgtggaagccaggatcctccagtgtctccagaataagttcctggccagatatgtatccctcccaaaccagaataagatctggacggtgactgtgagccccgagcaaaacgaccgcacccccttggtgatggtgcatggttttgggggcggcgtgggtctctggatcctcaacatggactcactgagtgcccgccgcacactgcacaccttcgatctgcttggcttcgggcgaagctcaaggccagcattcccaagggacccggagggggctgaggatgagtttgtgacatcgatagagacatggcgggagaccatggggatccccagcatgatcctcctggggcacagtttgggaggattcctggccacttcttactcaatcaagtaccctgatagagttaaacacctcatcctggtggacccatggggctttcccctccgaccaactaaccccagtgggatctgtgcacccccagcctgggtcaaagccgtggcatctgtcctaggacgttccaatccattggctgttcttcgagtagctgggccctgggggcctggtctggtgcagcgattccggccggacttcaaacgcaagtttgcagacttctttgaagatgataccatatcagagtatatttaccactgcaacgcacagaatcccagtggtgagacagcattcaaagccatgatggagtcctttggctgggcccggcgccctatgctggagcgaattcacttgattcgaaaagatgtgcctatcactatgatctacgggtccgacacctggatagataccagtacgggaaaaaaggtgaagatgcagcggccggattcctatgtccgagacatggagattaagggtgcctcccaccatgtctatgctgaccagccacacatcttcaatgctgtggtggaggagatctgcgactcagttgattgagctgctctctgaagaggaagaggagaaagccagagagtcactcttacctccctgtctgcttactcacccactctgtcctttcctcaccaactaacatgtgccagccaggcagagtcttgtgctgttcccagaacaggacgacagtgaaaagaacactcttgaccctacactgaaggctgaaggcagaagccacaagaggccttgagtgccacccccagggaagaacataaagggttgcacaatgccacccatccactccttgccaagtgttacccagatggtggaggatgtgaagggattgcgccaagccacattcactctctctgtggcctttcttcctctgggcaaagaagggcttccagtggcctttcctcactctgtagtgtttgtggggatagattccatgcaagaacaccttcctcctccatcccccacttcaccccatcccataccagttccatccagggtctgcttaactgccaagagcaggtcctggagttcccttcacctgcagagtccttttcatgacctaggaggtcttattcaaagccctcattgacagaggaggaaacaggccaaggcaggacatggctggaccatggtgatacagctctgtgtgattcaagttctggcagagcttgtaaggctagagcccaggtctgccgacaccctgtgcttgttgcacacttgatttgctaaggctggagacaggcaccattgccatggggctggtcctagtcactggccgaggataagcccgtccctgtcccacattctagccccactatgcgggggtgctgttgtcctgcctgtgtctcatccccggctgcctaagctagggacactcaagtgcttccttccttgccccatcttcctcccaactggaggcctctgagcctcccctgtgccttgggccctgaagccccatatgtagtatagagcaaaggtggctcctggtgaagagagggtggaaaggcccttcagccccagggccatgtctgggttctccatgcccatcagtctctgcagtttctctacctgcccccagagctgaggccatctgcaagcccctgcccatggcccaatggggagcctccagccacaagttccctgtccttatcagccactgggtggttcccactgcatgaccctctatccctgccatctgtccccatggtttccagctcaatccacccctgacccatctgtcagctttttcccagggagccgtttcaggggttctgggcagtaggctgggcctggcctcagaacctggtggctcctgcctgctccttcacttttgtaaaaccatccccttcaccagaatggtattaactcctggtgctttgtactactggtccagctgccctgggctccttttctatattaataaagaaacgagtaaaaatt

SEQ ID NO: 1040 - DNA, 2703 bp, human
gcagcgcggagtcccggcccgggacacaagatggcggcagcggcgctggggagggcgaggcggaggcggcaaaacgggcggtcgagcagaacgtgtagccgcgtcccctccagtccgctccgggcagctgctgatgcaaggaatcccctgggctcccgtccactccactgctgaccagcccattcgcctgtgctgagtcttcctgcaggcctttccttgcctctgtgggaccctgtgggggtccatccggctggagaagaaaagcctctcatgctaacgttgcagaccccagagggtcctgtgtgggtgtggagatggccaatgagaatcacggcagcccccgggaggaagcgtccctgctgagtcactccccaggtacctccaatcagagccagccctgttctccaaagccaatccgcctggttcaggacctcccagaggagctggtgcatgcaggctgggagaagtgctggagccggagggagaatcgtccctactacttcaaccgattcaccaaccagtccctgtgggagatgcccgtgctggggcagcacgatgtgatttcggaccctttggggctgaatgcgaccccactgccccaagactcaagcttggtggaaactcccccggctgagaacaagcccagaaagcggcagctctcggaagagcagccaagcggcaatggtgtgaagaagcccaagattgaaatcccagtgacacccacaggccagtcggtgcccagctcccccagtatcccaggaaccccaacgctgaagatgtggggtacgtcccctgaagataaacagcaggcagctctcctacgacccactgaggtctactgggacctggacatccagaccaatgctgtcatcaagcaccgggggccttcagaggtgctgcccccgcatcccgaagtggaactgctccgctctcagctcatcctgaagcttcggcagcactatcgggagctgtgccagcagcgagagggcattgagcctccacgggagtctttcaaccgctggatgctggagcgcaaggtggtagacaaaggatctgaccccctgttgcccagcaactgtgaaccagtcgtgtcaccttccatgtttcgtgaaatcatgaacgacattcctatcaggttatcccgaatcaagttccgggaggaagccaagcgcctgctctttaaatatgcggaggccgccaggcggctcatcgagtccaggagtgcatcccctgacagtaggaaggtggtcaaatggaatgtggaagacacctttagctggcttcggaaggaccactcagcctccaaggaggactacatggatcgcctggagcatctgcggaggcagtgtggcccccacgtctcggccgcagccaaggactccgtggaaggcatctgcagtaagatctaccacatctccctggagtacgtcaaacggatccgagagaagcaccttgccatcctcaaggaaaacaacatctcagaggaggtggaggcccctgaggtggagccccgcctagtgtactgctacccagtccggctggctgtgtctgcaccgcccatgcccagcgtggagatgcacatggagaacaacgtggtctgcatccggtataagggagagatggtcaaggtcagccgcaactacttcagcaagctgtggctcctttaccgctacagctgcattgatgactctgcctttgagaggttcctgccccgggtctggtgtcttctccgacggtaccagatgatgttcggcgtgggcctctacgaggggactggcctgcagggatcgctgcctgtgcatgtctttgaggccctccaccgactctttggcgtcagcttcgagtgcttcgcctcacccctcaactgctacttccgccagtactgttctgccttccccgacacagacggctactttggctcccgcgggccctgcctagactttgctccactgagtggttcatttgaggccaaccctcccttctgcgaggagctcatggatgccatggtctctcactttgagagactgcttgagagctcaccggagcccctgtccttcatcgtgttcatccctgagtggcgggaacccccaacaccagcgctcacccgcatggagcagagccgcttcaaacgccaccagttgatcctgcctgcctttgagcatgagtaccgcagtggctcccagcacatctgcaagaaggaggaaatgcactacaaggccgtccacaacacggctgtgctcttcctacagaacgaccctggctttgccaagtgggcgccgacgcctgaacggctgcaggagctgagtgctgcctaccggcagtcaggccgcagccacagctctggttcttcctcatcgtcctcctcggaggccaaggaccgggactcgggccgtgagcagggtcctagccgcgagcctcaccccacttaacatatcctgcggggaggaggagccccaggggtgctagtctggactgctgggactcgggcccctggggcctcagagggaccccggctgccactgacatatgaagattatggttctgccagggctcccctccctgcctgtccccaagtcctcacctcaaactccctccaagtcccatgtatataggtcctgatgccttcccaaccccgcccctcaccctgttgccaccttgtttcatttgtaaaaggaaatacagaaacccccccaagaaaaaaaa

SEQ ID NO: 1041 - DNA, 5878 bp, human
ccgggcgagcgcagccaacatgtcggataccaaggtaaaagttgccgtccgggtccggcccatgaaccgacgagaactggaactgaacaccaagtgcgtggtggagatggaagggaatcaaacggtcctgcaccctcctccttctaacaccaaacagggagaaaggaaacctcccaaggtatttgcctttgattattgcttttggtccatggatgaatctaacactacaaaatacgctggtcaagaagtggttttcaagtgccttggggaaggaattcttgaaaaagcctttcaggggtataatgcgtgtatttttgcatatggacagacaggttcgggaaaatccttttccatgatgggccatgctgagcagctgggccttattccaaggctctgctgtgctttatttaaaaggatctctttggagcaaaatgagtcacagacctttaaagttgaagtgtcctatatggaaatttataatgagaaagttcgggatcttttagaccccaaagggagtagacagtctcttaaagttcgagaacataaagttttgggaccatatgtagatggtttatctcaactagctgtcactagttttgaggatattgagtcattgatgtctgagggaaataagtctcgaacggtagctgctaccaacatgaacgaagaaagcagccgctcccatgctgtgttcaacatcataatcacacagacactttatgacctgcagtctgggaattccggggagaaagtcagtaaggtcagcttggtagacctggcgggtagcgaaagagtatctaaaacaggagctgcaggagagcgactgaaagaaggcagcaacattaacaaatcgcttacaaccttggggttggttatatcatcactggctgaccaggcagctggcaagggtaaaagcaaatttgtgccttatcgagattcagtcctcacttggctgcttaaggacaacttggggggcaacagccaaacctctatgatagccacaatcagcccagccgcagacaactatgaagagaccctctccacattaagatatgcagaccgagccaaaaggattgtgaaccatgctgttgtgaatgaggaccccaacgcaaaagtgatccgagaactgcgggaggaagtcgagaaactgagagagcagctctctcaggcagaggccatgaaggcccctgaactgaaggagaagctcgaagagtctgaaaagctgataaaagaactaacagtgacttgggaagagaagctgagaaaaacagaagagatagcacaggaaagacaacgacaacttgaaagcatggggatttccctggagatgtccggtatcaaggtgggggatgacaaatgctacttagtcaatctgaatgcagaccctgctcttaacgaacttctggtttattatttaaaggatcacaccagggtgggtgcagatacctctcaagatatccagctttttggcataggaattcagcctcagcactgtgagattgacattgcatctgatggagacgtcactctcactccaaaagaaaatgcaaggtcctgtgtgaacggcacccttgtgtgcagtaccacccagctgtggcatggtgaccgaatcctatggggaaataatcacttttttagaataaacttacctaagaggaaacgtcgagattggttgaaagactttgaaaaagaaacgggcccgccagagcatgacctggatgcagccagtgaggcttcctctgaaccagactataactatgaatttgcacagatggaagttatcatgaaaaccctgaatagtaatgacccagttcaaaatgtggttcaggtcctggagaaacaatacctagaagaaaagagaagtgccctagaggagcagcggctcatgtatgagcgggaactggagcaactccgccagcagctctcccccgacaggcagccacagagtagcggccctgaccgcctggcctacagcagccagacagcgcagcagaaggtgacccagtgggcagaagagagggatgaactcttccgacaaggcctggcaaaactgcgagagcagctggttaaagctaataccttggtgagggaagcaaacttcctggctgaggaaatgagcaaactcaccgattaccaagtgactcttcagatccctgctgcaaacctcagtgccaataggaagagaggtgcaatagtgagtgaaccagctatccaagtgaggaggaaaggaaagagcacccaagtgtggaccattgagaagctggagaataaattaattgacatgagagacctttaccaagaatggaaggaaaaagttcctgaggcaaagagactctacggaaaacgaggtgaccctttctatgaagctcaagaaaatcacaacctcatcggggtggcgaatgtattcttggaatgcctcttctgtgatgtgaaacttcagtatgcagtccctatcatcagccagcagggggaggttgcagggcgtctccacgtggaagtgatgcgtgttacaggagctgttccagagcgtgtggtggaggatgactcttcggagaattccagtgaaagtgggagccttgaagtcgtagacagcagcggggaaatcattcaccgagtcaaaaagctgacatgtcgggtaaaaattaaagaagcaacggggctgcccttaaacctctcaaattttgtcttctgtcaatacacattctgggaccagtgtgagtctacggtggctgccccggtggtggaccccgaggtgccttcaccacagtccaaggatgcccagtacacagtggccttctcccactgtaaggactatgtggtgaatgtaacagaagaatttctggagttcatttcagatggagcactggccattgaagtatggggccaccggtgtgctggaaatggcagctccatctgggaggtcgattctcttcatgctaagacaagaacactgcatgacaggtggaatgaagtaacgcgaagaatagaaatgtggatctccatattagaattgaatgagttaggagagtatgctgcagtggaacttcatcaggcaaaagatgtcaacacaggaggcatctttcaacttagacagggtcattcccgtagagtacaagtcacggtgaaacctgtgcagcattcagggacactgccacttatggttgaagccatcctgtcagtatccatcggctgtgtaactgccaggtccaccaaactccaaagagggctggacagttaccagagagatgatgaggatggtgatgatatggatagttatcaggaagaagacttaaactgcgtaagggagaggtggtcagatgcactcattaaacgacgagaatacctggatgaacagataaaaaaagtcagcaataaaacagagaaaacagaggacgatgtggagcgggaagcccagcttgtggagcagtgggtagggctgactgaggaaaggaatgctgtgctggtgccagccccaggcagtgggattcctggggcacctgccgactggatcccacctcctggaatggaaacccacataccagttctcttcctcgatttgaatgcggatgaccccagtgccaatgagcagcttgttggcccccatgcatccggcgtgaactccatcctgcccaaggagcatggcagtcagtttttctacctgcccatcataaagcacagtgatgatgaggtttcagccacagcctcttgggattcctcggtgcatgattctgttcacttgaatagggtcacaccacagaatgaaaggatttacctaattgtgaaaaccacagttcaactcagccaccctgctgctatggagttagtattacgaaaacgaattgcagccaatatttacaacaaacagagtttcacgcagagtttgaagaggagaatatccctgaaaaatatattttattcctgtggtgtaacctatgaaatagtatccaatataccaaaggcaactgaggagatagaggaccgggaaacgctggctctcctggcagcaaggagtgaaaacgaaggcacatcagatggggagacgtacattgagaagtacactcgaggcgtgctgcaggtggaaaacattctgagtcttgaacggctccggcaggccgtcacagtcaaagaagcactttccaccaaagcccggcacattcggaggagcctcagtacaccaaatgttcataatgtctcttccagccgaccggacctttctggctttgatgaagatgacaagggttggccagagaaccagttggacatgtctgactatagctccagttaccaagatgtagcatgttatggaactttacccagggattctcctcgaaggaataaagaaggttgtacatcagagactcctcatgccttaaccgtcagcccttttaaagcattctctcctcagccaccaaagtttttcaagcccctaatgcctgtaaaagaggagcataagaaaaggatagccctggaagcaaggcctcttctaagccaggagagcatgcctccacctcaggcacataaccctggctgcattgtaccctcaggaagcaatggcagcagcatgccagtagaacacaataacaaacgtgagaagaagattgactctgaggaggaagaaaatgagctggaagctattaacaggaagctaataagttcacagccttatgtacctgtggagtttgctgacttcagtgtttacaatgccagcttggagaacagggaatggttttcctctaaagtagatctgtcaaactcacgggtcttggagaaagaagtgtcccgtagccctaccaccagcagtattaccagtggctacttttcccacagtgcctccaatgccaccctgtctgacatggtggtcccttctagtgacagctcagaccagctggccattcagacgaaggatgcagactccaccgagcactccacaccatcgcttgtgcatgatttcaggccgtcctcaaacaaagagttgacagaagtcgaaaaaggcttggtaaaggacaagataattgtggtgccactcaaggaaaacagtgccttagccaaagggagcccatcatcccagagcatccctgagaaaaactccaaatcactgtgcaggactggctcatgttcagaactagatgcctgccccagcaaaattagccagccagccaggggattctgccccagggaggtgacggtagaacacaccaccaacatccttgaagaccattctttcacagaatttatgggagtgtcagagggaaaagattttgatggtttgacagattcttctgctggagagctttccagtaggaggagtctaccaaataaaacaggcggcaagactgtctccgatgggctccaccaccccagccagctgcattccaagttagagaatgaccaggtaataattccagaggcagccttttgggttctgtgctgtcaatgagtatgtctaactgtatgtcaaccccagaggcccttcaccgcaacaacttggtaggaaagattcatccagttgtttgtgacggcaaagatgagcccacagagaagcaggctcacttcctgcacagctgtctctgtcggagagcaagtctgttttgggaactagaacgcaattgtgaaattataagaccagtggatttttttacctggcacatgggttggtgttgaatgaagtgttcagatggataaggatcaatctcatattcattccctgggatgtttagttaccagttttcccaaagtgttctggtagcatctaccatatttcatcaaatctgtgattcctttgattattatatgaaccattattttatgtatcattaagaaaaaatactgccaattaaactctgtcatatcaaaaaaaaaaaaaaaaaaaaaaaaaaaa

SEQ ID NO: 1042 - DNA, 2370 bp, human
cgcagccactgaaccacaagcagcttcgcgttaactggagtgcctgggagtcgcgtgccaggagccgcacggccagggactgactgacagacagacacgcaccaccaccacaacacacgagacccgggcgggccgccgccgccgccgccggggctcttggcaaactcgccggtcgcagaggtcccccgcggagctgcgccacagtagcgccgggcttgcagctttcacgccgggcgaaggacccggcgctgcgctcgcagctgcgcggagattcccggcacaggccaaagtcacagcaacgctgaggcacagttagagccaactaagatgttcgtcaaatccgagaccttggagttgaaggaggaagaggacgtgttagtgctgctcggatcggcctcccccgccttggcggccctgaccccgctgtcatccagcgccgacgaagaagaggaggaggagccgggcgcgtcaggcggggcgcgtcggcagcgcggggctgaggccgggcagggggcgcggggcggcgtggctgcgggtgcggagggctgccggcccgcacggctgctgggtctggtacacgattgcaaacggcgcccttcccgggcgcgggccgtctcccgaggcgccaagacggccgagacggtgcagcgcatcaagaagacccgtagactgaaggccaacaaccgcgagcgaaaccgcatgcacaacctcaacgcggcactggacgcgctgcgcgaggtgctccccacgttccccgaggacgccaagctcaccaagatcgagaccctgcgcttcgcccacaactacatctgggcactcaccgagaccctgcgcctggcggatcactgcgggggcggcggcgggggcctgccgggggcgctcttctccgaggcagtgttgctgagcccgggaggcgccagcgccgccctgagcagcagcggagacagcccctcgcccgcctccacgtggagttgcaccaacagccccgcgccgtcctcctccgtgtcctccaattccacctccccctacagctgcactttatcgcccgccagcccggccgggtcagacatggactattggcagcccccacctcccgacaagcaccgctatgcacctcacctccccatagccagggattgtatctagagctgccatttctgctacccacgccaggccttagtgggttccctttcctgtccccagtcgagccctcctcccttcccctgcccctcctttccacgccctggaaaccatctcacttcacagggcaggtgtagcctttctgattcctcggttgtttcttgcatttcttggctttgggtatccttcattcagacgggctctgatttactgaaggtgtgatggagcttattgtcaaagccaagggtggcgttttgggggcgcttcttgagacgaaaaagaccctgggaagagatgatggtggcatatctaaagagtttgcagagcggactgacgctcctcccctttctctttaacgccgaaggacttggtgcagttcgtgtgaatctcacagggggaatgcaactggttcctgtgatctcttcacctttgcttctacatagagatgttaatgtcgagtagaaagaaatgtatcttagcatctgaatgattttgctggtaataatattatccacagatttgcaatggctggcatctgctttattcccattgctgtctgcaggctgtgggaatttcacctgtcaaaccaaacttccctctctgatgtgcactttgttctgtttcccagattcgtcacaatgcctattgtcctgtccttctctttcctttttcttccccattttgccatctgtctcttatgatttataaggggaaaaaaacttgttttgttagaggggcaggttagaagtcattgtataatttgtaggctttgtaatgattgaatgcaagcgtggaaatttaggctgaactctctatcaaaaggaaaaatgtggaggaaaagggaaaaatcaggagggaggattgcctcatgtattatttatttcgaccttttaggggagaaggaactcccccattctttcaagagattaaaaataaatcaacagtctgaaaacctaagcagacacggagcattatccggatcagccacacacgtgttcccttctatttattataaagaaatttttcatgggaaaatatgtattttttgtatattctacagagtttattctagtatgtatttacatcttgaagaacaagaaagttgttcttgtgattaaactataaataaactatctaattttcataaaaaaaaaaaaaaaaaaaaaaaaaaaaaaaaaaaaaaaaaaaaaaaaaaaaaaaaaaaaaaaaaaaaaaaaaaaaaaaaaaaaa

SEQ ID NO: 1043 - DNA, 1196 bp, human
acctttgagcgatggcggcgtctggggaaccccagaggcagtggcaagaggaggtggcggcggtggtagtggtgggctcctgcatgaccgacctggtcagtcttacttctcgtttgccaaaaactggagaaaccatccatggacataagttttttattggctttggagggaaaggtgccaaccagtgtgtccaagctgctcggcttggagcaatgacgtccatggtgtgtaaggttggcaaagattcttttggcaatgattatatagaaaacttaaaacagaatgatatttctacagaatttacatatcagactaaagatgctgctacaggaactgcttctataattgtcaataatgaaggccagaatatcattgtcatagtggctggagcaaatttacttttgaatacggaggatctgagggcagcagccaatgtcattagcagagccaaagtcatggtctgccagctcgaaataactccagcaacttctttggaagccctaacaatggcccgcaggagtggagtgaaaaccttgttcaatccagcccctgccattgctgacctggatccccagttctacaccctctcagatgtgttctgctgcaatgaaagtgaggctgagattttaactggcctcacggtgggcagcgctgcagatgctggggaggctgcattagtgctcttgaaaaggggctgccaggtggtaatcattaccttaggggctgaaggatgtgtggtgctgtcacagacagaacctgagccaaagcacattcccacagagaaagtcaaggctgtggataccacgggtgctggtgacagctttgtgggagctctggccttctacctggcttactatccaaatctgtccttggaagacatgctcaacagatccaatttcattgcagcagtcagtgtccaggctgcaggaacacagtcatcttacccttacaaaaaagaccttccgcttactctgttttgattgctattagtcccaaaataaatatacctgggaataaaatgtacttgggggtggctgctcctggctaatgcttattagaaaatgtcctcgtcccctttctttgcaaatattagttcttttacgaagtcatcctcaagcttcaatttatttataacgatgattcttttgctttccatgcatttgcacaaaacaaccagaattaaagattccacaacc

SEQ ID NO: 1044 - DNA, 2676 bp, human
atattggaaaggcgccgccgccgcctccgccttggagctcggggtgtttcggggactgcggccacaggcaggaaggcgctcctctcctgccccgccgacgcccggccagcccgcttcgccctgacctgtttcctcatgactgcccccggccctgctgccgacggacgtcgccccggcgtccggatttaacacggaaacccggatcggaggccgcgcggggaggaggagggcgacccggtcggtcctgcgaccctctcggcccggctcggcgcctcggcgggagccatgacctcgctgacccagcgcagctccggcctggtgcagcggcgcaccgaggcctcccgcaacgccgccgacaaggagcgggcggcgggcggcggcgccggcagcagcgaggacgacgcgcagagccgccgcgacgagcaggacgacgacgacaagggcgactccaaggaaacgcggctgaccctgatggaggaagtgctcctgctgggcctcaaggaccgcgagggttacacatcattttggaatgactgtatatcatctggattacgtggctgtatgttaattgaattagcattgagaggaaggttacaactagaggcttgtggaatgagacgtaaaagtctattaacaagaaaggtaatctgtaagtcagatgctccaacaggggatgttcttcttgatgaagctctgaagcatgttaaggaaactcagcctccagaaacggtccagaactggattgaattacttagtggtgagacatggaatccattaaaattgcattatcagttaagaaatgtacgggaacgattagctaaaaacctggtggaaaagggtgtattgacaacagagaaacagaacttcctactttttgacatgacaacacatcccctcaccaataacaacattaagcagcgcctcatcaagaaagtacaggaagccgttcttgacaaatgggtgaatgaccctcaccgcatggacaggcgcttgctggccctcatttacctggctcatgcctcggacgtcctggagaatgcttttgctcctcttctggacgagcagtatgatttggctaccaagagagtgcggcagcttctcgacttagaccctgaagtggaatgtctgaaggccaacaccaatgaggttctgtgggcggtggtggcggcgttcaccaagtaactctgctcggggtgaaccattctcctttctctcaagtaaaccagtagtttttcttctgttgacttctggttttctgtaatttgtactttcccacactataattggcttctgttttacaaaatggtgggtggctttttcttttttgtacgtgtacaggattctgctggtacgagaggccttcctctttctgtttttaaaaaaagttttactgccatattggcattccattccctgttgccatcctcactgttacctgttttgggtttctggtctactttgactttcaaagtacctccagcctcctcatacgcacagcttttggatgacctcagcttgagtttctccatatgtgcatgtacatctagcattctgcctacagttcagacagaagtcacaaaaaggccttcaactcaccaaaggtaaatatctgtatctattaggacattttttacatagacttcagttgagatgtatacttagcaaaattatttttaaattgaaacagcacagtaaatacttaatataaaatgtcccttggattttgcttcccatgtaaatctattgtattattacacttgttataattttaactataaaggtccaattgtttcacagagccagtttgggatgggctgcattccatttatgctgtatatagtttgaattatatataaattaccccttcttctggccacccctgctcccatcttagtattttgcaagatctaatcagttgtacacctggtgcccctcgcttgcttcaatcatggttatttgatggcaaaatcgacctcttgtcgctgaaggagagagaaaagatgtgtgtctgattggtcctgggattttttgagctgtgccatttatggtactctttgcctatgcatccccttgttagattttttttaaattttatcttactgtttttataatttctattgggaagaggcttgtgaccagtaccaatcttgagtttctttttctgtccacaagtaaattaatatctgctctgaaatgtcatttatctactcacacattcttggggaaaaaaatcaaatgtcagtcctagcagatgttgcatgtaaattggtagcaagtaatgattacaacccagaggattaagaattttgtaacagaaagctctatgttttaattttttatatacaattaggataattagcattgtcagactataaacctttgctttttaaagtttatttttactatttctttatcactttattgtatcatcaccattggtttcataatgtaaatactatatgttgaacaaattaaatgtcaaaattttttattaccatagtccatgttaatagtggggctttcaggtgtttagagattttttttgttgttgttaacattcattgcaaaagtactagatggtgtataactctagagttgaattttaagggattccctaatatgtatactatctttttatctgaagtaataaataaacaatgatcttgaaagtgcctg

SEQ ID NO: 1045 - DNA, 2177 bp, human
gcgggccagcctgggccccagcccacaccttcaccagggcccaggagccaccatgtggcgatgtccactggggctactgctgttgctgccgctggctggccacttggctctgggtgcccagcagggtcgtgggcgccgggagctagcaccgggtctgcacctgcggggcatccgggacgcgggaggccggtactgccaggagcaggacctgtgctgccgcggccgtgccgacgactgtgccctgccctacctgggcgccatctgttactgtgacctcttctgcaaccgcacggtctccgactgctgccctgacttctgggacttctgcctcggcgtgccacccccttttcccccgatccaaggatgtatgcatggaggtcgtatctatccagtcttgggaacgtactgggacaactgtaaccgttgcacctgccaggagaacaggcagtggcagtgtgaccaagaaccatgcctggtggatccagacatgatcaaagccatcaaccagggcaactatggctggcaggctgggaaccacagcgccttctggggcatgaccctggatgagggcattcgctaccgcctgggcaccatccgcccatcttcctcggtcatgaacatgcatgaaatttatacagtgctgaacccaggggaggtgcttcccacagccttcgaggcctctgagaagtggcccaacctgattcatgagcctcttgaccaaggcaactgtgcaggctcctgggccttctccacagcagctgtggcatccgatcgtgtctcaatccattctctgggacacatgacgcctgtcctgtcgccccagaacctgctgtcttgtgacacccaccagcagcagggctgccgcggtgggcgtctcgatggtgcctggtggttcctgcgtcgccgaggggtggtgtctgaccactgctaccccttctcgggccgtgaacgagacgaggctggccctgcgcccccctgtatgatgcacagccgagccatgggtcggggcaagcgccaggccactgcccactgccccaacagctatgttaataacaatgacatctaccaggtcactcctgtctaccgcctcggctccaacgacaaggagatcatgaaggagctgatggagaatggccctgtccaagccctcatggaggtgcatgaggacttcttcctatacaagggaggcatctacagccacacgccagtgagccttgggaggccagagagataccgccggcatgggacccactcagtcaagatcacaggatggggagaggagacgctgccagatggaaggacgctcaaatactggactgcggccaactcctggggcccagcctggggcgagaggggccacttccgcatcgtgcgcggcgtcaatgagtgcgacatcgagagcttcgtgctgggcgtctggggccgcgtgggcatggaggacatgggtcatcactgaggctgcgggcaccacgcggggtccggcctgggatccaggctaagggccggcggaagaggccccaatggggcggtgaccccagcctcgcccgacagagcccggggcgcaggcgggcgccagggcgctaatcccggcgcgggttccgctgacgcagcgccccgcctgggagccgcgggcaggcgagactggcggagcccccagacctcccagtggggacggggcagggcctggcctgggaagagcacagctgcagatcccaggcctctggcgcccccactcaagactaccaaagccaggacacctcaagtctccagccccactaccccaccccactcctgtattctttttttttttttttagacagggtcttgctccgttgcccaggttggagtgcagtggcccatcagggctcactgtaacctccgactcctgggttcaagtgaccctcccacctcagcctctcaagtagctgggactacaggtgcaccaccacacctggctaatttttgtattttttgtaaagaggggggtctcactgtgttgcccaggctggtctcgaactcctgggctcaagcggtccacctgcctccgcctcccaaagtgctgggattgcaggcatgagccactgcacccagccctgtattcttattcttcagatatttatttttcttttcactgttttaaaataaaaccaaagtattgataaaaaaaaaaaaaaaaa

SEQ ID NO: 1046 - DNA, 3874 bp, human
tggtaggagagcgcagtcgccccgcgggctcggaggacacagcgtccgggaccaggctctgggaagcgggtgtgcacagcccagcagagtcagggcgcgaccccaaccgcctctcaccatccttgccatctcctccgagccgagggccggccctcctgcctcgcctgccccgccccggccccgccccggcccgggccgccgggaccgggagccgggacgcgggtgccgcagcccgaggcaggtaaggggagccccggctctccgtccccggtccgtggcagcgctgagcatcccggccccgcaccggcccgggggcgcgtcaaggtcggcggcgtgatggcggagaaggcgctggaggccgtgggctgtggactagggccgggggctgtggccatggccgtgacgctggaggacggggcggaaccccctgtgctgaccacgcacctgaagaaggtggagaaccacatcactgaagcccagcgcttctcccacctacccaagcgctcagccgtggacatcgagttcgtggagctgtcctattccgtgcgggaggggccctgctggcgcaaaaggggttataagacccttctcaagtgcctctcaggtaaattctgccgccgggagctgattggcatcatgggcccctcaggggctggcaagtctacattcatgaacatcttggcaggatacagggagtctggaatgaaggggcagatcctggttaatggaaggccacgggagctgaggaccttccgcaagatgtcctgctacatcatgcaagatgacatgctgctgccgcacctcacggtgttggaagccatgatggtctctgctaacctgaagctgagtgagaagcaggaggtgaagaaggagctggtgacagagatcctgacggcactgggcctgatgtcgtgctcccacacgaggacagccctgctctctggcgggcagaggaagcgtctggccatcgccctggagctggtcaacaacccgcctgtcatgttctttgatgagcccaccagtggtctggatagcgcctcttgtttccaagtggtgtccctcatgaagtccctggcacaggggggccgtaccatcatctgcaccatccaccagcccagtgccaagctctttgagatgtttgacaagctctacatcctgagccagggtcagtgcatcttcaaaggcgtggtcaccaacctgatcccctatctaaagggactcggcttgcattgccccacctaccacaacccggctgacttcatcatcgaggtggcctctggcgagtatggagacctgaaccccatgttgttcagggctgtgcagaatgggctgtgcgctatggctgagaagaagagcagccctgagaagaacgaggtccctgccccatgccctccttgtcctccggaagtggatcccattgaaagccacacctttgccaccagcaccctcacacagttctgcatcctcttcaagaggaccttcctgtccatcctcagggacacggtcctgacccacctacggttcatgtcccacgtggttattggcgtgctcatcggcctcctctacctgcatattggcgacgatgccagcaaggtcttcaacaacaccggctgcctcttcttctccatgctgttcctcatgttcgccgccctcatgccaactgtgctcaccttccccttagagatggcggtcttcatgagggagcacctcaactactggtacagcctcaaagcgtattacctggccaagaccatggctgacgtgccctttcaggtggtgtgtccggtggtctactgcagcattgtgtactggatgacgggccagcccgctgagaccagccgcttcctgctcttctcagccctggccaccgccaccgccttggtggcccaatctttggggctgctgatcggagctgcttccaactccctacaggtggccacttttgtgggcccagttaccgccatccctgtcctcttgttctccggcttctttgtcagcttcaagaccatccccacttacctgcaatggagctcctatctctcctatgtcaggtatggctttgagggtgtgatcctgacgatctatggcatggagcgaggagacctgacatgtttagaggaacgctgcccgttccgggagccacagagcatcctccgagcgctggatgtggaggatgccaagctctacatggacttcctggtcttgggcatcttcttcctagccctgcggctgctggcctaccttgtgctgcgttaccgggtcaagtcagagagatagaggcttgccccagcctgtaccccagcccctgcagcaggaagcccccagtcccagccctttgggactgttttaaccttatagacttgggcactggttcctggcggggctatcctctcctcccttggctcctccacaggctggctgtcggactgcgctcccagcctgggctctgggagtgggggctccagccctccccactatgcccaggagtcttcccaagttgatgcggtttgtagcttcctccctactctctccaacacctgcatgcaaagactactgggaggctgctgcctccttcctgcccatggcaccctcctctgctgtctgcctgggagccctaggctctctagggccccacttacaactgaccaaagtggccccctctgggggtccccaccacacaagtgtttgtaaactgggctgctataaggttggagttccagggctgggccctggtggagtccactggaagtcccattatggatgttgaaatggacagggaaggactctggaagtctcttcctcctcctcctcttctctccacccctagaccctggctgacttggacaatctgccaggacagaagctgggttttctgtctaggtcaccactcccaatcctggggattggagaggcctggggctgtgggatgccccatccccctccccatcacctttggtgggggcagggcctggtggcacctgtgcaataatgtctgtgtttctctcccacctgccactggaactggagaatgcactttattctgggcggggggtgagtgggggaagacccaaccctcctttctcgctgcccctaacgcatgcacggtctcgtgatgctccctccctctccggagtgacaggcacatacatgagaacaggccatctcagccctacacacttgccatcccctacagcacagaggaagagtgatggtggcatgctggtggtggcgggtgctggtgggaggacagtgccaacctcctcctggggatcccatgttggagactctaaggataaggctggtgctgcccagggtgtctacaggaactgcaggtgtctacccccaagtcttccctcctcccaagccaggggtggcacagggcactagatccctggagttcaggaaccaacacaagcacaaccacgggcataagttggccttggccactgccacccacggccctccttttgtgctccatgctggcatcttcactcccctaccccttccccagccactgctgctcattcaaacttctgtccatgtccctccactgttcctatcagcaggtggcccctgggcatcagaacagcctgccctgggcaccaggtggcagacacactcagagcatgtctggctttcctggtgggtccaggctcattctgcttctgatttcccctcccccagggctcattttccccctttttcctgtacacatccctgtctacctcctctcaccctgccacagattcttcctatcacacagggatgccagttgtatttgtgggatttcacccattattaataaaacctatatttatacagtatgcaatgtgtaaaaaaaaaaaaaaaaaaaaaaaaaaaaaaaaaaaaaaaa

SEQ ID NO: 1047 - DNA, 1387 bp, human
caggaattatctatagagtaagtatgctaatcttgactaagactgcaggagttttttttaaaccatcaaaaaggaaagtttatgaatttttaagaagttttaattttcatcctgaaacactatttcttcataaaatagtattgggaattgaaactagttgtgatgatacagcagctgctgtggtggatgaaactggaaatgtgttgggagaagcaatacattcccaaactgaagttcatttaaaaacaggtgggattgttcctccagcagctcaacagcttcacagagaaaatattcaacgaatagtacaagaagctctttctgccagtggagtctctccaagtgacctctcagcaattgcaactaccataaaaccaggacttgctttaagcctgggagtgggcttatcatttagcttacagctggtaggacagttaaaaaagccattcattcccattcatcatatggaggctcatgcacttactattaggttgaccaataaagtagaatttccttttttagttcttttgatttctggaggtcactgtctgttggcattagttcaaggagtttcagattttctgcttcttggaaagtctttggacatagcaccaggtgacatgcttgacaaggtggcaagaagactttctttaataaaacatccagagtgctccaccatgagtggtgggaaagccatagagcatttggccaaacaaggaaatagatttcattttgacatcaaacctcccttgcatcatgctaaaaattgtgatttttcttttactggacttcaacacgttactgataaaataataatgaaaaaggaaaaagaggaaggtatatttctaattagtaaagttgaacagataaatattcctggattgtgcctaaaaatagctgctcatttctgcaggtatgagaaggggcaaatcctgtcttcagcagcagacattgctgccacagtacagcacacaatggcatgtcatcttgtgaaaagaacacatcgggctattctgttttgtaagcagagagacttgttacctcaaaataatgcagtactggttgcatctggtggtgtcgcaagtaacttctatatccgcagagctctggaaattttaacaaacgcaacacagtgcactttgttgtgtcctcctcccagactatgcactgataatggcattatgattgcatggaatggtattgaaagactacgtggtggcttgggcattttacatgacatagaaggcatccgctatgaaccaaaatgtcctcttggagtagacatatcaaaagaagttggagaagcttccataaaagtaccacaattaaaaatggagatatgatttctgctgttcaaaaaagtccctaaaggtagtattaaggttaa

SEQ ID NO: 1048 - DNA, 3053 bp, human
ctcggcgcgggcgccctcccggccagcggcggcagcccctcctccccggcgccctcaggaccccccagagacccccggcggcggcagcctgccttgctctgccaggaaccatgagtgaggcccgcagggacagcacgagcagcctgcagcgcaagaagccaccctggctaaagctggacattccctctgcggtgcccctgacggcagaagagcccagcttcctgcagcccctgaggcgacaggctttcctgaggagtgtgagtatgccagccgagacagcccacatctcttcaccccaccatgagctccggcggccggtgctgcaacgccagacgtccatcacacagaccatccgcagggggaccgccgactggtttggagtgagcaaggacagtgacagcacccagaaatggcagcgcaagagcatccgtcactgcagccagcgctacgggaagctgaagccccaggtcctccgggagctggacctgcccagccaggacaacgtgtcgctgaccagcaccgagacgccacccccactctacgtggggccatgccagctgggcatgcagaagatcatagaccccctggcccgtggccgtgccttccgtgtggcagatgacactgcggaaggcctgagtgccccacacactcccgtcacgccgggtgctgcctccctctgctccttctccagctcccgctcaggtttccaccggctcccgcggcggcgcaagcgagagtcggtggccaagatgagcttccgggcggccgcagcgctgatgaaaggccgctccgttagggatggcacctttcgccgggcacggcgtcgaagcttcactccagctagctttctggaggaggacacaactgatttccccgatgagctggacacatccttctttgcccgggaaggtatcctccatgaagagctgtccacatacccggatgaagttttcgagtccccatcggaggcagcgctaaaggactgggagaaggcaccggagcaggcggacctcaccggcggggccctggaccgcagcgagcttgagcgcagccacctgatgctgcccttggagcgaggctggcggaagcagaaggagggcgccgcagccccgcagcccaaggtgcggctccgacaggaggtggtgagcaccgcggggccgcgacggggccagcgtatcgcggtgccggtgcgcaagctcttcgcccgggagaagcggccgtatgggctgggcatggtgggacggctcaccaaccgcacctaccgcaagcgcatcgacagcttcgtcaagcgccagatcgaggacatggacgaccacaggcccttcttcacctactggcttaccttcgtgcactcgctcgtcaccatcctagccgtgtgcatctatggcatcgcgcccgtgggcttctcgcagcatgagacggtggactcggtgctgcggaaccgcggggtctacgagaacgtcaagtacgtgcagcaggagaacttctggatcgggcccagctcggaggccctcatccacctgggcgccaagttttcgccctgcatgcgccaggacccgcaggtgcacagcttcattcgctcggcgcgcgagcgcgagaagcactccgcctgctgcgtgcgcaacgacaggtcgggctgcgtgcagacctcggaggaggagtgctcgtccacgctggcagtgtgggtgaagtggcccatccatcccagcgccccagagcttgcgggccacaagagacagtttggctctgtctgccaccaggatcccagggtgtgtgatgagccctcctccgaagaccctcatgagtggccagaagacatcaccaagtggccgatctgcaccaaaaacagcgctgggaaccacaccaaccatccccacatggactgtgtcatcacaggacggccctgctgcattggcaccaagggcaggtgtgagatcacctcccgggagtactgtgacttcatgaggggctacttccatgaggaggccacgctctgctctcaggtgcactgcatggatgatgtgtgtgggctcctgccttttctcaaccccgaggtgcctgaccagttctaccgcctgtggctatccctcttcctgcacgccgggatcttgcactgcctggtgtccatctgcttccagatgactgtcctgcgggacctggagaagctggcaggctggcaccgcatagccatcatctacctgctgagtggtgtcaccggcaacctggccagtgccatcttcctgccataccgagcagaggtgggtcctgctggctcccagttcggcatcctggcctgcctcttcgtggagctcttccagagctggcagatcctggcgcggccctggcgtgccttcttcaagctgctggctgtggtgctcttcctcttcacctttgggctgctgccgtggattgacaactttgcccacatctcggggttcatcagtggcctcttcctctccttcgccttcttgccctacatcagctttggcaagttcgacctgtaccggaaacgctgccagatcatcatctttcaggtggtcttcctgggcctcctggctggcctggtggtcctcttctacgtctatcctgtccgctgtgagtggtgtgagttcctcacctgcatccccttcactgacaagttctgtgagaagtacgaactggacgctcagctccactgagctggctgcgggctccagcggccgtgtgctccagcaggccagagccagacacgacctccctgagcctcacaggcttacaggagtcacctgctccatgtggggactggcctgtttcctgaacacagacctctttcttgtgccttgttcacttctgttgaacccctcgtactgccgggcatttattatactacttcctgtcataaccttctaacttgtttcttgacgaccacctcatgtggccaataaatggactgggagcgttttagctgccattaacttgaaaaaaaaaaaaaaaaaaaaaaaaaaaaaaaaaaaaaaaaaaaaaaaaaaaaaaaaaaaaaaaaaaaaaaaaaaaaaaaaaaaaaaaaaaaaaaa

SEQ ID NO: 1049 - DNA, 1815 bp, human
ttgccactcggctgccggaggccgaaggtccctgactatggctccccagagcctgccttcatctaggatggctcctctgggcatgctgcttgggctgctgatggccgcctgcttcaccttctgcctcagtcatcagaacctgaaggagtttgccctgaccaacccagagaagagcagcaccaaagaaacggagagaaaagaaaccaaagccgaggaggagctggatgccgaagtcctggaggtgttccacccgacgcatgagtggcaggcccttcagccagggcaggctgtccctgcaggatcccacgtacggctgaatcttcagactggggaaagagaggcaaaactccaatatgaggacaagttccgaaataatttgaaaggcaaaaggctggatatcaacaccaacacctacacatctcaggatctcaagagtgcactggcaaaattcaaggagggggcagagatggagagttcaaaggaagacaaggcaaggcaggctgaggtaaagcggctcttccgccccattgaggaactgaagaaagactttgatgagctgaatgttgtcattgagactgacatgcagatcatggtacggctgatcaacaagttcaatagttccagctccagtttggaagagaagattgctgcgctctttgatcttgaatattatgtccatcagatggacaatgcgcaggacctgctttcctttggtggtcttcaagtggtgatcaatgggctgaacagcacagagcccctcgtgaaggagtatgctgcgtttgtgctgggcgctgccttttccagcaaccccaaggtccaggtggaggccatcgaagggggagccctgcagaagctgctggtcatcctggccacggagcagccgctcactgcaaagaagaaggtcctgtttgcactgtgctccctgctgcgccacttcccctatgcccagcggcagttcctgaagctcggggggctgcaggtcctgaggaccctggtgcaggagaagggcacggaggtgctcgccgtgcgcgtggtcacactgctctacgacctggtcacggagaagatgttcgccgaggaggaggctgagctgacccaggagatgtccccagagaagctgcagcagtatcgccaggtacacctcctgccaggcctgtgggaacagggctggtgcgagatcacggcccacctcctggcgctgcccgagcatgatgcccgtgagaaggtgctgcagacactgggcgtcctcctgaccacctgccgggaccgctaccgtcaggacccccagctcggcaggacactggccagcctgcaggctgagtaccaggtgctggccagcctggagctgcaggatggtgaggacgagggctacttccaggagctgctgggctctgtcaacagcttgctgaaggagctgagatgaggccccacaccaggactggactgggatgccgctagtgaggctgaggggtgccagcgtgggtgggcttctcaggcaggaggacatcttggcagtgctggcttggccattaaatggaaacctgaaggccatcctctttctgctgtgtgtctgtgtagactgggcacagccctgtggccggggggtcaggtgagtggttgggtgatgggctctgctgacgtgcagggctcagcccagggcatccaggaacaggctccagggcaggaacctgggcccaggagttgcaagtctctgcttcttaccaagcagcagctctgtaccttgggaagtcgcttaattgctctgagcttgtttcctcatctgtcaggagtgccattaaaggagaaaaatcacgt

SEQ ID NO: 1050 - DNA, 1372 bp, human
cgggtgctgatgcgagtcggtggcagcgaggacattttctgactccctggcccctgacacggctgcactttccatcccgtcgcggggccggccgctactccggccccaggatgcagaatgtgattaatactgtgaagggaaaggcactggaagtggctgagtacctgaccccggtcctcaaggaatcaaagtttaaggaaacaggtgtaattaccccagaagagtttgtggcagctggagatcacctagtccaccactgtccaacatggcaatgggctacaggggaagaattgaaagtgaaggcatacctaccaacaggcaaacaatttttggtaaccaaaaatgtgccgtgctataagcggtgcaaacagatggaatattcagatgaattggaagctatcattgaagaagatgatggtgatggcggatgggtagatacatatcacaacacaggtattacaggaataacggaagccgttaaagagatcacactggaaaataaggacaatataaggcttcaagattgctcagcactatgtgaagaggaagaagatgaagatgaaggagaagctgcagatatggaagaatatgaagagagtggattgttggaaacagatgaggctaccctagatacaaggaaaatagtagaagcttgtaaagccaaaactgatgctggcggtgaagatgctattttgcaaaccagaacttatgacctttacatcacttatgataaatattaccagactccacgattatggttgtttggctatgatgagcaacggcagcctttaacagttgagcacatgtatgaagacatcagtcaggatcatgtgaagaaaacagtgaccattgaaaatcaccctcatctgccaccacctcccatgtgttcagttcacccatgcaggcatgctgaggtgatgaagaaaatcattgagactgttgcagaaggagggggagaacttggagttcatatgtatcttcttattttcttgaaatttgtacaagctgtcattccaacaatagaatatgactacacaagacacttcacaatgtaatgaagagagcataaaatctatcctaattattggttctgatttttaaagaattaacccatagatgtgaccattgaccatattcatcaatatatacagtttctctaataagggacttatatgtttatgcattaaataaaaatatgttccactaccagccttacttgtttaataaaaatcagtgcaaagaaaaaaaaaaaaaaaaaaaaaaaaaaaaaaaaaaaaaaaaaaaaaaaaaaaaaaaaaaaaaaaaaaaaaaaaaaaaaaaaaaaaaaaaaaaaaaaaaaaaaaaaaaaaaaaaaaaaaaaaaaaaaaaaaaa

SEQ ID NO: 1051 - DNA, 3895 bp, human
ttaaagaaaagaaggcagcagtgaaagaatttgaagacaagaaggttgagctgaaagagaacctgattgctgagctagaagaaaagaagaaaatgattgaaaatgaaaagctgacaatggaactgactggagattctatggaggtgaaacctatcatgaccagaaagttgcggaggcgaccaaatgatcccgtccccatcccagacaagaggaggaaacctgctccagcccagctaaactatttgttaacagatgaacagatcatggaggatctgagaacattaaataagcttaagtcacccaagagaccagcatctccatcctctcctgagcacttgcctgcaacacccgcggaatctccagcccagaggttcgaagctcggatagaagatggcaaactgtactatgacaaaagatggtaccacaagagccaggccatctatctggagtcaaaggacaaccagaaactgcgctgcgtgatcagttctgtaggagccaatgagatctgggtgaggaagacaagtgacagcaccaagatgaggatctacctgggccagcttcagcgcgggctcttcgtgatccgccggcgctcagctgcttgactttctacagtgctcttctcttgaccctttttctggagtgggttttatttttgttttgtttcgttttctccttaatagaaaaatgttaacttactgggaatagctactcagccttggaaatggagagcactgcagtgaattctttagggcacttttgtggccggatgcttccaactttgtcagtcttttctgcctcaacttcttccagacatcagtcaccatgagactgttttactttcaggcgtattggggggtttgatttactttccttttatttctttattttttgcttatacttgtttttgaaaacctcctctgagtttgaagggacagctatttttattgattatctttaagtctctctaccatggagaagagcaggaagggatacactctccagtgcattttcatgttttgaatctgattagtggatcacgtagctactttccctgtcgcgtccaattcactatttgcccagaagcttggggcagaggtcctagcaggagatgatgaattctcgtggctctcggccttctcagagaaataaatgctttgtgtaacatctgtgcacaccatccattccgctcgctgagcgatggaaaagcttgcctggaagactatgtgcactgaagtaaatggggttgggggaggggacatttcatatttataatgtgctgaaggtaccatattttaaatgttatttaatgcaggtgatttattcaaacatttgttctagcttaagctggaataagcagtggtcatttcagaagttttcatttgtaattccttcctctcccttgttcccaagtaggtagtagtaagtatgtgccacaggctgattatctgggtaatcttttacgggtgggaggtgagattgatagtgcaataatcagtgatctatagaccctcatgcacgattcaagtttcactcttgtggctgatgccattattgcacattggccattccaaacctgtgggaactttgttgtcaggccctgagcgctcacagcttcatttggcccaggttgaagacaaggaaagctctgctgtggctgcctctggactgacaccctccctaatgagtcctgatgaaacagcctttcctacatccttccctcactcccatgattggagaaatgattcattgggtgatgagtgttggggttttctatactcatgttgccatcttgagatgttcaaaaaatttggggttagagcaactgttagcgtctctatgagcaatcagtagaacttacacatcctaggaaatctttctttgtaagtaattcttttggtctcaagtgattctcttcatgttgtctcttgatgtacatacccccaagcaagttggggggactgtgatgacaattaaatcaccttctctgaagttctggctctgcagagaccaaaccttactgacttgtacagacttgtacaagtaaagacttatacagatagatttttgttttaacttacaatccgttttttcctctttttttttttttttttttctggtgttggagtcttatttagaaaacaggataaatgacgctgttatcaaaagttgcctggggttctgtatttcttctctgccctccaatccccgactgctatgatgtttactacagtgaacccagcccatggtaaacacaggcttcacctgttcgtgtttgttagccttgactgtgaggcaggacttccctcgcttgaactgttacacatacgatgtgtgtgtcacatcacatattgtgcagctgttggttttcatgtagtgccctgcgatggaaattagatatatttcatgtatttttccattgaaggtggagtttttcaatgatcatgtgttttgtcctcctaaacagtataccaaagtttgtttttatagttgaggattgtattgataaccactggggttccgcattgaagcaggaacatattgcctctttttctggccttctctgtgggacctctgcttttgtgaagcaactatttatttgaagaccagggtatgggcacttttgccttctctcctctctgacttttgagggtattgagggcgcccttagtcatagtctcgactccgccattgccttctcctcggcgtcctcacaactcttaattgggcctagtgaaaatgggggcaggtgagaagtccattttgagaatcagcatagtaaattacatttctaatcccagaggacttaatattttcttttgtcaccccagaggtgaaaaatcagcagttgaagcctgacaggcctcagtggtgaccaggaacagaagcagccttcctgttagtagatgggggtacttctgtggtgggcagaagccttactaaaggggaagacagactttgaagtttctagacgagaaggaggcttgcttctagcctgggtggccattattccaaaaggtcattgtttctcactagaccccagggcaccagatgaatttccaagtttaaactctttcctgcaggtgattactttgaaaaaggttggtccagaccattttgatcaagaacctgtatatgtgttgtgttagaggcatctgcctcaagtctatgtacagtgtttgctgcgggtgtgttccaatattcattttacctctgcttgggggttttgtgtgttcccctccccccatgccctgcctacccccttttccctgaaccacgtccttttgaataatttccagatggatttctgtagccataccaaagccagggtgttttcattcatgcggatactagtatttatagatgtctgactacctaacttaatttttgtttttgaacttctaattggggccagtgtaaggtcgatcccagaggctgatctgcaaatcaagctacatgtatttgtgtataagaccctgtgttcaggactgggtgacttttctaagaaatatggggtttagaatggggttgactgtattttttaacctaattctggagagaagattgtattttttacagttttttgggtttggcttccttctcacatttctttagctttgaatttttactaaataaatttcctcctgattaattttttttttctcatctgggaatttgaaatctcggtgcttactgttacaccaatttgtccaaagagttgaaatcactttaatgccagaacatggtaaatttgcagccatttcaagcaggtgatggtctttttttataacatcgttaacgggtaccattaaatattctgagaggtgaatgtaaaatataaaaggtataggtttttttttttttttaaagaaaacaataaactttcaaagagaaaacc

SEQ ID NO: 1052 - DNA, 6282 bp, human
cacgaggcctcgtgccgcgtccatttgaacgtctcgcacgccttcctgccattagcactcgagcccgctgctgttgcccgttcttcctccggaatacgggagggagagggaatgataagctgctgcggcccaagagtcactgtgaaggaccccgccgctgccctcgggcctcctcggcccctgcgcctccggggagcagccggggctcgccgcgcctgacgcgtcccgagttatacagaaataatgttgatatttggaacccatgtcgaacttctatgaagaaaggacaacgatgattgcagcaagggatttgcaggaatttgttccttttggtcgagaccactgcaagcaccaccctaatgctttgaaccttcaacttcgccagctgcagccagcttctgaattatggtcttctgatggtgctgctggcttggtgggatcccttcaggaggttacaatccacgagaaacagaaggaaagctggcagttaaggaaaggagtaagtgaaattggagaagatgtggactatgatgaggaactctatgttgctggaaatatggtgatatggagcaaaggaagtaaaagccaggcattggcagtttataaagcatttacagttgacagtcctgttcagcaggcattgtggtgtgacttcattatatcacaggataagtctgaaaaggcctacagtagcaatgaagtagaaaaatgcatatgtatattgcaaagctcatgtattaacatgcatagcatagaaggaaaggattacatagcttcattaccatttcaggttgcaaatgtttggcccactaaatatggattgctgtttgaacgaagcgcttcttcacatgaagtacctccaggttcacccagagaacctttacctactatgttcagcatgctgcacccactagatgaaataactccacttgtttgtaaatctggaagtctttttggttcatcacgggtgcaatatgttgtagatcatgcaatgaaaattgttttcctcaatactgacccctctattgtaatgacttatgatgctgttcaaaatgtgcattctgtgtggactctccggagagtcaaatcagaggaagagaatgttgttttaaagttctctgaacaggggggaaccccacagaatgtggccactagcagctccctcacagcacatctcagaagcctctccaaaggagattcccctgtgacttcacctttccagaattactcctccattcacagccagagtcgctcaacctcatcacccagtctacattctcgctcaccttctatttccaacatggcagctctaagtcgtgctcattctcctgcgttaggagtgcactctttttcaggggtgcaaaggttcaacatttcaagccataatcagtctccaaagagacatagtatttctcattctccaaatagtaattctaatggctcctttcttgcaccagaaacggagccaattgttcctgaactgtgtattgaccatttgtggacagaaacgattactaatataagagagaaaaattcacaagcctcaaaagtgtttattacatctgacctatgtgggcaaaagttcctgtgctttttagtagagtcccagctccagttacgctgtgtaaagtttcaagagagtaatgataaaacccagctcatctttggttcagtgaccaacataccagcaaaggatgcagcaccagtggagaaaatagacaccatgctggtcttggaaggcagtggaaacctggtgctatacacaggagtggttcgggtgggaaaggtttttattcctggactgccagctccctctctgacgatgtccaacacaatgcctcggcccagtactccactagatggcgttagtactccaaagcctcttagtaaactccttggatcattggacgaggttgttctgttgtccccagttccagaactgagggattcttcaaaacttcatgattctctctataatgaggattgtactttccaacagcttggaacttacattcattctatcagagatcctgtccataacagagtcaccctggaactgagtaatggctccatggttaggatcactattcctgaaattgccacctctgagttagtacaaacgtgtttgcaagcaattaagtttatcctgccaaaagaaatagcagttcagatgcttgtcaagtggtacaatgtccacagtgctccaggaggacccagttatcactcagagtggaatttatttgtgacttgtctcatgaacatgatgggttataacacagaccgcttagcatggactagaaattttgactttgaaggatcactttctcctgtcattgcgcccaaaaaagcaaggccttccgagactggatctgatgatgactgggaatatttactaaattcagactaccaccagaatgttgagtctcatcttttgaacagatctttatgtctgagtccttcagaagcttcacagatgaaggatgaggatttttcacagaatctcagtctggattcttctacacttctctttactcacatacctgcaatttttttcgttcttcaccttgtgtatgaggagcttaagttgaatactctaatgggagaaggaatttgttcacttgttgaacttctcgttcagttggcaagggacttaaaattggggccttatgtagatcattactatagagactacccaacgcttgtcagaactactggacaagtgtgcacaattgatccaggtcaaacaggatttatgcatcatccatcattttttacgtctgagccaccaagtatttatcagtgggtgagttcttgtctgaagggtgaaggaatgccaccttatccttacctccctggaatctgtgaaagaagcagacttgtagtcttgagtattgcactgtacatacttggtgatgagagcttggtttctgatgaatcctcacagtatttaaccagaataactatagccccccagaagttgcaagtagaacaagaggaaaacaggtttagtttcaggcattctacatctgtttctagtctagctgaaagattggttgtctggatgactaatgtaggattcactttaagagatttggaaactcttccctttggaattgctcttcccatcagagatgcaatttatcactgtcgtgagcagcctgcctcagactggccagaagctgtctgtctcttgattggacgtcaggatctttccaagcaggcctgcgaaggaaacttacccaaagggaagtctgtgctctcatcagatgttccttcaggaacagaaactgaggaggaagatgacggcatgaatgacatgaatcacgaggtcatgtcattaatatggagtgaagatttaagggtgcaggatgtgcgaaggcttcttcagagtgcgcatcctgtccgtgtcaacgtagtgcagtacccagagctcagtgaccacgagttcatcgaggaaaaggaaaacagattgctccaattgtgtcagcgaactatggctcttcctgtaggacgaggaatgtttaccttgttttcgtaccatcctgttccaacagagccattgcctattcctaaattgaatctgactgggcgtgcccctcctcggaacacaacagtagaccttaatagtggaaacatcgatgtgcctcccaacatgacaagctgggccagctttcataatggtgtggctgctggcctgaagatagctcctgcctcccagatcgactcagcttggattgtttacaataagcccaagcatgctgagttggccaatgagtatgctggctttctcatggctctgggtttgaatgggcaccttaccaagctggcgactctcaatatccatgactacttgaccaagggccatgaaatgacaagcattggactgctacttggtgtttctgctgcaaaactaggcaccatggatatgtctattactcggcttcttagcattcacattcctgctctcttacccccaacgtccacagagctggatgttcctcacaatgtccaagtggctgcagtggttggcattggccttgtatatcaagggacagctcacagacatactgcagaagtcctgttggctgagataggacggcctcctggtcctgaaatggaatactgcactgacagagagtcatactccttagctgctggcttggccctgggcatggtctgcttggggcatggcagcaatttgataggtatgtctgatctcaatgtgcctgagcagctctatcagtacatggttggaggacataggcgctttcaaacaggaatgcatagggagaaacataaatcaccaagttatcaaatcaaagaaggagataccataaatgtggatgtgacttgtccaggtgctactctagctttggctatgatctacttaaaaaccaataacagatctattgcagattggctccgagcccctgacaccatgtatttgttggactttgtgaagccagaatttctcttgcttaggacacttgctcgatgcctgattttgtgggatgatattttaccaaattccaagtgggttgacagcaatgttcctcaaattataagagaaaatagtatctctctcagtgaaatcgaattgccgtgctcagaggatttgaatttggaaactttgtcccaagcacatgtctacataattgcaggagcctgcttgtctctgggttttcgatttgctggctcagaaaacttatcagcatttaactgtttgcataaatttgccaaagattttatgacttatttgtccgcacctaatgcttctgttacaggtcctcataacctagaaacttgtctgagcgtggtgctgctgtctctcgccatggtcatggctggctcaggaaacctaaaggttttgcagctttgtcgcttcttacacatgaaaacgggtggtgaaatgaactatggttttcacttagcccaccacatggcccttggacttctatttttgggaggaggaaggtactctttgagcacatcaaattcttccattgccgctcttctctgtgccctttatccgcacttcccagctcacagcactgacaaccggtatcatctccaggctctccggcacctctatgtgctggccgcggagcccaggcttctagtgcctgtggatgtggacacaaacacgccctgctatgccctcttagaagttacctacaagggcactcagtggtatgaacaaaccaaagaagaattgatggctcctacccttcttccagaactccatcttttaaagcagattaaagtaaaaggcccaagatactgggaactgctcatagatttaagcaaaggaacacaacacttgaagtccatcctttccaaggatggggttttatatgttaaactccgggcgggtcagctctcctacaaagaagatccaatgggatggcaaagtttgttggctcagactgttgctaacaggaactctgaagcccgggctttcaagccagaaacaatctcagcattcacttctgatccagcacttctgtcatttgctgaatatttctgcaagccaactgtgaacatgggtcagaaacaggaaattctggatctcttttcttcagtactctatgaatgtgttacccaggagaccccagagatgttgcctgcatacatagcaatggatcaggctataagaagacttgggagaagagaaatgtctgagacttctgaactttggcagataaagttggtgttagagtttttcagctcccgaagccatcaggagcggctgcagaaccaccctaagcgggggctctttatgaactcggaattcctccctgttgtgaagtgcaccattgataataccctggaccagtggctacaagtcgggggtgatatgtgtgtgcacgcctacctcagcgggcagcccttggaggaatcacagctgagcatgctggcctgcttcctcgtctaccactctgtgccagctccacagcacctgccacctataggactagaagggagcacaagctttgctgaactgctcttcaaatttaagcagctaaaaatgccagtgcgagctttgctgagattggctcctttgcttcttggaaatccacagccaatggtgatgtgaccgtgtctggcggtgaacctaccctgaaacgtgacttctgcacaacaaacgtgaccaaacatcaaagctaaagcaatgtttataaagttttatggtataactagggggaaatgagctgcacaaacctcaatgtattttaaatctgttgctgtcatcattaacggtatatgacatataaaagcaag

SEQ ID NO: 1053 - DNA, 2468 bp, human
accgggcaccggacggctcgggtactttcgttcttaattaggtcatgcccgtgtgagccaggaaagggctgtgtttatgggaagccagtaacactgtggcctactatctcttccgtggtgccatctacatttttgggactcgggaattatgaggtagaggtggaggcggagccggatgtcagaggtcctgaaatagtcaccatgggggaaaatgatccgcctgctgttgaagcccccttctcattccgatcgctttttggccttgatgatttgaaaataagtcctgttgcaccagatgcagatgctgttgctgcacagatcctgtcactgctgccattgaagttttttccaatcatcgtcattgggatcattgcattgatattagcactggccattggtctgggcatccacttcgactgctcagggaagtacagatgtcgctcatcctttaagtgtatcgagctgatagctcgatgtgacggagtctcggattgcaaagacggggaggacgagtaccgctgtgtccgggtgggtggtcagaatgccgtgctccaggtgttcacagctgcttcgtggaagaccatgtgctccgatgactggaagggtcactacgcaaatgttgcctgtgcccaactgggtttcccaagctatgtgagttcagataacctcagagtgagctcgctggaggggcagttccgggaggagtttgtgtccatcgatcacctcttgccagatgacaaggtgactgcattacaccactcagtatatgtgagggagggatgtgcctctggccacgtggttaccttgcagtgcacagcctgtggtcatagaaggggctacagctcacgcatcgtgggtggaaacatgtccttgctctcgcagtggccctggcaggccagccttcagttccagggctaccacctgtgcgggggctctgtcatcacgcccctgtggatcatcactgctgcacactgtgtttatgacttgtacctccccaagtcatggaccatccaggtgggtctagtttccctgttggacaatccagccccatcccacttggtggagaagattgtctaccacagcaagtacaagccaaagaggctgggcaatgacatcgcccttatgaagctggccgggccactcacgttcaatgaaatgatccagcctgtgtgcctgcccaactctgaagagaacttccccgatggaaaagtgtgctggacgtcaggatggggggccacagaggatggagcaggtgacgcctcccctgtcctgaaccacgcggccgtccctttgatttccaacaagatctgcaaccacagggacgtgtacggtggcatcatctccccctccatgctctgcgcgggctacctgacgggtggcgtggacagctgccagggggacagcggggggcccctggtgtgtcaagagaggaggctgtggaagttagtgggagcgaccagctttggcatcggctgcgcagaggtgaacaagcctggggtgtacacccgtgtcacctccttcctggactggatccacgagcagatggagagagacctaaaaacctgaagaggaaggggacaagtagccacctgagttcctgaggtgatgaagacagcccgatcctcccctggactcccgtgtaggaacctgcacacgagcagacacccttggagctctgagttccggcaccagtagcaggcccgaaagaggcacccttccatctgattccagcacaaccttcaagctgctttttgttttttgtttttttgaggtggagtctcgctctgttgcccaggctggagtgcagtggcgaaatccctgctcactgcagcctccgcttccctggttcaagcgattctcttgcctcagcttccccagtagctgggaccacaggtgcccgccaccacacccaactaatttttgtatttttagtagagacagggtttcaccatgttggccaggctgctctcaaacccctgacctcaaatgatgtgcctgcttcagcctcccacagtgctgggattacaggcatgggccaccacgcctagcctcacgctcctttctgatcttcactaagaacaaaagaagcagcaacttgcaagggcggcctttcccactggtccatctggttttctctccaggggtcttgcaaaattcctgacgagataagcagttatgtgacctcacgtgcaaagccaccaacagccactcagaaaagacgcaccagcccagaagtgcagaactgcagtcactgcacgttttcatctctagggaccagaaccaaacccaccctttctacttccaagacttattttcacatgtggggaggttaatctaggaatgactcgtttaaggcctattttcatgatttctttgtagcatttggtgcttgacgtattattgtcctttgattccaaataatatgtttccttccctcaaaaaaaaaaaaaaaaaaaaaaaaaaaaaaa

SEQ ID NO: 1054 - DNA, 2161 bp, human
actttcccctctccgtctcctgcgggcgcaatggaggaggaggatgaggaagcgcgggcgctcctggcaggcggccctgacgaggccgacagaggtgccccggccgcccctggagccctgccggccctctgcgaccccagtcgcctggcgcaccggcttttggtgctgttactgatgtgcttccttggctttggcagctatttttgctatgataatcctgctgcccttcagactcaagttaaacgagatatgcaagtgaataccacgaaattcatgctgctgtatgcctggtattcttggcccaatgtagttttgtgtttctttggtggctttttgatagaccgagtatttggaatacgatggggcacaatcatttttagctgctttgtttgcattggacaggttgtttttgccctgggtggaatatttaatgctttttggctgatggaatttggaagatttgtatttgggattggtggcgagtccttagcagttgcccagaatacatatgctgtgagctggtttaaaggcaaagaattaaacctggtgtttggacttcaacttagcatggctagaattggaagtacagtaaacatgaacctcatgggatggctgtattctaagattgaagctttgttaggttctgctggtcacacaaccctcgggatcacacttatgattgggggtgtaacgtgtattctttcactaatctgtgccttggctcttgcctacttggatcagagagcagagagaatccttcataaagaacaaggaaaaacaggtgaagttattaaattaactgatgtaaaggacttctccttacccctgtggcttatatttatcatctgtgtctgctattatgttgctgtgttcccttttattggacttgggaaagttttctttacagagaaatttggattttcttcccaggcagcaagtgcaattaacagtgttgtatatgtcatatcagctcccatgtccccggtgtttgggctcctggtggataaaacagggaagaacatcatctgggttctttgcgcagtagcagccactcttgtgtcccacatgatgctggcctttacgatgtggaacccttggattgctatgtgtcttctgggactctcctactcattgcttgcctgtgcattgtggccaatggtggcatttgtagttcctgaacatcagctgggaactgcatatggcttcatgcagtccattcagaatcttgggttggccatcatttccatcattgctggtatgatactggattctcgggggtatttgtttttggaagtgttcttcattgcctgtgtttctttgtcacttttatctgtggtcttactctatttggtgaatcgtgcccagggtgggaacctaaattattctgcaagacaaagggaagaaataaaattttcccatactgaatgagaagttaaaatgaatgtgtcatgagaatgggcttaacacatcgttggtttgaaaacttccatttttaaaaatttagagtttagtcattagaaaaaataatggactggaaagttatatttatatccaaatatacctatttcaaagtgtatttgtgaggcctgttttagcctgtgtcttttgtattgtgtgttgctaaagaattctacttttagtaggctaatcaacaatgaaagggttagaaaattgctgtggaacatccaggtgaacttcaggaaagacagtgaaaaatggaaaacgttggagcttctgttgagataatcttcattaggtatatatcttagggatacagccttttctttatcttatagcaggaaaaaaaaacttttgagggaaatagaagggctgcgttacacaaaataaacaatggcattgtcataggccttccttttactagtagggcataatgctagggaatatgtgaagatgtttttatgaagtctctttctgatcacgaacaatagcttgcgctctactctgtagttatgtggattgccgagcaatgacccttttcaatttcttatttctgtgttactgaggaccctaatcacttagggatgtaattttatagtataaactttctgtacagtttttcttatagtctaataagtaaaaagtgtccttcaaattatgataattgcctatgtacatggataaattaaaacactgcacacgg

SEQ ID NO: 1055 - DNA, 1477 bp, human
gtggattttagagatacctcccctccttctgctcagctgccttgcagtaattaaactctttctctgctgcaacacccctactgttctccgtgtattggcttttctgggcagcaggaaggaaaagctgatgcgatgctctcagtgccgcgtcgccaaatactgtagtgctaagtgtcagaaaaaagcttggccagaccacaagcgggaatgcaaatgccttaaaagctgcaaacccagatatcctccagactccgttcgacttcttggcagagttgtcttcaaacttatggatggagcaccttcagaatcagagaagctttactcattttatgatctggagtcaaatattaacaaactgactgaagataagaaagagggcctcaggcaactcgtaatgacatttcaacatttcatgagagaagaaatacaggatgcctctcagctgccacctgcctttgacctttttgaagcctttgcaaaagtgatctgcaactctttcaccatctgtaatgcggagatgcaggaagttggtgttggcctatatcccagtatctctttgctcaatcacagctgtgaccccaactgttcgattgtgttcaatgggccccacctcttactgcgagcagtccgagacatcgaggtgggagaggagctcaccatctgctacctggatatgctgatgaccagtgaggagcgccggaagcagctgagggaccagtactgctttgaatgtgactgtttccgttgccaaacccaggacaaggatgctgatatgctaactggtgatgagcaagtatggaaggaagttcaagaatccctgaaaaaaattgaagaactgaaggcacactggaagtgggagcaggttctggccatgtgccaggcgatcataagcagcaattctgaacggcttcccgatatcaacatctaccagctgaaggtgctcgactgcgccatggatgcctgcatcaacctcggcctgttggaggaagccttgttctatggtactcggaccatggagccatacaggatttttttcccaggaagccatcccgtcagaggggttcaagtgatgaaagttggcaaactgcagctacatcaaggcatgtttccccaagcaatgaagaatctgagactggcttttgatattatgagagtgacacatggcagagaacacagcctgattgaagatttgattctacttttagaagaatgcgacgccaacatcagagcatcctaagggaacgcagtcagagggaaatacggcgtgtgtctttgttgaatgccttattgaggtcacacactctatgctttgttagctgtgtgaacctctcttattggaaattctgttccgtgtttgtgtaggtaaataaaggcagacatggtttgcaaaccacaagaatcattagttgtagagaagcacgattataataaattcaaaacatttggttgaggatgccaaaaaaaaaaaaaaaaaaaa

SEQ ID NO: 1056 - DNA, 2760 bp, human
caaaagctcggcatggctgacgacgcgggtttggagaccccgctgtgttccgagcagttcggctccggggaggcacggggctgccgcgccgccgcggacgggagcctgcagtgggaggtcgggggctggcgctggtgggggctctccagggccttcacggtcaaacctgaaggacgagatgcgggcgaagtgggggcttccggggccccctcaccgcccctctccgggctccaggccgtgttcctgcctcagggcttccctgatagcgtcagcccggactacttgccctaccagctgtgggattccgtgcaggcgtttgcttccagcctctccggctccctagccacccaggcagtcttgctgggcataggggtggggaacgcaaaagccactgtttcagctgccacggccacctggctcgtgaaagattcaactggcatgctgggccgcatcgtctttgcctggtggaaagggagcaaactggactgcaatgccaagcagtggaggctttttgcggacatcctcaatgacgtagccatgttccttgagattatggctcctgtatacccaatctgtttcaccatgaccgtctccaccagcaacctagccaagtgcatcgtgagtgttgctggtggggccactcgggctgccctgaccgtgcaccaggctcggaggaacaacatggctgacgtgtcagccaaggacagcagccaggagacgctggtgaacctggcggggctcttggtcagcctcctgatgctccctctggtgtcaggttgccctggcttcagccttggatgtttcttcttcctcactgccctccacatctacgccaactaccgcgcggtccgagccctggtcatggagaccttgaacgaaggccggctccggctggtcctgaagcactaccttcagaggggagaggtactcgacccaactgcagccaatcgcatggagccgctgtggacaggtttctggccagctccgtctctatccctgggggtccccttacaccgcttggtctccagtgtctttgagctgcagcagctggttgaggggcaccaagaatcctacctcctctgctgggaccagtcacaaaaccaggtacaggtagttctgaaccagaaggcaggccccaagaccatcctaagggccgccacacatgggctgatgcttggggccctgcagggagatggaccccttccagcagagctggaggagctgaggaaccgggtgcgggcaggtcctaagaaagagagctgggtcgtcgtcaaggagacacacgaagtgttggacatgctgttcccaaagttcttgaaaggactgcaggatgccggctggaagaccgagaagcaccagctagaggtgggtgagtggagggccacatggcttctgtctcccgaaaagaaggtcttgtgagcagcccagacggaggcccaagcccagggcaggaacctggagcaaggacactttggccacagcaggacaggggaaaggcagctttatttttccttagggcaactgcagcgggtgggccaggccctcatgggaagtgactgccaatcagatgcagtgggccccaggcagaggaaggccgggagaaggggagccaggaccttctcaccccactgccccttccccttttctggggagcaccgcaggctcctcacccccacttcctgtgaggctgtggcttatggtgtccaacgcagttggtcttaggcatagaagccccagaggaacacggccactgccatcatgagcagggcattgaggttgaccacacgggcccagctcgggtcctcgctgatgtcctccagccgcctggctgctgccgctgcctcctcctgggtaaggggcggaggactgcccaccccacctctgctcattccacaaaaccagagcaggcactggcggaagaggcttggtgccggggcctggggctctgagggaaattgaggccctgcagttagtttgcgggaactcagctcctccagccccacctcccagcatggtgccctaccattcatctccatggcactctctgggcacccattctgtacagggagtgaggagccttgctgctcatcagcatccaggtcctcccgttcctccttgctatgccggagactgaagaccaggcggtggagctggggagggtgggagcacgaacgaggtgggagttctgtccccccatgcctggccctaaagtctcttgcacaccagctcgtcactgcctgccctacccacctctgtccagtctacacacccagcccaggcttaactcatgccaactccaccctacatggctgccctgtgccctcgggataaaccccaagcccctgagcttgtgtttaaagccgttggccttgctcccccagctttgtcagctcaggtctgtctacacccagatggtagcgcttgtgacactggcctggcagtcctgctcacagtgttctgtgcctgtgtgctcccaccctttcctcctgctgctgcagaaacccggccatccttccacacccagatctcttgtcctgtcctcaccccaccctgccaccatcagccctgcctggagccacctgccctttggcaacaaaaccaaacctttttgtgggcgttcaagatggtattgtgcccaccagtcagatcctgtgttttgagtcccaaaggccatgccaaggattggctttgggaggctttaatcaccaacccatcaacatcaagcctcccccaggccggttcaaataaatgtatttaaat

SEQ ID NO: 1057 - DNA, 4430 bp, human
cggcggagtggcgagaggcgagaggcggcggaggcggcggagctggggggggtgggaggggggggagagtgagtgagtggcagagtgagtttacccctatgagactgtgagaggcccggggcctacctcaaaggagcggggtcgcgaagctagctagcagcggcccccctccaggtccccgggcccggcggcgcggcggcggcttggttgtgaagaggcggggaagcgggtgtccggtccccgccatggagggcatggacgtagacctggacccggagctgatgcagaagttcagctgcctgggcaccaccgacaaggacgtgctcatctccgagttccagaggctgctcggcttccagctcaatcctgccggttgcgccttcttcctggacatgaccaactggaacctacaagcagcaattggcgcctattatgactttgagagcccaaacatcagtgtgccctctatgtcctttgttgaagatgtcaccataggagaaggggagtcaatacctccggatactcagtttgtaaaaacatggcggatccagaattctggggcagaggcctggcctccaggggtttgtcttaaatatgtcgggggagaccaatttggacatgtgaacatggtgatggtgagatcgctagagccccaagagattgcagatgtcagcgtccagatgtgcagccccagcagagcaggaatgtatcagggacagtggcggatgtgcactgctacaggactctactatggagatgtcatctgggtgattctcagtgtggaggtgggtggacttttaggagtaacgcagcagctgtcatcttttgaaacggagttcaacacacagccgcatcgtaaggtagaaggaaacttcaacccttttgcctctccccaaaagaaccgacaatcagatgaaaacaacttaaaagaccctgggggctccgagttcgactcgatcagcaaaaacacatgggctcctgctcctgacacatgggctcctgctcctgaccaaactgagcaagaccagaatagactgtcacagaactctgtaaatctgtctcccagcagtcacgcaaacaacttatcagtagtgacttacagtaaggggctccatgggccttaccccttcggccagtcttaaacgggtgtcagcaagaagaaaaattaacaaaagacagaaggcctgactttggggggttagggcaaggggttcctctggattgcagaccacatcgcacagacccctggctctgaccccctctcatcccggaagaagaggaagaagcagaacagactagttttgagtaaactcagtatgcatgtgtgaatgctgaatcacaggaatggtgttgaggctaccaagaagaaatccatgcagccactttgggttttgttataggcatcagtctaacaagtcattaggtcactcgggaagggggaaaaagtttaaaatgggggaaaaaaagccatctttttaaacaaaaattattttgcctacagaaaggttgtagttttgagcacatgttaatttttttccctctttccccacttttatttttttaaataagggataacatattctttatagaatagtgcttgttctggaagagattcaggtgaaaagttggcgtggcatgtttgaggactctgcggatcagtgctacaggagtacatctgccctgccacatgactccagaagtctctgaccccatttgtttttaatggcatcagccaatgagttatcacccttttcctcctcttttctctttaatcttctgttgatttacacctttgacatttgtattcgtcaaccctgtggcttgttagcatcagaacctctctgaagaccaaacttccctgtgtggccagcagaggaagccttgaggatagatctcgggtgacgtgggattttctaagcctgagaggtgtccttctgcacacccttgtaacaattaaaattgcttttcttccatgtttctcttggcagagagaaatgccatcatgcttactgctcttttggattcttcatgcagtggcttcccatttgctctgggaacagtgcctctgtgctggttatatgtatgcaccacatgtgcacacacgggtgtcggtgcaactcaccagcaggtgtgcagtaggcaagcttgaaggtggcccatgcttctctgttgtcacacaacacctttccctgtttctcttcagttgtcctctgatattttcacagcctgttagtggcggctgatctgtagaggtatgaaaatacagccccaaagggggaatttgtcatggggaagggccagccactgactacttgatcttggagaccacatttagatggaaatgagaggacctccacagccccgcctccctgccaggatgctagattattggctgggaggtgggcaagtggcagcccagctgaagcaagaggctgattgactggctgctcactcaggcaggtggcctgccctggcatcctgtagattctgagcaggttgagatgtggatatctccatgggaagcttgaaccaggctagaacagctgtctgccaaagatacaagaatatgcaaagtccctcttacccccctccttccctcaagtcttagttggtttgagagccagggatatggatccagggtgctgttgcagggtcacctgcctgttaccacacccccatccagctgggtggtgggtgagggtgtgagacaggcagggagaccaggtaatgagtggctgcaaggagtcatatagcctgggtgtgggtgagggtctgcctgcctgtttctgtctgggtgtctgagttccaaaaaatgtgtgttgtttgttcctcctcatcctcttctgagactgttgtttttttagagcttgattgtgggagaaaagcttgtgtgaaattccctcttcacctccccaccccccaaaaaataaaagggggcataaactttattccactggagaagccctgggggtggctggagccagcctgctgagaagcgtggtgcagctgggtctgggacttcactagagcttactctggagcacctattttctgtgcacatgggagtgctccactccctagcagagcagagggaagtctctgccaggtacccacgccacaggcctcaggatggctttttgtctgagggcctcattaggcccagactgctgctgctggtaccagtctcctgagacactgcctccctggagcccatgcatgcccagctgttcttactgcttagtagccttgaagcagcacatctccactgtccctggcaggattgtgggaggcttcacaacccctgctttcctgacttcctcttctgcccaacactgggtgccccttcccagtttcccagcaggggcttcatgggccaccgtcagtgggtctgggcctgccagagtcgtcttgctcttcctcttgcttctaggcaaccacacttggcaagttaaatgtcccaagcaccttgtctcccttcccaagaacaaaccatttctgtgcacatccttggaggcgagatgagctccttgcagagggccagagtaagtgcaagtcatggagtgcaggcagaggggtccatggcttccccagcccagggagggtatcagtatcattcattctctctcccctcactggtatgggttcagagcaatgcctagggcccctctctgctcccctgcctagtggggtggtagtggctacctctcagccccaatagtccctgctcctcttagaatcttcaccaagtggcaggccacctctgggcaggaccacctgcgtctggcacccaggaggtgaggcagacaccatggttaggtgatagggtctgaacccagttggggagacagaggggttcagacttgggaagaatctgtcagtgtgcatggagtgaggtgtgtgtgtgtggatggatgtgcacgtgtgcatgctttttttctttttgccgtgaggacagttgaatttggggcatttttctacaagaagcagtcagccttctctcccccataaggactggctgtaaccttaagcccatcaaagttacttccagcctggagagaacctcaccaaacagctggtgtggcctgagggtggccatggtgggaaatgggcatgagaataaatacctccccaaattcaatctgagcccagcaggagaggatggtagggttgccagggctcagaagtgcaagctgattactcaccccaccctgcctcgccgcacctttcctttgtttccttgggtgaatgcaggagcagcagtggctgcccttcccacctggacagtggtgtgtgtagaaagccagctggatgtttgtggtggggcctcatggtgcctaggaggagataaagatgaggaggtttttccttattgtataaatgaatatttgtatgattaaattaacacacacaccaaaaaaaaaaaaaaaaaa

SEQ ID NO: 1058 - DNA, 2308 bp, human
aagcgtcgcacagcgactgcatcaccatggagccgagggcagtaggtgtctccaaacaggacatacgtgaacaaatttggggctacatggaatcacaaaatttagctgactttccccgacctgttcatcacaggatacccaactttaaggggtcttatctggcttgccaaaacatcaaagacctagacgtttttgccagagcacaggaagttaaagtggaccctgataaaccactggaaggcgttcggctgctggtgctgcagagcaaaaaaacattgttggttccaacaccacgactgagaacgggattgtttaataagatcacaccaccccctggggcaactaaagacatcttgagaaaatgtgccacctctcagggtgtgaggaactacagtgtccccataggcttggactccagagtcctcgtggatttagttgtggtgggatccgtcgccgcttctgaaaaaggctggagaatcgggaagggagaaggctacgccgatctggaatatgccatgatggtatccatgggcgccgtcagcaaggagacgccggtggtcaccatcgtccacgactgccaggtcgtggacatccctgaagagcttgttgaggagcacgacatcactgtggactacatcctcactccaaccagagtcatcgccacaggctgcaagcgcccaaagccaatgggaatcacctggttcaagatcagcctggagatgatggagaaaatccccatactgaggagcctccgcgcccgagagcagcaggctgggaaggatgtcaccctccagggtgagcaccagcaccttccggaaccaggctgccagcagacagtgcccctgagtgttggcaggaggcccccggacacacccggaccagaaaccaattccatggaggcagcccctggctccccaccaggggagggtgccccgcttgcagccgatgtttacgttgggaacctcccccgggacgcccgtgtgagtgacctgaagagagccctgcgggaactcggctccgtgcccctgcggctcacctggcagggcccgcggcgcagagccttcctccattacccggactctgccgcagccagcaggccgtctcctgcttgcagggcctgcgcctgggcaccgacaccctgagggtggcgctggccaggcagcagagggacaagtgacctcgtggacagccacggagctcactgcagactcgccatccccgtcccctgccgctccggttccgatggcactcgagaggcctgcgtggcaagacgtgtcggagccaccgcctgagctgctcgggtctcaattcttctcagaagtcaccgctcagtgaacgcccaggccctcctgtgagtggggaagccgccctgcggttcatctcacagcgcgcagagactgcagcctcccaatcgtgcaggctcgggccttgagtcggtttctgtttctctggagggacagagcagaggggccagggactgagtgagtggctaagcaggggagggtgatgtgaaggtgatctcgagtttgccaggggtgggctgaacaggagaagatgaacaaaggatccggctctcaaaaggccctggcagggactggatgctgggtacagaagcgcgcccttgggcttcaggctcctgagctggcagcacggcagggagagctccatccatgtcgcaggagcccaggaagctcagcccctgggtaaaaagtgctcactgcagctcagatcagtcctcaggtcacatttcggggagccagcctcccctcttcccctccccagccccgctcctccctctgtggacacactccgggccctcagccagctggctgcatgaggagcagctttgtgctgtgggagagaccggctctgggagaatgggtttcatcccagcctacgtcacatttgcccagtgccttatgttttctgggtttttcttcctccagttctgtttctaaaaaccagcttgagtttggctgaactgtcctttctcaacagaagcgcttttgcaattgatcccgggcaacaagtcaaaataagcttttaagtggagattttgtttttttcaaatgtatatgctttggaaattttgattttttagccagagggttttaccaagtgttctttgaagcacattacgatgcctcgagagggcggcccgtgcacgcgctttcaagaaaatgttctcgggacactcggtcttctctttgaaaggacattttctcattggttttgccgtgaaaatcctgtggagacttcgcaaagaaaacgcagccttacatttgctcattaaagacagatttccttc

SEQ ID NO: 1059 - DNA, 3228 bp, human
attaccaggcacgcgcaggaaacatggcggcggcgggtgttgtgagcgggaagattatatatgaacaagaaggagtatatattcactcatcttgtggaaagaccaatgaccaagacggcttgatttcaggaatattacgtgttttagaaaaggatgccgaagtaatagtggactggagaccattggatgatgcattagattcctctagtattctctatgctagaaaggactccagttcagttgtagaatggactcaggccccaaaagaaagaggtcatcgaggatcagaacatctgaacagttacgaagcagaatgggacatggttaatacagtttcatttaaaaggaaaccacataccaatggagatgctccaagtcatagaaatgggaaaagcaaatggtcattcctgttcagtttgacagacctgaaatcaatcaagcaaaacaaagagggtatgggctggtcctatttggtattctgtctaaaggatgacgtcgttctccctgctctacactttcatcaaggagatagcaaactactgattgaatctcttgaaaaatatgtggtattgtgtgaatctccacaggataaaagaacacttcttgtgaattgtcagaataagagtctttcacagtcttttgaaaatcttcttgatgagccagcatatggtttaatacaagcaggactgctagacagaagaaagctgttgtgggccattcaccactggaaaaaaattaaaaaggacccttatacggcaactatgataggattttccaaagtcacaaactacatttttgacagtttgagaggcagcgatccctctacacatcaacgaccaccttcagaaatggcagattttcttagtgatgctattccaggtctaaagataaatcaacaagaagaaccaggatttgaagtcatcacaagaattgatttgggggaacgccctgttgttcaaaggagagaaccggtatcactggaagaatggactaagaacattgattctgaaggaagaattttaaatgtagataatatgaagcagatgatatttagagggggacttagtcatgcattgagaaagcaagcatggaaatttcttctgggttattttccctgggacagtaccaaggaggaaagaacccaattacaaaagcaaaaaactgatgaatacttcagaatgaaactgcagtggaaatccatcagccaggaacaagagaaaagaaattcgaggttaagagattatagaagtcttatcgaaaaagatgttaacagaacagatcgaacaaacaagttttatgaaggccaagataatccagggttgattttacttcatgacattttgatgacctactgtatgtatgattttgatttaggatatgttcaaggaatgagtgatttactttcccctcttttatatgtgatggaaaatgaagtggatgccttttggtgctttgcctcttacatggaccaaatgcatcagaattttgaagaacaaatgcaaggcatgaagacccagctaattcagctgagtaccttacttcgattgttagacagtggattttgcagttacttagaatctcaggactctggatacctttatttttgcttcaggtggcttttaatcagattcaaaagggaatttggttttctagatattcttcgattatgggaggtaatgtggaccgaactaccatgtacaaatttccatcttcttctctgttgtgctattctggaatcagaaaagcagcaaataatggaaaagcattatggcttcaatgaaatacttaagcatatcaatgaattgtccatgaaaattgatgtggaagatatactctgcaaggcagaagcaatttctctacagatggtaaaatgcaaggaattgccacaagcagtctgtgagatccttgggcttcaaggcagtgaagttacaacaccagattcagacgttggtgaagacgaaaatgttgtcatgactccttgtcctacatctgcatttcaaagtaatgccttgcctacactctctgccagtggagccagaaatgacagcccaacacagataccagtgtcctcagatgtctgcagattaacacctgcatgatcactgttcttgcttttttgggaagagacactttgttgcaaccctttttcaagtacttgaaagttgaaaatttgaaatcttggtattgatcatgctttaaggtttatgtaaagaaagtgtactgatgttcttacattaaagctttacaaagatttaaactaattatttttgtagttacttctaccaaatagcctttccttttcgataacattcctcagtatttttatagccaagtacattttattttcttgctgatgaactggaattggataaatattgcaagtggatgagttggaaattatgcactttgaaaaacattcactttgtttaagcttattgggtttcagatttgattaaattaaatgtggaggctttctatagcattctaagctgagaagtagattgttacccagtaatgaaataaaaaataaaaataaaaggatttttttctctattgtttacgacagtactcagcttaaatatttatgctggtcaaatgtgatttaaattggacattttcatcaatgcagtctaatgtgtagataaatatttcaaccataataagtggattggcagtatattttttacattgaacttttcttcacttgtatataaagattatatataagtacttatttatgagtataagaaaggttaggcatattttcattaactgaataaacgacttgatttatataacctggtttatcaaaatttaacatggcttcagtatgagatctttttcaaaactattttcttaaacatttatttcatgagattatgttcaaccctgtacctggtgtaattttaaaattaattgcttgtaacctcactttactaataatgtttattatctttcctaataatgcattaactgattaatcaggtgtttaaatttttataaaatactcttgcaaaaagtttatttgaaaaatttctagatggtctcatgagtttcaaaataataatttttgtgtatgaacaaagctgttgtttttaccatgcagtattgcatgattttaagttatgtggaattaacataactgattttgttttaattgtaagttgttaactcctgtatatatcattaaaataaatctgaagttgaagtggaaaaaaaaaaaaaaaa

SEQ ID NO: 1060 - DNA, 1136 bp, human
agtcccggaactgctagaacgaaccattcgcatatggagggggtgacccaccatctcagaacattaaaaaagggaaagaatcccctggtgaactacagtgaaagtcttattgagcatttaaatggaaataaaaatattcagtggacctaatgaagagtagatgactttcccttctgtcccctccccgacaggcactcatggtaccggcgccggcgcagctgtgactgtcgctgcagacggaaactgactggggtcaattcaagtcatgcaggctgtgagaaacgcggggtcgcggttcctgcggtcctggacttggccccagacagccggcagggtcgtggccagaacgccggccgggaccatctgcacaggcgctcgacagctccaagacgctgcggccaagcagaaagttgaacagaacgcggctcccagccacaccaagttcagcatttaccctcccattccaggagaggagagctctctgaggtgggcaggaaagaaatttgaggagatcccaattgcacacattaaagcatcccacaacaacacacagatccaggtagtctctgctagtaatgagccccttgcctttgcttcctgtggcacagagggatttcggaatgccaagaagggcacaggcatcgcagcacagacagcaggcatagccgcagcggcgagagctaaacaaaagggcgtgatccacatccgagttgtggtgaaaggcctggggccaggacgcttgtctgccatgcacggactgatcatgggcggcctggaagtgatctcaatcacagacaacaccccaatcccacacaacggctgccgccccaggaaggctcggaagctgtgatgggaaggaggcctgcacttggacctgacctcaagcctcagctccagtgggaccttgtaaaatgctccctgtcagagctctccagaatatgcttgttggagatccttcaggcagtaagggagagttttgcctccttacacagtggcctttgcttgcacctccagctggagatgggtgtgccccagaagtaagctttgcatctcttacaagaggggagctacaggggcagccgtggcctaggcccaaactctgctctgagaaaataaatatctgtaccacctgtcaa

SEQ ID NO: 1061 - DNA, 1186 bp, human
cgccagtcccctaaccctgaggctgccgcgcggcggtcactgcgccggggtagtgggccccagtgttgcgctctctggccgttccttacactttgcttcaggctccagtgcaggggcgtagtgggatatggccaactcgggctgcaaggacgtcacgggtccagatgaggagagttttctgtactttgcctacggcagcaacctgctgacagagaggatccacctccgaaacccctcggcggcgttcttctgtgtggcccgcctgcaggattttaagcttgactttggcaattcccaaggcaaaacaagtcaaacttggcatggagggatagccaccatttttcagagtcctggcgatgaagtgtggggagtagtatggaaaatgaacaaaagcaatttaaattctctggatgagcaagaaggggttaaaagtggaatgtatgttgtaatagaagttaaagttgcaactcaagaaggaaaagaaataacctgtcgaagttatctgatgacaaattacgaaagtgctcccccatccccacagtataaaaagattatttgcatgggtgcaaaagaaaatggtttgccgctggagtatcaagagaagttaaaagcaatagaaccaaatgactatacaggaaaggtctcagaagaaattgaagacatcatcaaaaagggggaaacacaaactctttagaacataacagaatatatctaagggtattctatgtgctaatataaaatatttttaacacttgagaacagggatctgggggatctccacgtttgatccgttttcagcagtgctctgaaggagtatcttacttgggtgattccttgtttttagactataaaaagaaactgggataggagttagacaatttaaaaggggtgtatgagggcctgaaatatgtgacaaatgaatgtgagtaccccttctgtgaacactgaaagctattctcttgaattgatcttaagtgtctccttgctctggtaaaagatagatttgtagctcacttgatgatggtgctggtgaattgctctgctctgtctgagatttttaaaaatcagcttaatgagagtaatctgcagacaattgataataacattttgaaaattggaaagatggtatactgtttttagaggaataaacgtatttgtggtttaaaaaaaaaaaaaaaaaaaaaaa

SEQ ID NO: 1062 - DNA, 1812 bp, human
gtgcccgaggcggcggggctcgcgcgggtggagccgcctcggcgttcgagcggggtgggggctgcccggttgagatttcccggcgggtcccggcctctgcgtgcacgcgcctgcgtgctcgcgctcgcggttctggcgctgctggaaaggaataatgctgacagcatgtctgcacattccatgctctgtgaacgaatcgccatagccaaggaactgatcaagagagcagaatcactttctagatcaagaaaaggtggcatagaaggtggtgcaaagctgtgcagcaaattgaaggcagaattaaaattcttgcagaaagtagaagctggaaaagtagctattaaagagtctcatttacagagcactaacctaacacacctgagagccattgtggaatcagcagaaaacctggaagaagttgttagtgttcttcatgtctttggttatacagataccttaggagaaaagcaaacccttgtggtagatgtagttgcaaatggtggtcatacttgggtgaaagccattggccggaaggctgaagctcttcataacatccggctgggcaggggccaatatggtgacaaaagcatcattgagcaggctgaagacttcctccaggccagtcaccagcagccagtgcagtatagcaaccctcacatcatctttgcattttacaacagtgtctccagccccatggcagagaagctgaaagaaatgggcatatctgtgagaggagacatagtagcagtcaacgctctgttagatcaccctgaagagcttcaaccaagtgagagtgaatcagatgatgagggccctgaacttttgcaggtgaccagagttgaccgagaaaatatactagcaagtgttgcgtttccaacagaaattaaggtcgatgtgtgcaaaagagtaaatctggacattactactttaatcacatatgtatctgccctcagctatggaggctgccactttattttcaaagagaaagtgctcacagaacaagcagagcaagagaggaaagagcaggttctacctcagctggaggcctttatgaaggacaaggagttgtttgcttgtgaatctgctgtcaaggactttcagtctattttagataccttaggaggacctggggagagagagagggccactgtgttaattaagcgaattaatgtggtaccagaccagccttctgagcgtgccttgagactagtggccagttcaaaaattaatagccgctcattaacaatttttgggacgggagacaccctaaaagccatcacaatgactgctaatagtggttttgtcagagctgcaaacaaccagggtgttaaatttagtgtgtttatccatcagcccagagcacttactgagagtaaagaggctctagccacccccttaccaaaagactacacaactgacagtgaacactaaagataccctttaaatatttttgtggaagtaagttatttataccaaaggctgggtcttcccatctaaactggtgggaaaaaaggtctatagtaaaagtaaaactgagaactcttaaaccagtagagtttctttgtctctcatctaaagtatataacctcccaaagtagaaaaagcacaagagagaagcttatctatcaaactgtctgcattagtgcaattaagaaccgaaatacgtctatataaagctttcagctgtattgtaatactttgattcgatagggctacaactcccctactgctaaccacatttcatggaatatggctacattgcatcttgcattaaatatctggagaaaattcaaaaaaaaaaaaaaaaaaaaa

SEQ ID NO: 1063 - DNA, 1035 bp, human
ggcgtggcggcgctgtgcgcgtgcacaaaagagagctgaggggcgggggcgctgcggcacagctggtttgagcaactgaactggaaacaagatgcaggaccccaacgcagacactgaatggaatgacatcttacgcaaaaagggtatcttaccccccaaggaaagtctgaaagaattggaagaggaggcagaagaggagcagcgcatcctccagcagtcagtggtgaaaacatatgaagatatgactttggaagagctggaggatcatgaagacgagtttaatgaggaggatgaacgtgctattgaaatgtacagacggcggagactggctgagtggaaagcaactaaactgaagaataaattcggagaagttttggagatctcagggaaggattatgttcaagaagttaccaaagctggcgagggcttgtgggtcatcttgcacctttacaaacaaggaattcccctctgtgccctgataaatcagcacctcagtggacttgccaggaagtttcctgatgtcaaatttatcaaagccatttcaacaacctgcatacccaattatcctgataggaatctgcccacgatatttgtttacctggaaggagatatcaaggctcagtttattggtcctctggtgtttggcggcatgaacctgacaagagatgagttggaatggaaactgtctgaatctggagcaattatgacagacctggaggaaaaccctaagaagccgattgaagacgtgttgctgtcctcagtgcggcgctctgtcctcatgaagagggacagcgattccgagggtgactgaggctacagcttctatcacatgccgaactttcttgtgacaaattgtctggattttttaaaaaaggaaaaagcaagaatgaatccttgtggtttttagttttgtataaattatgtttcaaatctttacattttggaaataatcattgctggagattctgttaaatattttggaactctttttttttttaaattatagtatttcctctaaaaaaaaaaaaaaaaaaa

SEQ ID NO: 1064 - DNA, 1501 bp, human
cccaagcaggtcggcggcggcggcaggagagcggccgggcgtcagctcctcgacccccgtgtcgggctagtccagcgaggcggacgggcggcgtgggcccatggccaggcccggcatggagcggtggcgcgaccggctggcgctggtgacgggggcctcggggggcatcggcgcggccgtggcccgggccctggtccagcagggactgaaggtggtgggctgcgcccgcactgtgggcaacatcgaggagctggctgctgaatgtaagagtgcaggctaccccgggactttgatcccctacagatgtgacctatcaaatgaagaggacatcctctccatgttctcagctatccgttctcagcacagcggtgtagacatctgcatcaacaatgctggcttggcccggcctgacaccctgctctcaggcagcaccagtggttggaaggacatgttcaatgtgaacgtgctggccctcagcatctgcacacgggaagcctaccagtccatgaaggagcggaatgtggacgatgggcacatcattaacatcaatagcatgtctggccaccgagtgttacccctgtctgtgacccacttctatagtgccaccaagtatgccgtcactgcgctgacagagggactgaggcaagagcttcgggaggcccagacccacatccgagccacgtgcatctctccaggtgtggtggagacacaattcgccttcaaactccacgacaaggaccctgagaaggcagctgccacctatgagcaaatgaagtgtctcaaacccgaggatgtggccgaggctgttatctacgtcctcagcacccccgcacacatccagattggagacatccagatgaggcccacggagcaggtgacctagtgactgtgggagctcctccttccctccccacccttcatggcttgcctcctgcctctggattttaggtgttgatttctggatcacgggataccacttcctgtccacaccccgaccaggggctagaaaatttgtttgagatttttatatcatcttgtcaaattgcttcagttgtaaatgtgaaaaatgggctggggaaaggaggtggtgtccctaattgttttacttgttaacttgttcttgtgcccctgggcacttggcctttgtctgctctcagtgtcttccctttgacatgggaaaggagttgtggccaaaatccccatcttcttgcacctcaacgtctgtggctcagggctggggtggcagagggaggccttcaccttatatctgtgttgttatccagggctccagacttcctcctctgcctgccccactgcaccctctcccccttatctatctccttctcggctccccagcccagtcttggcttcttgtcccctcctggggtcatccctccactctgactctgactatggcagcagaacaccagggcctggcccagtggatttcatggtgatcattaaaaaagaaaaatcgcaaccaaaaaaaaaaaaaaaaaaa

SEQ ID NO: 1065 - DNA, 2538 bp, human
cccgtctccgtctgaagagtgcttctgccctcatttgcctctccctgtgaccccggccccctcagactccgctgcgtcgtctctcggccccgtccagccgttcctgactgctcttcgccggagtccgcttcccaaccccctttcgccagagcccgagagctccgtcggctctgcgtcctggcggattgtcagtggcttcgccccgaggagagctgactgccctgggctgctgcctccggcagagctgagccaaaatgtccccggaatctaaaaagcttttcaacatcattattttaggagttgcctttatgtttatgttcactgcctttcaaacttgtggaaatgtggcgcaaactgtcatcaggagcttaaataggacagattttcacggcagtggatataccagcatggctattatctatggagtgttctctgcttcaaatttgattacaccgtcagtggttgccattgtaggacctcaactctctatgtttgccagtggtttattttacagcatgtacattgccgttttcatccagcctttcccgtggtccttctacacagcctctgttttcattggaattgctgctgctgtgctttggacagcacaaggaaactgcctgacaatcaattcggatgagcacagcattgggagaaacagtgggattttctgggcacttctgcagtctagcttgttctttggaaatctctacatatattttgcctggcaagggaaaactcagatatcagagagtgaccgaagaacagtgtttattgccctaacggtgattagccttgtggggacagttctattctttctcattcggaaaccagattctgaaaatgtcctaggagaagatgagtcttctgatgaccaggacatggaagtcaacgagtctgcccagaacaatctgacaaaggcagtagatgcttttaaaaagtcttttaagttatgtgtcaccaaggagatgctccttcttagtattacaactgcttatacaggtctggaattaactttcttctctggtgtatatggaacctgtattggtgctacaaataaatttggagcagaagagaaaagccttattggactttctggcattttcatcggcattggagaaattttaggtggaagcctcttcggcctgctgagcaagaacaatcgttttggtagaaatccagttgtgctgttgggcatcctggtgcacttcatagctttttatctaatatttctcaacatgcctggagatgccccgattgctcctgttaaaggaactgacagcagtgcttacatcaaatccagcaaagaagttgccattctctgcagttttctgttgggccttggagacagctgctttaatacccagctgcttagtatcttgggctttctgtattctgaagacagcgccccagcatttgccatcttcaagtttgttcagtctatttgcgcagccgtggcatttttctacagcaactaccttctccttcactggcaactcctggtcatggtgatatttgggttttttggaacaatttctttcttcactgtggaatgggaagctgccgcctttgtagcccgcggctctgactaccgaagtatctgatctggtgtccgtgaggggacacgtatgacctcagaaacacagctggacacagagcttggtggaagaagtcgcctttgatcttcactatatattgggtgatgttcagtatggaaaatcaagggattaagactgttaaatcagccagagttggtgttcaagtttacagatatgagttatttaaagcaagtagaataagggaaagctgttctgtcaactgtaattgttcaaagatgttgtttttcatttcatctatctcaattcttataatcatgttatagaatgtaaatgttttcttctctctcctgctcttgttggaagatcctgccttgatttagaatactaggccatatgtcatataaatattttttctggatatggagtatgttttgctatgtaataatgggaagcatatgtcattccccatatgtgttggagaatgacatttaaataaatagcaaagctgggtgtggtgttgcaccgctatactcccagctgttggggaggctgagacggaaggatcgcttcagcccgggagattgaggctgcggtgagctatgatcgcgccactgcactccaggctgggcaacggagtgagaccctgtcttgaaaataataataggctggtcacggtggctcatgcctgtggtcccagcactttgggaggctgaggtgggtggatcgcctgaggtcgggggtttgagaccggcctggccagcgtggtgaagcctcatctctgctgagaatgcagagatgtgttgggtttggtggtgcatgcctgtgatcctagctgctggggaggctgaggtaggagaattcgcttgagcctgggaggcggaggttgcagtgagccgagatcgtgccattgcactccagcctggatgacaagagtgaaactccatctcaaaaaaaaaaaaaaaaaaaaaaaaaaaaaaaa

SEQ ID NO: 1066 - DNA, 2202 bp, human
gcagggagtgcgggtcggttctgcgtgcgctgccggacgaggctcccgccgccgattgacccgcgctccgcccgtagtcgggccgttctgttccaagagataaccattgggaccttggtagctaatgtccgaagaaagtgactctctgagaaccagcccttctgtggcctcactctctgaaaatgagctgccaccaccacctgagcctccgggctatgtgtgctcactgacagaagacctggtcaccaaagcccgggaagagctgcaggaaaagccggaatggagacttcgagatgtgcaggcccttcgtgacatggtgcggaaggagtaccccaacctgagcacatccctcgacgatgccttcctgctgcgcttcctccgagcccgcaagtttgattacgaccgggccctgcagctcctcgtcaactaccacagctgtagaagaagctggcccgaagtcttcaataacttgaagccatcagccttaaaagatgtccttgcttccgggttcctcaccgtgctgccccacactgaccccaggggctgccatgtcgtctgcatccgcccagacagatggataccaagcaactatccaattactgaaaacatccgagccatatacttgaccttagaaaaactcattcagtctgaagaaacccaggtgaatggaattgtaattcttgcagactacaaaggagtgagtttatcaaaagcatctcactttggcccttttatagccaaaaaggtgattggcatcctccaggatggtttccccattcggataaaagcagtccatgtggtgaatgaacctcgaatatttaaaggcatttttgccatcataaaaccatttctaaaggagaaaatagcaaacagattcttcctccatgggtctgacttgaactctctccacacaaaccttccaagaagcatcctccccaaggagtatgggggcacggctggggagctggacactgccacctggaacgcggtactgctggcttcagaagacgattttgtgaaagagttctgccaacctgttcctgcctgtgacagcatcctgggccagacgctgctgcccgagggcctgacctcagatgcacagtgtgacgactccttgcgagctgtgaagtcacagctgtactcctgctactagcccgtcccccagggtcaccatctttaattcttttccttcttttctttggagaggcacaaggagaatttaagggtccatggattcagtcttgctccttgtaattaaactgcaggatggaggaacagcctgagatatgagcatgagcccattttggggtaagcctttggttactttaattactccatggaagacatggaaaatgtccccactgattcttaaacatttggaatcccagtctgcaactattaatctggaggctatatctattttgttttgctttttggttggggggtggtgatctggttcttacacatcttggaagcaagaacaatcaggaccaaagtcactttgatcccacttttccaggagaaaaaccacctgtttggccagtgagaactacttgtatgaaataatttggccaaaccttcagtgtgaccaaatgtgagactgggagtttgtgtttttcacaggaaccctaagtatagacctctgctgctcatcaggaaacttactggagatgaaggccccagctgttgtcaccgggtttggaaagcaccttaactgaatcatgtaagcatcaggacataagcagcactttgtggtcaaatgtggaagccggagacttcaaagcacctctgggacccactggttgaagtttgcaatagaaacttaagttttcccaaatccataaagccttagccctggttctcaatagaatcagggacctagcaggaaatgattttactcaacctaaaatgctggatcccaggcccgtgtagctataagaattctggcctggatcccaggtgtacaactatggacaagatatgggcctctactttctcctctataaaatgaggctggatgaaatgtcagctagggccattttggctgctgaggctctgggatttggtttagttactgaatgttagattttctgcctagaaagataactatctagatacaagtggttggatcctgtttttgtttgtggtacatgtgtctttccaagagagatgtgtcaccaattaaaaaaaaaaaaaaaaaaa

SEQ ID NO: 1067 - DNA, 2784 bp, human
aaaggttcctgcggtgctctcccgtccagagccctgctgatggggaagtccgaaggccgtggggatggtggagagcgccggccgtgcagggcagaagcgcccggggttcctggagggggggctgctgctgctgctgctgctggtgaccgctgccctggtggccttgggtgtcctctacgccgaccgcagagggaagcagctgccacgccttgctagccggctgtgcttcttacaggaggagaggacctttgtaaaacgaaaaccccgagggatcccagaggcccaagaggtgagcgaggtctgcaccacccctggctgcgtgatagcagccgccaggatcctccagaacatggacccgaccacggaaccgtgtgacgacttctaccagtttgcatgcggaggctggctgcggcgccacgtgatccctgagaccaactcaagatacagcatctttgacgtcctccgcgacgagctggaggtcatcctcaaagcggtgctggagaattcgactgccaaggaccggccggctgtggagaaggccaggacgctgtaccgctcctgcatgaaccagagtgtgatagagaagcgaggctctcagcccctgctggacatcttggaggtggtgggaggctggccggtggcgatggacaggtggaacgagaccgtaggactcgagtgggagctggagcggcagctggcgctgatgaactcacagttcaacaggcgcgtcctcatcgacctcttcatctggaacgacgaccagaactccagccggcacatcatctacatagaccagcccaccttgggcatgccctcccgagagtactacttcaacggcggcagcaaccggaaggtgcgggaagcctacctgcagttcatggtgtcagtggccacgttgctgcgggaggatgcaaacctgcccagggacagctgcctggtgcaggaggacatggtgcaggttctggagctggagacacagctggccaaggccacggtaccccaggaggagagacacgacgtcatcgccttgtaccaccggatgggactggaggagctgcaaagccagtttggcctgaagggatttaactggactctgttcatacaaactgtgctatcctctgtcaaaatcaagctgctgccagatgaggaagtggtggtctatggcatcccctacctgcagaaccttgaaaacatcatcgacacctactcagccaggaccatacagaactacctggtctggcgcctggtgctggaccgcattggtagcctaagccagagattcaaggacacacgagtgaactaccgcaaggcgctgtttggcacaatggtggaggaggtgcgctggcgtgaatgtgtgggctacgtcaacagcaacatggagaacgccgtgggctccctctacgtcagggaggcgttccctggagacagcaagagcatggtcagagaactcattgacaaggtgcggacagtgtttgtggagacgctggacgagctgggctggatggacgaggagtccaagaagaaggcgcaggagaaggccatgagcatccgggagcagatcgggcaccctgactacatcctggaggagatgaacaggcgcctggacgaggagtactccaatctgaacttctcagaggacctgtactttgagaacagtctgcagaacctcaaggtgggcgcccagcggagcctcaggaagcttcgggaaaaggtggacccaaatctctggatcatcggggcggcggtggtcaatgcgttctactccccaaaccgaaaccagattgtattccctgccgggatcctccagccccccttcttcagcaaggagcagccacaggccttgaactttggaggcattgggatggtgatcgggcacgagatcacgcacggctttgacgacaatggccggaacttcgacaagaatggcaacatgatggattggtggagtaacttctccacccagcacttccgggagcagtcagagtgcatgatctaccagtacggcaactactcctgggacctggcagacgaacagaacgtgaacggattcaacacccttggggaaaacattgctgacaacggaggggtgcggcaagcctataaggcctacctcaagtggatggcagagggtggcaaggaccagcagctgcccggcctggatctcacccatgagcagctcttcttcatcaactatgcccaggtgtggtgcgggtcctaccggcccgagttcgccatccaatccatcaagacagacgtccacagtcccctgaagtacagggtactggggtcgctgcagaacctggccgccttcgcagacacgttccactgtgcccggggcacccccatgcaccccaaggagcgatgccgcgtgtggtagccaaggccctgccgcgctgtgcggcccacgcccacccgctgctcggaggcatctgtgcgaaggtgcagctagcggcgacccagtgtacgtcccgccccggccaaccatgccaagcctgcctgccaggcctctgcgcctggcctagggtgcagccacctgcctgacacccagggatgagcagtgtccagtgcagtacctggaccggagcccccttcacagacacccgcggggctcagtgcccccgtcacaactctgtagagacaatcaactgtgtcctgcccacccttcaaggtgcattgtcttccagtatctacagcttcagaacttgagctaagtaaatgctttcaaaaaaaaaaaaaaaaaaaaaaaaaaaaaaaaaaaaaaaaaaaaaaaaaaaaaaaaaaaaa

SEQ ID NO: 1068 - DNA, 1530 bp, human
agttcccagctgtccgaaaggtcttcggaacttcggctctaaagcgttcctcagcgccatccgcccggaaacacgagcgacagagaaaaggtccgcgaggccggcagactccagagtggctgggtccgagcgcggggcgggttgccgaagggcctcggcctgggctgcgtgctggagagcggggacggggccgactcaccagaggctgcagcaacaggtccactttgctctccagtctctttctccgacaccgctgaggcggtttcccaccgacttcctttccatacagcaccggcaggcaccggggtgaagggtcataaaaatggcgctggccgctcgtttgctaccccagttcctgcactctcggtcgctgccctgcggggccgtccgactccggactcctgctgtggccgaggtgaggctgccgtcggccacactttgctacttctgccgctgtcgcctcggcttgggagcggcgttatttccacgaagcgctagggccttggcagcctcggcgctacctgcccagggctcccggtggccagtgctcagcagcccgggactccccgcagccttcgcttctttccctgcctgccctcagcgcagctacagcacggaggagaagccccagcagcaccagaaaaccaagatgatcgtcctgggattctccaaccccatcaactgggttaggactcgaattaaggccttccttatctgggcctatttcgacaaagagttcagcatcacagagttctccgagggagcgaagcaggcttttgctcatgtatccaagttgctgtcacagtgtaaatttgatctgttggaagaacttgtggccaaagaggtgctacatgcattgaaagaaaaggttacttcactacctgacaaccataaaaatgcccttgctgctaacatagatgaaattgtatttacatcaacaggaggcatctccatttactatgatgagaaaggaaggaagtttgttaacatcctgatgtgcttttggtatctaaccagtgccaacatccccagtgaaactttaagaggagccagtgtattccaggttaagttggggaatcagaatgtggaaactaaacaacttcttagtgcaagctatgagtttcagagggagttcacacaaggagtaaagcctgactggaccattgcacggattgaacactcaaaattattagaataattttcttggaaaaatcagcttatggactttagcagttgctgtgaaaaactaaggaagaaaaattttggggtcatttgatcttcacttaatctaagtctgtgaattacttttatattattttgaaatactccttgcagtatattggcatgatacagtaaaagcattttccacagattgttatcaccttctttaaaagaagtcaaaatttaaaaaatacaatagcacgttgttggtgtcatattcaataacatttccaatgctacatataattttatagacataataaagaaggtattgaaaaaactaaaaaaaaaaaaaaaaaaaaaaaaaaa

SEQ ID NO: 1069 - DNA, 2730 bp, human
agaatgcctatgagacacaggaagaaggcagcagacaagaatcttccctgccgtcctttagtatgtgcagtactggacctgatggtagagtttattgtaacacacatgatgaaggagtttcctatggatctctatatacgctgcatccaggtagtacacaaactgctctgctaccagaagaagtgtcgggtacgcctgcattacacctggcgggagctctggtcagccttgataaatttgctgaagttccttatgtcaaatgagactgtacttttggccaaacacaacatttttacattagcccttatgattgtgaacctatttaatatgtttatcacatatggcgacacatttctgccaacccccagcagctatgatgaactttactatgagattatccgcatgcaccagagctttgacaacctctactccatggtcctgaggctttctaccaatgcaggccagtggaaggaagcagctagcaaggtgacccatgcattggttaatatcagagccatcatcaaccactttaaccccaaaattgagtcctacgctgctgtgaatcacatatcccaactgtcagaggagcaggtgctggaggtggtgagagccaactatgacacgctcacgctgaagctgcaggatggcctggaccagtatgagcgctactcagagcagcacaaggaagctgccttcttcaaagagctggttcgatccattagcaccaacgtccggagaaacctggtcttccacacactcagccaagaagtcctgctcaaggagttctccactatctcctgaggccacgcctacctgagcagcctctgactgcccttacccatgaggatcatgggctggagggggagcgaggggagagggggctgcccccgaggttggagagaaacacagataccaagttctcttggtgaagaccgcacttcaatggagcttgggcagcaggggcaggagggtcaagccagggataatcttatttggggaggaatgggtgggcacagtggggagaggcctccaggaatgtggggacttccagagtgggctccctaaacagcccctcacatttccaatcttgaggttacaagctgtagctactgactaattttcgggagctggtgaggcaagcctcagggtaatgccagcaccctgaaagtcagtggctctgctcggcttctgaaaacagatcaactctcagatatagctggagctacatcctgcttcctttgggcctggggctgtgcttggcttgaaatctgtgtcccctgcctgcactggcactttgtccagtcatcgggacctttggctcagatttagggtaagataggaatagggtacctttttccttttttttctgagacggagtctcactctgtcgcccaggctggaatgcagtggcgtgatctcggctttactgcagcctccgcttcctgggttcaagcgattctcctgcctcagcctcccgagtagctgggactacaggagcgtgtgccacgcccggctaattttttgtatttttagtagagatggagtttcaccatgttacccaggatggtctcaatatcctgagttcatgatccacccaccttggcctcccaaagtgctgggattacaggcgtgagccaccacacccagccagttttcctattttctgaattcagaattgacttctctgggaaaactggagatgagaatctgcccagtgctctgctgtccagtcaccgccttttgaattttagttttggcaccaggagtaccgttagctttccccttcttctggcccatttgactcatcagcacaatagggtcaccaccttaacttttaatttctaatctgctttactgtctttagggtgtgtatgaaataaacattgacaggctttctggagccctcaaggtgcctactttgctggttccctttccagcagctcccccacctcccttagccccccctcctctggcagcctctcctgcctctgctgagctcccctccacgtgttccacccccttaccctgctgttgtttacatccaacctgcctgagaatttcctctggggaggaatctattcctgtcatggtctagtgcctgggagggagagaacttcctgggggtagggtgccctccatctgaaacaggccaggtgagcatcatgcataaggcctccattctgtccgctcagattctgggtggggccacaggcaaatctcctgacttatggggagttggcttgtggttcctcccttggatagcctccatggaaccactataggctttcccaacagctgcctctgaaatagctgctgcttcgagatcctccctttttaaagcactttctaaagccctcaggatggcgggagcaaacagcactggtatattctaggagtaagtgcaggaattcagcagtgagagcatgtctgggaccacctggactgccatccatttaacctcaaatctctttgggatactcgccctccctgggaaccagagttctggctctaacattgagcagctatgcactagttccagagaagccactaacaggctgccatgtgtagatgtaggttcttaagagatcacaggctgggtcatctgatcactggatggatagctcagcctggggcatttagtgttttccctggtgataaatccccaaggcagctggatttggagctggtggcaagttgaaattattaaaaattgatttgtgtgggactgtc

SEQ ID NO: 1070 - DNA, 1656 bp, human
ggcacgaggcccgggccaggggcgggcgccgccatgggtaacctgttcggccgcaagaagcagagccgcgtcacggagcaggacaaggccatcctgcaactgaagcagcagcgggacaagctgaggcagtaccagaagaggatcgcccagcagctggagcgcgagcgcgccctggcccggcagctgctgcgggacggcaggaaggaacgggccaagctgctgctcaagaagaagcgataccaggagcagctcctggacaggacggagaaccagatcagcagcctggaggccatggttcagagtattgagttcacccagatcgaaatgaaagtgatggaggggctgcagtttggaaatgagtgtctgaacaagatgcaccaggtgatgtccattgaagaggtggagaggatcctggacgagacgcaggaggccgtggagtaccagcggcaaatagacgagctcctggcaggaagcttcactcaggaggatgaagacgccatcctggaggagctgagcgcaatcactcaggaacaaatagagctgccagaggttccctccgagccccttcctgagaagatcccagaaaacgtccctgtcaaggccaggcccaggcaggcggagctggtggcagcttcgtaacgtggcctcgtcttgtgggactcacggggatgccccagggactgtggcccacagagagtttgggtcacggccagcccctgaccgggttccctggagcccagtgcgcacggtgctgagcagagctgcagccacgcaggcgcattgcaggaggactccagagcgtctcctggagaccttgagcctgaacgcactcaggcgccactggcctgctctcagtccggattaactctcgaccgagcccagcttctgccggttgtgggctcccccggtggccgaggcccaggcccaacgcctctggtgctgttcccctgcagtcccagccccgcgtggctcgcgctcgtctgtgaggaagacacctccagaccttggggtccccgcgcttcctcttgctcctcgctgctcccattagctggtgcaggcttccgttaaggggtccctcccttggcctggcttcccggcgcacctcagcttccctgctggtggggggatccccaggagaccagcatgtgctgaacctctccgtgcctctgcctccgcaccctagacacccacctccagtttgaaggtggcgggccaggggctttcttgctgaattgacgactccgagagccctgactcccgccttgccactcacggctctgtccactagggctcagccctgctgagaaaggacctccgatgcttgggagacgctgctccggcaggtgcagccccggaagtttgtccatgggggtccccgcggctggggctcatggaactgcgagacccgggaccctcctgccctgcgggtccccgagccaccagcagccaggaccggaggctgtggggcatggcgtgacttctcgtgcacagggctggtttggttatgagacgatctcgctgggaccgcccctgcccgtggaaagccacaaggacaaagggagcggccacctcgacccccagacagggcggcccgtattaaagttggccctgcacgcccaaaaaaaaaaaaaaaaaaaaaaaaaaaaaaaaaaaaaa

SEQ ID NO: 1071 - DNA, 2518 bp, human
atgaatgaacacttatcaagcctaattaaaaaaaaacgtaaatgtatgcagcccaaagattttaattttaaaacaccagaaaatgataagagatttcagaagaaatttgagaaaatggctaaagagctacaaaggcaaaaaacaaatctagatgatgatgtacctattctcttatttgaatctaatggttcattaatatatactcccacaattgaaattaatagtagtcaccacagcgcaatggagaagagattacaagagatgaaggagaaaagggaaaatctttcccccacctcttcccaaatgattcagcagtctcatgataatccaagtaactctctgtgtgaagcacctttgaacatttcacgtgatactttgtgttcagatgaatactttgctggtggcttacactcatcttttgatgatctttgtggaaactcaggatgtggaaatcaggaaaggaagttggaaggatccattaatgacattaaaagtgatgtgtgtatttcttcacttgtattgaaagcaaataatattcattcatcaccatctttcactcacctcgataaatcaagtcctcagaaatttctgagtaatctttcaaaggaagaaataaacttgcaaagaaatattgcaggtaaagtagtcacccctcaccaaaagcaggctgcaggtatgtctcaggagacgtttgaagagaagtatcgtttgtctcctaccttatcttcaacaaaaggccaccttttgatacattcaagacccaggagttcctcagtaaagagaaaaagagtatcacatggctcccattcacctccgaaggaaaaatgcaagagaaagaggagcaccaggagatctatcatgccgaggctgcagctgtgcaggtcggaaggcaggctgcagcacgtggcgggacctgccctggaggctcttagctgtggggagtcttcatatgatgactatttttcacctgataatcttaaggaaaggtattcagagaatcttcctcctgaatctcagctgccatcaagccctgctcagttgagctgcagaagtctttctaagaaggagagaacaagcatatttgaaatgtctgatttttcctgcgttggcaaaaaaaccagaacagttgacattaccaatttcacagcaaaaaccatctccagtcctcggaaaactggaaatggtgaaggccgtgcaacttcgagttgcgtgacttctgcccctgaagaagccctaaggtgttgtagacaggctgggaaagaagacgcatgcccagagggaaatggcttttcttacaccattgaggaccctgctcttccaaaaggacatgatgatgatttaactcctttggaaggaagccttgaagaaatgaaagaagcggttggtctgaaaagcacacagaacaaaggtaccacttccaaaatatcaaactcctctgaaggcgaagcccagagtgaacatgagccatgttttatagttgactgtaacatggagacgtctacagaagagaaggaaaacttacccggaggatacagtggaagtgttaaaaatagaccaacaaggcatgatgttttagatgactcatgtgacggctttaaggacctcatcaaacctcatgaggaattgaagaaaagtgggagaggcaaaaagccaacaagaacattagtcatgacaagcatgccatctgaaaagcagaatgtcgtcatccaggttgtggataaattgaaaggcttttcaattgcaccagacgtctgtgagaccacgactcacgtgctttccgggaagccacttcgcaccctgaatgtgctgctgggaattgcgcgtggctgctgggttctctcttatgattgggtgctatggtctttagaattgggtcactggatttctgaggagccgttcgaactgtctcaccacttccctgcagctcccctgtgccgaagtgagtgccacttgtctgcagggccgtaccgcggaaccctctttgccgaccagccagtgatgtttgtctcgcctgccagcagccccccagtggccaagctctgtgaactagtccacctgtgcggaggccgggtcagccaagtcccccgccaggccagcatcgtcatcgggccctacagcggaaagaagaaagcaacagtcaagtatctgtctgagaaatgggtcttagattccatcacccagcacaaggtctgtgcccctgaaaactacctattgtcacaatgacagtgacctcactggcctgtggtgactgcacacagctcgcaaaactgtctttggatgttcaaatgagaaacaaaactgtgaagagaaggaactggcgtatacaagatgacttctgatatcatgtttgccatgtgttgtggttcttaagaactcataggtgactttctgatgactgaatgtctgtttcagagacgcttcgggcctttttatttttattttattttttattttttgagacggagtccagcctgggcaacagagtaactctccttctcaaataaataaataaataaat

SEQ ID NO: 1072 - DNA, 2279 bp, human
gctgacggggtggcagtgcggcgggttacggcctggtcagaccataatgacttcagcaaataaagcaatcgaattacaactacaagtgaaacaaaatgcagaagaattacaagactttatgcgggatttagaaaactgggaaaaagacattaaacaaaaggatatggaactaagaagacagaatggtgttcctgaagagaatttacctcctattcgaaatgggaattttaggaaaaagaagaaaggcaaagctaaagagtcttccaaaaaaaccagagaggaaaacacaaaaaacaggataaaatcttatgattatgaggcatgggcaaaacttgatgtggaccgtatccttgatgagcttgacaaagacgatagtacccatgagtctctgtctcaagaatcagagtcggaagaagatgggattcatgtagattcacaaaaggctcttgttttaaaagaaaagggcaataaatacttcaaacaaggaaaatatgatgaagcaattgactgctacacaaaaggcatggatgccgatccatataatcccgtgttgccaacgaacagagcgtcagcatattttagactgaaaaaatttgctgttgctgagtctgattgtaatttagcagttgccttgaatagaagttatacaaaggcttattccagacgaggtgctgctcgatttgctttgcaaaaattagaagaggccaaaaaagattatgaaagagtattagaactagaaccaaataactttgaagcaacaaatgaactcaggaaaatcagtcaggctttagcatccaaagaaaactcatatccaaaggaagctgacatagtgattaagtcaacagaaggagagcgaaagcaaattgaagcacaacagaataagcagcaggccatttcagagaaagatcgggggaatggatttttcaaagaggggaaatatgaaagagcaattgaatgctatactcgagggatagcagcagatggtgctaatgcccttcttccagctaacagagctatggcctatctgaagattcagaaatatgaagaagctgaaaaagactgcacacaagccattttattagatggctcatattctaaagcttttgccagaagaggaactgcaagaacatttttgggaaagctaaatgaggcaaaacaagattttgaaactgttttacttctggaacctggaaataagcaagcagtaactgaactctccaaaattaaaaaggaattaattgagaaaggacactgggatgatgtctttcttgattccacacaaagacaaaatgtggtaaaacccattgataatccaccgcatcctggatcaactaaaccactcaagaaggttattattgaagaaactggtaatttgatacagactattgatgtgccagatagcactactgctgctgctccagagaataatcctattaatctagcaaatgtaatagcagccacaggcaccacaagtaagaagaattcaagccaagatgtcctttttcccacaagtgatactccaagagcaaaagtattgaaaatagaagaagtcagtgatacttcatccctgcaacctcaagccagtttgaagcaggatgtatgtcagtcttacagcgagaaaatgcccatagagatagaacaaaaacctgctcagtttgccacaactgttcttcctccaattcctgcaaactcgttccagctcgaatctgatttcagacaattgaaaagttctccagatatgttgtatcagtatttaaagcaaattgaaccatctttgtatcctaagttgtttcagaaaaatctggatccagatgtattcaaccagatcgttaaaattctgcatgacttttacattgagaaagaaaagccattactcatctttgaaatcttacaaagactttctgaactaaaaaggtttgatatggcagtgatgtttatgtcagaaacagagaaaaagattgcacgtgcattatttaatcacatagacaagtcaggattgaaggatagttctgtcgaagaactcaagaaaagatacggtggttgatttccatttttgctgaaataattgtttttgactttcatatgtaaattttttctactgaaagtgttttgctttttaagaaaatgaaattatatagcaggaaaggactatctttgaacataagttaattaactataaggtgaattgtgatttaactagtgagaattgtattcaagtgaactctgtttttctgaaaataaaaatataaacaatgagaaaaaaaaaaaaaaaaaaaaaa

SEQ ID NO: 1073 - DNA, 2094 bp, human
gtcttttgtccctcggcggacaccgtttgccagccaaagctatgtctgcgcgctcaccgacttcatagggtgccgaattcttttttccccaggcttgccatggctagtcgaggggctcggcagcgcctgaagggcagcggggccagcagtggggatacggccccggctgcggacaagctgcgggagctgctgggcagccgagaggcgggcggcgcggagcaccggaccgagttatctgggaacaaagcaggacaagtctgggcacctgaaggatctactgctttcaagtgtctgctttcagcaaggttatgtgctgctctcctgagcaacatctctgactgtgatgaaacattcaactactgggagccaacacactacctcatctatggggaagggtttcagacttgggaatattccccagcatatgccattcgctcctatgcttacctgttgcttcatgcctggccagctgcatttcatgcaagaattctacaaactaataagattcttgtgttttactttttgcgatgtcttctggcttttgtgagctgtatttgtgaactttacttttacaaggctgtgtgcaagaagtttgggttgcacgtgagtcgaatgatgctagccttcttggttctcagcactggcatgttttgctcatcatcagcattccttcctagtagcttctgtatgtacactacgttgatagccatgactggatggtatatggacaagacttccattgctgtgctgggagtagcagctggggctatcttaggctggccattcagtgcagctcttggtttacccattgcctttgatttgctggtcatgaaacacaggtggaagagtttctttcattggtcgctgatggccctcatactatttctggtgcctgtggtggtcattgacagctactattatgggaagttggtgattgcaccactcaacattgttttgtataatatctttactcctcatggacctgatctttatggtacagaaccctggtatttctatttaattaatggatttctgaatttcaatgtagcctttgctttggctctcctagtcctaccactgacttctcttatggaatacctgctgcagagatttcatgttcagaatttaggccacccgtattggcttaccttggctccaatgtatatttggtttataattttcttcatccagcctcacaaagaggagagatttcttttccctgtgtatccacttatatgtctctgtggcgctgtggctctctctgcacttcagcacagttttctgtacttccagaaatgttaccactttgtgtttcaacgatatcgcctggagcactatactgtgacatcgaattggctggcattaggaactgtcttcctgtttgggctcttgtcattttctcgctctgtggcactgttcagaggatatcacgggccccttgatttgtatccagaattttaccgaattgctacagacccaaccatccacactgtcccagaaggcagacctgtgaatgtctgtgtgggaaaagagtggtatcgatttcccagcagcttccttcttcctgacaattggcagcttcagttcattccatcagagttcagaggtcagttaccaaaaccttttgcagaaggacctctggccacccggattgttcctactgacatgaatgaccagaatctagaagagccatccagatatattgatatcagtaaatgccattatttagtggatttggacaccatgagagaaacaccccgggagccaaaatattcatccaataaagaagaatggatcagcttggcctatagaccattccttgatgcttctagatcttcaaagctgctgcgggcattctatgtccccttcctgtcagatcagtatacagtgtacgtaaactacaccatcctcaaaccccggaaagcaaagcaaatcaggaagaaaagtggaggttagcaacacacctgtggccccaaaggacaaccatcttgttaactattgattccagtgacctgactccctgcaagtcatcgcctgtaacatttgtaataaaggtcttctgacatgaaaaaaaaaaaaaaaaaaaaaaaaaaa

SEQ ID NO: 1074 - DNA, 1551 bp, human
gagctgcggcggtggcacctccgggtgtggaaggctccagtgagatggagtcgcgagtcgcggacgctgggaccggcgagaccgcgcgagcagcgggcgggagtccggcagttggctgcaccactcgggggcccgtagtctcggcgcccctgggagccgcccggtggaagctcctgcggcaggttctgaagcaaaaacacctggatgattgcctgcgacatgtatctgtaagaagatttgaatcatttaatctgttttcagtaacagaaggcaaagaaagggaaactgaagaggaggttggtgcatgggtccaatatacaagcatcttctgtcctgaatacagtatctccttaaggcataatagtggatccttgaatgttgaagatgtccttaccagctttgacaatacaggaaatgtttgcatctggccatctgaagaggttttggcttactactgcctcaagcacaataatatattcagggcccttgctgtgtgtgagctagggggtggcatgacatgcttggctgggctcatggttgctatttctgcagatgtcaaagaagttctgttaactgatgggaatgaaaaggccatcagaaatgtgcaagacatcatcacaaggaatcagaaggctggtgtgtttaagacccagaaaatatcaagctgcgttttacgatgggataatgagacagatgtctctcaactggaaggacattttgacattgttatgtgtgctgactgcctgtttctggaccagtacagagccagccttgttgatgcaataaagagattactccagcccagggggaaagcgatggtatttgccccacgccgagggaatactttaaaccagttttgcaatctagctgaaaaagctggtttctgtatccaaagacatgaaaattatgatgaacacatttcaaacttccactccaagttgaaaaaggaaaacccggacatatatgaagaaaaccttcattacccgcttctgcttattttgaccaaacatggatagaagattaagcttctcaaagacgaagaaacgtatcaagtgcatagggaatatttttacaaaaacggaaatctgtaaggggtataatcgcctgcctgcgccctttgcagcatttcacgtgtgggctatggactccacctgtcctcacccacgttattccccagctgccctctccagctccctccccgcctctttttacactctgcttgttgctcgtcctgccctaaacctttgtttgtctttaaatgtgtataagctgcctgtctgtgacttgaatttgactggtgaacaaactaaatatttttccctgtaattgagacagaatttcttttgatgatacccatccctccttcattttttttttttttttggtctttgttctgttttggtggtggtagtttttaatcagtaaacccagcaaatatcatgattctttcctggttagaaaaataaataaagtgtatctttttatctccctcccaaaaaaaaaaaaaaaaaaaaaaaaaaaaaaaaaaaaaaaaaaaaaaaaaaaaaaaaa

SEQ ID NO: 1075 - DNA, 2522 bp, human
gggaggaggaggcggtggtgtcccggctgcggggtaggagtccgcggcagcctccgggtaagccaagcgccgcgcagtgctgagttcccgcacgccgcagagccatggagatcggcaccgagatcagccgcaagatccggagtgccattaaggggaaattacaagaattaggagcttatgttgatgaagaacttcctgattacattatggtgatggtggccaacaagaaaagtcaggaccaaatgacagaggatctgtccctgtttctagggaacaacacaattcgattcaccgtatggcttcatggtgtattagataaacttcgctctgttacaactgaaccctctagtctgaagtcttctgataccaacatctttgatagtaacgtgccttcaaacaagagcaatttcagtcggggagatgagaggaggcatgaagctgcagtgccaccacttgccattcctagcgcgagacctgaaaaaagagattccagagtttctacaagttcgcaggagtcaaaaaccacaaatgtcagacagacttacgatgatggagctgcaacccgactaatgtcaacagtgaaacctttgagggagccagcaccctctgaagatgtgattgatattaagccagaaccagatgatctcattgacgaagacctcaactttgtgcaggagaatcccttatctcagaaaaaacctacagtgacacttacatatggttcttctcgcccttctattgaaatttatcgaccacctgcaagtagaaatgcagatagtggtgttcatttaaacaggttgcaatttcaacagcagcagaatagtattcatgctgccaagcagcttgatatgcagagtagttgggtatatgaaacaggacgtttgtgtgaaccagaggtgcttaacagcttagaagaaacgtatagtccgttctttagaaacaactcggagaaaatgagtatggaggatgaaaactttcggaagagaaagttgcctgtggtaagttcagttgttaaagtaaaaaaattcaatcatgatggagaagaggaggaagaagatgatgattacgggtctcgaacaggaagcatctccagcagtgtgtctgtgcctgcaaagcctgaaaggagaccttctcttccaccttctaaacaagctaacaagaatctgattttgaaggctatatctgaagctcaagaatccgtaacaaaaacaactaactactctacagttccacagaaacagacacttccagttgctcccagaactcgaacttctcaagaagaattgctagcagaagtggtccagggacaaagtaggacccccagaataagtccccccattaaagaagaggaaacaaaaggagattctgtagaaaaaaatcaaggaactcaacagaggcaattattatcccgactgcaaatcgacccagtaatggcagaaactctgcagatgagtcaagattactatgacatggaatccatggtccatgcagacacaagatcatttattctgaagaagccaaagctgtctgaggaagtagtagtggcaccaaaccaagagtcggggatgaagactgcagattcccttcgggtactttcaggacaccttatgcagacacgagatcttgtacaaccagataaacctgcaagtcccaagtttatagtgacgctggatggtgtccccagccccccaggatacatgtcagatcaagaggaggacatgtgctttgaaggaatgaaacccgtaaaccaaactgcagcctcaaacaagggactcagaggtctcctccacccacagcagttgcacttgctgagcaggcagcttgaggacccaaatggtagcttttctaacgctgagatgagtgaactgagtgtggcacagaaaccagaaaaacttttggagcgctgcaagtactggcctgcttgtaaaaatggggatgagtgtgcctaccatcaccccatctcaccctgcaaagccttccccaattgtaaatttgctgaaaaatgtttgtttgttcacccaaattgtaaatatgatgcaaagtgtactaaaccagattgtcccttcactcatgtgagtagaagaattccagtactgtctccaaaaccagcagttgcaccaccagcaccaccttccagtagtcagctctgccgttacttccctgcttgtaagaagatggaatgtcccttctatcatccaaaacattgtaggtttaacactcaatgtacaagaccggactgcacattctaccatcccaccattaatgtcccaccacgacatgccttgaaatggattcgacctcaaaccagcgaatagcacccagtcctgcctggcagaagatcatgcagtttggaagttttcatgtactgatgaaagatactctacagaacttgtcaaatctttgaaacttggaatatattgctttcataatatgaaaaaaaaaaaaaaaaaaaaaaaaaaaaaaaaaaaaaaaaaaaaaaaaaaaaaaaaaaaaaaaaaaaaaaaaaaaaaaaaaaaaaaaaa

SEQ ID NO: 1076 - DNA, 2553 bp, human
ataactcgttgcgggctccgcgcggtcccacttcccggctcccttcgcctccaggatgcgctgagccctacaacacccccagcggccgccggctcccccacgaggtgtgaatgacagaggtggtgccatccagcgcgctcagcgaggtcagcctgcgcctcctctgccacgatgacatagacactgtgaagcacctgtgtggcgactggttccccatcgagtacccagactcatggtatcgtgatatcacatccaacaagaagttcttttcccttgctgcaacctacagaggtgccattgtgggaatgatagtagctgaaattaagaacaggaccaaaatacataaagaggatggagatattctagcatccaacttctctgttgacacacaagtcgcgtacatcctaagtctgggcgtcgtgaaagagttcaggaagcacggcataggttccctcttacttgaaagtttaaaggatcacatatcaaccaccgcccaggaccactgcaaagccatttacctgcatgtcctcaccaccaacaacacagcaataaacttctatgaaaacagagacttcaagcagcaccactatctcccctattactactccattcgaggggtcctcaaagatggcttcacctatgtcctctacatcaacggcgggcaccctccctggacgattttggactacatccagcacctgggctctgcactagccagcctgagcccctgctccattccgcacagagtctaccgccaggcccacagcctgctctgcagcttcctgccatggtcgggcatctcttccaagagtggcatcgagtacagccggaccatgtgatgtcggctgggcagccgccaccaggccccacccttcagccgcccgcagagcccgccttcctgtccatctgaccccttctgttttctgcaaggagctgccagccatctaactgggctcgtcggcctgccccagctgcaggcccggtgctacacgggctcgggaacagaacaccgtgggcatgcgcagagcatgcccatccgtggcaggtacgccacagcagacacaaaggctcttcagctcccctccctgcttctggaaacctctgcctgctgccctggccctgcccccctgcgcatgcaccatccccagggctgacccagtgtggctgcattcactgggaggggcctgccctcactgggcctctcccactccgctgcctgttcttgcagctccttcctggaaagctggaggggactttctcctgcaagggaggaacgcaagtattatggacacacttgaccgtaaaggcacaggagcctcgggacaagggggcgcaataaagggaatggcccgtccccttccagaaccagcccaaagaagcctggggggtgaggagtggcccccactcctccatgaggggctgatgaggggtgggcagcctgggggaggctttcctcgcaagcacagagctctgaggctcagccccctggcacaggcggtcacgcatcaggacggttcctactcctcagcaccttccgtgcagttaccagtgccctgggaggtcacactgcccgtcggaccttggcatgctccattcagctgacctgctgaggacaggcatcgccgagactccttgggtcctccccgccctccctcatgctgccacaagctgctgctccaaggcctggccacatgcagacaggaggaagctgagctcgacattaggcctcaaggctgccatctgtcttgtagggcctggccttgtgggcagggggcagtcctgtgccttgtgggccctcagcctctgagggcagagatgctgtcagtgccgcaggtgcatcacatacttctagcatcctctccaccctgcattccaaatgctgcttgctgcctgccctgccctccgatgcaggggtggggtggggggcggagtcccgcccagcatagctgcagtgtcacaaagccatggcagagggtcctagcggcgccaccctgccccagcctgaggaggagggagagggaggaacaaccctgggcagacggggtctcagggacctgtgtccttccgcctccagagctgcccagccacgggctctcagggtgctggggcagccccaggtcccctcttgaactcagctggggccaggggccctcagaatgaaggcaggcaccaggcaggagcagcatccccctccttgacggtgctggcaggagggccgcgccatgctgactgcttgaacctctgctgacctgacagtgctggcgggagggccgcaccatgctgactgcctgaatctctgctgaggctgcctgcctgccgggcccagctcagcgccctctccactgcgaatcagtggcgatcatgtgatttctatttctgccccacagggtaagggacgagtcttctggaaggctctgccatggacatttgtcctcgggctcagaggccccaccctgccccacacctgcccctaatcactgcagtgtccagcccagtgttgaacagattgtagcgttctgtctcattacgagcaaataaatagactttcattgg

SEQ ID NO: 1077 - DNA, 2268 bp, human
cggactttcaaagacttggagttcccacgggtgtgggttcgagaccttcctctgccagttcccagctccgctaccctgagcaaatgacttacgctccattggattttccgcaatgtggctgaaggtggggggcctacttcgggggaccggtggacagctgggccagactgttggttggccttgtggggccctggggcctgggccccaccgctggggaccatgtggaggttcttgggcccaaaagttttaccaggatgggcctgggagaggcctgggtgaggaggacattcgcagggcacgggaggcccgtcccaggaagacaccccggccccagctgagtgaccgctctcgagaacgcaaggtgcctgcctcccgcatcagccgcttggccaactttgggggactggctgtgggcttggggctaggagtactggccgagatggctaagaagtccatgccaggaggtcgtctgcagtcagagggtggttctgggctggactccagccccttcctgtcggaggccaatgccgagcggattgtgcagaccttatgtacagttcgaggggccgccctcaaggttggccagatgctcagcatccaggacaacagcttcatcagccctcagctgcagcacatctttgagcgggtccgccagagcgccgacttcatgccccgctggcagatgctgagagttcttgaagaggagctcggcagggactggcaggccaaggtggcctccttggaggaggtgccctttgccgctgcctcaattgggcaggtgcaccagggcctgctgagggacgggacggaggtggccgtgaagatccagtaccccggcatagcccagagcattcagagcgatgtccagaacctgctggcggtactcaagatgagcgcggccctgcccgcgggcctgtttgccgagcagagcctgcaggccttgcagcaggagctggcttgggagtgtgactaccgtcgtgaggcggcttgtgcccagaatttcaggcagctgctggcaaatgaccccttcttccgggtcccagccgtggttaaggagctgtgcacgacacgggtgctgggcatggagctggctggaggggtccccctggaccagtgccagggcctaagccaggacctgcggaaccagatttgcttccagctcctgacgctgtgtctgcgggagctgtttgagttccgattcatgcagactgaccccaactgggccaacttcctgtatgatgcctccagccaccaggtgaccctgctggactttggtgcaagccgggagtttgggacagagttcacagaccattacatcgaggtggtgaaggctgcagctgatggagacagagactgtgtcctgcagaagtccagggacctcaaattcctcacaggctttgaaaccaaggcattctccgacgcccacgtggaggcagtgatgatcctgggggagcctttcgccacccagggcccttacgactttgggtcgggggaaacggcccgccgcatacaggacctcatcccggtgctgctgcggcaccggctgtgtcccccacccgaggagacctatgccctgcaccgcaagctggcaggggctttcctggcctgtgcccacctccgagcccacatcgcctgcagggacctcttccaggacacctaccaccgctactgggccagtcgccagccagacgcagccactgccggcagcctccccaccaaaggggactcctgggtggatccctcatgacagcctccatgggggattcagtccccagagcaggccgtaccctgctgtagtgcctcttatcccttccccgtctgccctgggtcagaggagcccccttgggcttcccagtcttgcctggctctcctccttggcccagaagctcaggatccctggggctggggaactcccaacttcgtgccctagatcctgcacctccccactcgaaagtgggtatccgaaaactaagccagggaagcggttaacttatctttgccaacatttgagggagccttgggccgctgcatgtcgttatgcagatcagactcatcagggggagccctcacctctgcctcaagcctcccgtggaaggcgagatggtcctggaggcagtcctcacctctgcctccctcgctcctccaacagctgccttctcccgggttccagcctctcagtgtgttggagaggtaggggtgcggggtgggggggagctgaatcttcaatcggaataaaagcagccctccccttccaaaaaaaaaaaaaaa

SEQ ID NO: 1078 - DNA, 2064 bp, human
gctaaagagcgcgggtcctcggccgtggagggtcaagtggcttcttctgagcgctgagggaggggagcgtgcgtaggggatggtgccagcgctgcgttatttggttggtgcctgcggacgggcccgcgggcttttcgccggtggctcccctggggcgtgcgggttcgcgtctgggaggccaagaccgctgtgtggaggtagccgcagcgccagcaccagctcatttgatatagtcatcgttggtggcggaattgtggggcttgcctctgccagagcactcatcctgcgacatccatcactttctattggtgttctggaaaaggagaaagatttagctgttcaccagactggacataacagtggtgtcatacatagtggaatttattataaacctgagtctctgaaagccaaattatgtgtacaaggtgcagccctcctctatgagtactgtcagcaaaaggggatttcctacaagcagtgtggcaagcttatagtagctgttgaacaagaagaaattcccagacttcaggccctatatgagaaaggcctccagaatggtgtcccgggcctgaggctgatccagcaggaggatataaaaaagaaggagccatattgtaggggtctaatggctattgattgtccacatactggcattgtggactatcggcaggtggctttgtcatttgcccaggatttccaagaagcaggtggctctgtcttgaccaattttgaagtaaaaggtattgaaatggctaaagaaagtccttcaagaagtatagatggaatgcaatatccaattgttataaagaatacaaagggagaggaaattcgatgtcagtatgttgtgacatgtgcaggactttactcagaccgtatttcagagttgagtggctgcactcctgatcctcgaattgtaccattccggggagattacctgcttttgaagccagaaaaatgttatcttgtaaaaggaaatatttatccggtcccagatagccggtttcctttcctaggagttcacttcacaccaaggatggatggcagtatttggctagggcctaatgcagttcttgcctttaaacgagagggttacagaccctttgacttcagtgccacagatgttatggatataattatcaatagtggcttgattaaactggcatcccagaatttttcctatggagttactgaaatgtataaagcatgttttcttggtgcaacagtgaagtatcttcaaaaattcatccctgaaattactatcagtgatatacttaggggcccagctggagtaagagcccaggccctggatagagatggaaatctggtagaagattttgtatttgatgcaggagttggggatattggaaatcgcattcttcatgtgagaaatgcaccttctcctgctgctacttcttccattgcaatttctggaatgattgcagatgaagtacaacaaagatttgaattataaataatgaaaggagctaggtatgcactgtaatcttcatgtcagcaacaagaatgtactaattgcattctttaatttaaaaaatggtttttaaactttcgtttttaggtcaaagataaccactgcattgttaaaatgatgtaacatagaaataataattttctacaaaaattagccaggcatggtggcgcatgcctgtaatctcagctactcaggaggctgaggcaggagaatcaattgaaccgagcagacggaggtgagctgagagctgagattgcaccactgcactccagcctgggtgacagagcaagaaaataataataataataattttcaaaatgttaggctgggggccgtggccagcactttgggaagccaaggcaggtagattgtagcccaggagtttgagaacagcctgggcaacatggcaaaaccctgtttctacacaaagttagctgggtctggtgcctctgtggttccagctcctcagtaggctgaggtgagaggatcacttgagcccaggaggtctaggctgcagtgagcttatgttcatgactctgtattccaggctggatgatagagcaagatcttgtctc

SEQ ID NO: 1079 - DNA, 2636 bp, human
acagtgggccatggagttcccgttcgatgtggacgcgctgttcccggagcggatcacggtgctggaccagcacctgaggcccccagcccgccgacccggaaccacaacgccggcccgtgttgatctacagcagcaaattatgaccattatagatgaactgggcaaggcttctgccaaggcccagaatctttccgctcctatcactagtgcatcaaggatgcagagtaaccgccatgttgtttatattctcaaggacagttcagcccgaccggctggaaaaggagccattattggtttcatcaaagttggatacaagaagctctttgtactggatgatcgtgaggctcataatgaggtagaaccactttgcatcctggacttttacatccatgagtctgtgcaacgccatggccatgggcgagaactcttccagtatatgttgcagaaggagcgagtggaaccgcaccaactggcaattgaccgaccctctcagaagctgctgaaattcctgaataagcactacaatctggagaccacagtcccacaggtgaacaactttgtgatctttgaaggcttctttgcccatcaacatcggccccctgctccctctctgagggcaactcgacactctcgtgctgctgcagtcgatcccacgcccgctgctccagcaaggaagctgccacccaagagagcagagggagacatcaagccatactcctctagtgaccgagaatttctgaaggtagctgtggagcctccttggcccctaaacagggcccctcgccgcgccacacctccagcccacccacccccccgctccagcagcctgggaaactcaccagaacgaggtcccctccgcccctttgtgccagagcaggagctgctgcgttccttgcgcctctgccccccacaccctaccgcccgccttctgttggctgctgaccctgggggcagcccagctcaacgtcgtcgcaccaggtaataggagttgaagggctaaggagcctcacagctataaaagaggatgttagaaatggcaaagggcaatttgaatccatcagagagatggatcaataagatgggtggcttggggggggtcctgaaacctttcaagaaaaatatttgtgcaagtgatctgggaaaaaaatgcagtgaaggagcagaataggaccttatatggagcctagggaccctggctttaatgtgagagttatgtggaatggtaggaagaacaccgagatccatcgagttgggggaacagagccttctaagattgggaaaatcttcgcttaatacttgctggggaaggggcagtgtctgacagagagtgggaagccactggcttgtgtgccaagagtccatcgcagcaggcagggagtgggcatttcctttatttctctccctttctcttcacctctgacttctctgtttttctctcccccgccccccgccatttcccatctcccttcctcccatccataacatccttccacagctcccttccccgctctgaggagagtcgatactaacagctaccctatccctgccctgggagacctggggtgggcagggaacccctccctgaggacctcagaccctctcttccattgcatcctgtaggacccagtggaacctgacagagcccataggattccctcttctactttcttagacagcagggatgtcagggtctcaaactgcctaacactttgtagcttttcttaacacaaaagcaccccttctctcctaacttgggctctgaatactttcccaacaggaagtctgatctgttgccagacttcttggttagatggctcatacatttatctagagaagcacactcttgcttgctgtcaaactttagaacaccatggaaggtctaagggcatcctgtgccagggaaactttttaaggaattttatctatgggataaaccccatattccctctagtgtctactggtggctctaatactgctttgtgctgcctgccacacttgccctttgagcctgcgaatggccgctagtgagcaagctctgcttcagagcagtctagttaggtagaacagggacttaccagcttcccaaagggatctactcaccattgccaaactcttcatttccacattttgtgtaggtgtcagggaaccccaaactggtgttgctttggggtctctaaaggagattggctgacaccaccatttcccccagatcctgattctctgggggaggttgtttcttgagagtagatccagagtgtcaaggatctgttagatcctggaatcccttcttgcatccatccctccctggtagctaggtcccgatatactcctgtcttgtgagattgtcgagatgagatgggggaccactcttcctctgtccttcctctctcctttcctccatagcaaggacgaccttccctgctccatgcccagagtatagctagatcccttcccctccctaccctctgaatgtgtgctagatcaggtgccccactgtgtttcctgaaatccttgggagccggatctccccatctcccctactcactcttcccttttcttctctcagtgttgtctgaataaagtgtgaaatcttttgtgttttctaaattgacattttcaatgaaaaaaagaatcac

SEQ ID NO: 1080 - DNA, 2113 bp, human
agaacgtgctgtgtggatgcggcgaaacgctgaggcgcggccttcgttgtgtggtggggactcacaagaccgacgtcaagatgatgctttcaagggccaaacctgctgtaggcagaggcgtacagcacactgacaaaagaaagaagaaaggtaggaagattccaaaactagaggagctactttcaaaaagagatttcactggagctattaccctgttggagttcaaacgtcatgttggggaagaagaagaggatactaatttgtggattggatattgtgcctttcacctgggtgactacaagagagctctggaggaatacgaaaatgctacagaagaggaaaattgtaattctgaagtctgggtgaacctagcttgcacctacttctttcttgggatgtataaacaagctgaagcagctggatttaaagcttcaaaaagccgactccaaaaccgcctcctcttccacttggctcacaagtttaatgatgagaaaaaattgatgagctttcatcaaaatcttcaggatgtcacagaagatcaactcagtttggcctcaatccactatatgcgatctcactaccaagaagctatagatatatataagcgaatactgctagataacagggaataccttgcccttaatgtttatgtggccctctgctactacaagttggattactatgatgtgtctcaagaagttttggctgtttaccttcagcaaattcctgatagtaccatcgcactcaatcttaaagcctgtaaccattttcgcctttataatggcagagcagctgaggcagaactcaaaagcttgatggacaatgcttcttcatcctttgaatttgctaaagaactcatcaggcacaatctggttgttttccgaggaggtgaaggggctttgcaggttttacctcccctagttgatgtcattcctgaagctaggctaaacttggtgatttactaccttcgtcaagatgatgtacaagaagcttataacttaattaaggatctggaacctactactcctcaggagtatattctcaaaggagtggtcaatgcagcccttggccaggaaatgggttcaagggatcatatgaaaattgcccagcagttcttccagttggtgggaggatcagctagtgaatgtgatacaataccagggaggcagtgcatggcttcctgtttcttcctgcttaagcaatttgatgatgttttgatttacctcaactcatttaagagttacttctataatgatgacatctttaactttaattatgcccaagccaaagctgcaacaggcaataccagtgagggcgaagaggcgttcctcttgatccaaagtgagaagatgaaaaatgattacatttacctcagctggttagctcggtgctatattatgaataagaaaccaagactagcctgggaactttatcttaagatggaaacctccggcgagtccttcagtctcttacagctcattgctaatgtctgctacaagatgggccagttttactattctgccaaagcttttgatgtccttgagaggctggatcctaaccctgaatattgggaaggcaaacggggtgcctgtgtgggcattttccagatgatcatagctgggagagaacccaaagagacccttcgagaagtgctccatttactgagaagcacaggtaacacccaagtagaatacatgatccggatcatgaagaaatgggccaaagaaaacagagtgtccatctaaaatagcgccagcgtcctaggaaccagcttctactttgacataaaactggaaatcattttcactccagtttaatctgtgatacagggctctgttttattgacattttccttccttgctctttaagcctcaaggtcagagactgacttgctgagacttagtctcctggctgaacagagtgccatagtctgtgaccctgtatgatcctagtagcaataagattttggacttatctggtgcctttcttccaaaaatgctcagagtacttttatgcaatttactgactttaaggaaaacagtataacttttttttgttagcattttatggcattgtctcctggctgcaataacaaacatctttgatgttcaag

SEQ ID NO: 1081 - DNA, 2381 bp, human
aagtggcaccagcacttccggtacggaaaactcgctgctgccccaacctggcttgacaggcttggtctctgcaagtggctctcagccccttcttctttcctgcctcaccttccaattcgtttgccgccgccgtcccgcagctgctgtttccggagttgccccttccccatgttccggggcaggagtccgcaaagcgaagatccgcccgccggttccccatcatgtccgaactgactaaagagctgatggagctggtgtggggcaccaagagcagccccggtctctcggacaccattttctgccgctggacgcaagggtttgtgtttagtgaatcagagggatctgcattagaacagtttgaaggtggcccctgtgctgttattgcacctgttcaggcatttcttttgaagaagctcctgttttcttcggagaagtcttcttggcgggattgttcagaggaagagcagaaggaactcctttgtcataccttgtgtgatattttagaaagtgcttgttgtgaccactctggatcatactgcttggtttcatggttaagaggaaagacaactgaggaaactgctagtatttctgggagtcctgcagagtctagttgccaagtggaacattcttctgccttggctgtcgaagagcttggctttgagcgatttcatgcattaattcaaaaaagatcgttcagaagtttaccagaattaaaagatgctgtcttggaccagtattcaatgtggggaaataaatttggagtattgctttttctgtattctgtattactgacaaagggcattgaaaacataaaaaacgaaattgaagatgcaagtgaacccttgatagatcctgtatatggacatggcagccaaagtttaattaatctcctgctgacgggacatgctgtttctaatgtatgggatggtgatagagagtgctcaggaatgaaacttcttggtatacatgaacaagcagcagtaggatttttaacactaatggaagctttaagatactgtaaggttggttcttacttgaaatctccaaaattccctatttggattgttggcagtgagactcacctcaccgtattttttgccaaggatatggctttagttgcccctgaagctccttcagaacaagccagaagagtttttcaaacctacgacccagaagataatggattcatacccgattcacttctggaagatgtgatgaaagcattggaccttgtttcagatcctgaatatataaatctcatgaagaataaattagatccagaaggattaggaatcatattattgggcccatttcttcaagaattttttcctgatcagggctccagtggtccagaatcttttactgtctaccactacaatggattgaagcagtcaaattataatgaaaaggtcatgtacgtagaagggactgcagttgtgatgggttttgaagatcccatgctacagacagatgacactcctattaaacgctgtctgcaaaccaaatggccatacattgagttactctggaccacagatcgctctccttcactaaattaatttgtctaagtatttataaggaagatcttaataacagatgttgaaagaaggagtcaagactggcaattggctggattaagctaaacactggtatcactgattaactgtaaataacaattaaaaacacattttcagtgtttatgatatgtttaaattatttgtcctaaagctttatgttaaagattatcctattttaccccttcgtgtgaaatttactagcaaaattaagctttcatcaaagttcatcacttttgcattcagatacttggtcatttacttaccaaattacaaacgcaatactacagcatttgtatattaagtatcacagttactattgataaactacttttgggttttatttcattgaggcactttttttattgtttgaatgattccggcttgtaatatatcagcctctacaatgaaatgcagaagagttcatttttctaagatctgtttttcattagaaatattgacaaataacacattgtcaacctggatcctttgacaatttacttaactctggcatgttcacaaaaagtagaaactctaagagaccattaccatttattcacagatgtataggggatgtattctaaaaactgacagaaaagagaatctgatagtcaacactgttaacttttactgtgtaattgccaaatacacttttccaaatttgtcccaacagccctgtaagccagctttcttctatatttataaacacgataaatgcatgagaagatctgttattacattagtatattacgttatttattatgatcctagttgatggcctaaataaacacctttttctttaactgt

SEQ ID NO: 1082 - DNA, 5727 bp, human
atgtgggtggccaagtggctgactgggctgctctaccatctctcgctcttcatcaccaggtcttgggaagttgacttccaccccaggcaagaagccctggtgaggacactgacctcctacgaagtagtgatccccgagcgggtcaatgagtttggagaagtgttccctcagagccaccacttcagccggcagaaacgcagctccgaggcgctggaacccatgccgttccgaacccactatcgcttcactgcctacgggcagctcttccagctgaacctgaccgccgatgcatcctttctggccgccggctacaccgaggtgcacttgggaaccccggagcgcggggcctgggagagcgacgcagggccctcggacctgcgccactgcttctaccgcggccaggtcaactcacaggaggattacaaggccgtcgtcagcttatgcggaggcctggtgggaacatttaaaggacagaacggtgaatatttcttagaacctataatgaaggcagatgggaatgaatatgaagatggtcacaacaagccacatcttatatacagacaagacttaaataactcttttctgcagactctgaagtattgcagtgtgtcagaaagtcaaataaaggaaaccagtttaccctttcatacctacagcaacatgaatgaagatcttaatgtaatgaaagaaagagttttaggacacacatcaaaaaatgtaccattgaaagatgaaagaagacattccaggaaaaaacgtcttatatcatatccaagatacattgaaattatggttacagctgatgctaaagtggtttctgctcatggatcgaatttgcaaaactatatactgactctaatgtcaattgttgcaacaatctacaaagatccaagtattggaaatttgatacacatagtagtggtaaaattagttatgattcaccgtgaggaggaaggaccagtcattaattttgatggtgctaccacattaaagaacttttgttcatggcaacaaactcagaatgaccttgatgatgttcacccttcccaccatgacactgctgttcttatcactaggtatgatatttgttcatctaaagagaaatgtaacatgttaggtttatcatatttaggtaccatatgtgatcctttacaaagctgctttattaatgaagaaaaaggactcatttctgcttttactatagcccatgagcttgggcacacacttggtgttcaacatgatgataatcctagatgtaaagaaatgaaagttacaaagtatcatgtaatggcccccgctttaagttttcacatgagtccttggagctggtcaaactgtagtcggaaatatgttactgaattcctagagactggttacggggaatgtcttcttgacaaaccagatgaagaaatatataatctgccttcagaacttcctggatcacgatatgatggaaacaagcagtgtgagcttgcgtttggtcctgggtcacaaatgtgtccccatataaatatatgcatgcatctgtggtgcacaagcacagaaaagcttcacaaaggctgtttcactcaacacgtgccaccagcagatggaacagactgcggtcctggaatgcattgccgtcatgggctatgtgtaaacaaagaaacggaaacacgtcctgtaaatggtgaatggggaccatgggaaccttacagttcttgttcaagaacatgtggaggcggaatcgaaagtgcaaccaggcgctgtaatcgtcctgagccaagaaacggaggaaattactgtgtgggccgcaggatgaaatttcgatcatgtaatactgattcatgtccaaaaggcacacaagactttcgagagaagcagtgctctgattttaatggtaaacatttggacatcagtggcattccctctaatgtgaggtggcttccaagatacagtggcgttggcacaaaggatcgttgtaaactctattgtcaggttgctggaaccaattatttctacctattgaaggatatggttgaagatggtactccttgtggaactgaaactcatgacatctgtgttcaaggccagtgtatggcagctggttgtgatcacgtgttaaactccagtgccaagatagacaaatgtggagtgtgtggtggggacaactcttcatgcaagacaataacaggtgtcttcaacagttctcattatggttataatgttgttgtaaagattcccgcaggagcaacaaacgttgacattcgtcagtacagctattctggacaaccagatgacagttaccttgcattatctgacgctgaagggaattttcttttcaatggaaattttcttctaagtacgtcaaaaaaagaaatcaatgtgcaaggaactgttattgaatacagtggatcaaataacgcagttgaaagaattaatagtactaatcgacaagagaaagaaattcttattgaggtgttgtgtgtgggtaatttatacaaccctgatgtacattattccttcaatatccctttggaagagaggagtgacatgttcacatgggacccctatggaccatgggaaggctgtaccaaaatgtgtcaaggtcttcagcgaagaaacataacttgcatacataagagtgatcatagtgttgtgtctgataaagaatgtgaccacttgccacttccatcatttgttactcaaagttgcaatacagactgtgaactaaggtggcatgttattggcaaaagtgaatgttcatcccaatgtggtcaaggatatagaaccttggacatccattgcatgaagtattccattcatgaaggacagactgttcaagttgatgaccactactgtggtgaccagcttaaacctcctacccaagaactatgccatggtaactgtgtcttcacaagatggcattattcagaatggtctcagtgttccaggagttgtggaggaggggaaaggtctcgagaatcttattgtatgaataactttggccatcgtcttgctgacaatgaatgccaagaactgtcccgagtgacgagagagaattgcaatgaattttcctgtcccagttgggctgctagtgaatggagcgagtgccttgttacatgtggtaaaggaacaaagcagcggcaggtatggtgtcagctgaatgtagatcacttgagtgatggcttctgtaattcaagtaccaaacctgaatctctgagtccatgtgaacttcatacatgtgcttcctggcaagtaggaccatggggtccttgcacaaccacatgtggacatgggtatcagatgcgagatgttaaatgtgtcaatgagctagctagtgcagtgttagaggacacagaatgccatgaagctagtcgccccagtgacagacagagctgtgtacttacaccttgctcatttatttctaaacttgagaccgctttattaccaactgttctcataaaaaagatggcacaatggcgacatggttcttggaccccatgctccgtatcttgtggaagaggtactcaagcccgctatgtaagctgtcgtgatgctcttgatagaatagcagatgaatcatattgtgcccacttaccccgacctgctgaaatatgggactgttttaccccttgtggagagtggcaagcaggggattggtcaccctgttcagcttcctgtggccatggaaaaacaactcgacaagttttatgcatgaactaccatcagccaattgatgagaattactgtgatcctgaagttcgccctttgatggaacaggaatgtagcctggcagcctgccctcctgcacacagccactttcctagttcccctgtgcagccaagctattatctaagcacgaatttgccattaactcaaaaacttgaagataatgaaaatcaggtggtccatccatcagtcagaggaaaccagtggagaaccggaccatggggacagtgctccagcagttgttctggaggtcttcagcatagggctgtggtctgccaggatgaaaatggacaaagtgctagttactgcgatgcagcctccaagcctccagagttacagcaatgtggtccagggccttgtccacagtggaactacggaaattggggagaatgttcacaaacatgtggaggaggaataaaatcaagacttgtaatatgtcaatttcccaatggccaaatattagaagatcacaactgtgaaattgtaaacaagccacctagcgtaatacagtgtcatatgcatgcttgccctgctgatgtgtcatggcatcaggaaccatggacatcgtgctcagcttcttgtggtaaaggtagaaagtaccgtgaagtgttttgcattgaccaattccaaaggaaattagaagacacaaattgcagtcaagtacagaaacctccaactcacaaagcctgtagatctgtcagatgcccttcatggaaagccaatagctggaatgagtgctctgtgacctgtggctctggagttcagcagagggatgtatactgcagactgaaaggtgttggtcaggtggttgaagaaatgtgtgatcagtccacccgaccttgttctcagaggcgatgttggagtcaggactgtgtgcagcacaaggggatggaaagagggaggctgaattgttcaacatcatgtgagagaaaagattcacatcaacgaatggagtgcacagataaccaaatcagacaagtgaatgaaatagtctataattcttcaaccatatctcttacatccaagaattgcaggaaccctccttgcaattacattgtggtaacagcagactcatcacagtgtgcaaacaactgtggatttagttacagacaaaggattacatattgcaccgagatcccatctactaagaaacataagctccatcgacttcggcctatagtttatcaagaatgccctgtggtgccttcctctcaggtttaccaatgcattaacagctgtttgcatttggccacttggaaagttggaaaatggagcaagtgctcagtgacttgtggaattgggataatgaagagacaagtgaaatgcattaccaaacatggtttgtccagtgacttatgtttaaaccatttaaaaccaggtgctcaaaagaaatgttatgccaatgactgtaaatcatttaccacctgcaaagaaattcaagtgaaaaaccacattagaaaggatggtgactattaccttaacattaagggaagaataataaagatttattgtgcagacatgtacttggagaaccctaaggaatatttaacactggtccaaggtgaagaaaacttttctgaagtgtatggctttaggctaaaaaatccatatcaatgtccttttaatgggagtagaagggaagactgtgaatgtgacaatggacacttagctgctggatacactgttttcagcaaaataagaattgatctcacttccatgcaaattaaagctacggaccttcttttttccaaaacaatatttggaaatgcagttccatttgccacagctggagattgctacagtgctttcagatgcccacagggacagtttagcattaatttgtcaggaactgggatgaagatatccagcacagcaaagtggctcactcaggggagttatacctctgtcagcatacgaagatcacaggatggaactagatttttcggcaaatgtggagggtactgtggaaagtgtcttcctcacatgactactggtctcccaattcaagtcatatga

SEQ ID NO: 1083 - DNA, 2490 bp, human
gggacgcggggcgctgggcgcggggctgggggcgcaggccccgaggccgcaggagcgcgcggagcggcgatgagcaggcggccggtggcccgcggggcgcggagcccgtgacagcctcggccaggcgggcgctgcgatggaggccgagggcctggactggctcctggtgccactgcaccagctggtgtcctggggcgcggccgcggccatggtcttcggaggggtggtgccctacgtcccgcagtatcgggacattcgcaggacgcagaacgccgacggcttctccacctacgtgtgcctggtgctgctggtggccaacattttgcggatactcttctggtttggaaggcgctttgagtccccgctgctgtggcagagcgccatcatgatcctgaccatgctgctgatgctgaagctgtgcaccgaggtccgtgtggccaacgagctcaacgccaggcgccgctcctttacagctgcagatagcaaggatgaagaagtcaaggttgcccccaggcggtccttcctggacttcgacccccaccacttctggcagtggagcagcttctcggactacgtgcagtgcgtcctggccttcacgggcgtggcgggctacatcacctacctgtccattgactccgccctgtttgtggagaccctgggcttcctggctgtgctgaccgaagccatgctgggtgtgccccagctttaccgcaaccaccgccaccagtccacggagggcatgagcatcaagatggtgctcatgtggaccagtggtgacgccttcaagacggcctacttcctgctgaagggtgcccctctgcagttctccgtgtgcggcctgctgcaggtgctggtggacctggccatcctggggcaggcctacgccttcgcccgccacccccagaagccggcgccccacgccgtgcaccccactggcaccaaggccctctgacagtggggaggacgaggatgtgggaccgccagccgtgggcactggtgggccctgacctccccgcggggagggtgggtgccgtggcccctgcaggtgtggcagagatggggcatgggcattggggtctccatcagcctctgtggggtgtctcagggtgggcagtgggggtggggctgggacgctgtttgtgctcagcggggacagccagggttgatctggccccgagggttttggatgtttttaggatgacataaaaagcaagtgttttccccatttcctcttatgaaacaccgtctgagcccaaggtacacattgggcggcctgcaggaacctgctccaggtggacacacgggccagcagccgcgaaccttgaagctggggtgaccgcaggagaccctgtaaggcctgtgagcggagccctcgaccccgtgacaccctggccagacaccctgcttggactggggtggcctctgctacccaggggtctggcacgggggagggctggggctttctctgcctggtacacacggaaaggcggctgtgcggacgcagggtcaccgtgctccgggttttctgacagttggtgtttcctgggcctttggagtggctgcgaggcctgaacgccttgtggatccgctgtgtccagcccggctgagcatcgccagggctagctcatgctgctcttgtcagcctctggttctcctcgagtccttggggacgtggcagatgccagcgaccatcagacaacgtggaggccctcatgggcaatggctgagggggccgggctgaggctgtgcacatgcagtctgcacgccactcttgggctctgctggcggagatccccttccttctgggtgcagactgcacctccggatgcagttttgatgtccatcttccaggagagagacggtctcgggtccagggagtggagggggctgcccctgccgtgcaggtcctggccgatggcgccttaccctgctgccctgggcttttggcctgaagcaaattcctgagtggggggtactggggcctgccgcatcctgtcctgtccactgcccacccccgtgtgctggctccctcacttctggctgcagtgggagccgccagtctgacccttgtcaccgcacgctctgcccccaccccgttgcaagaggtcacaccatgtcagcagccttgcactgaccgcagccggcccccaggcctcagagttctggatgcttccgtgcggctccaacaggcatcgtcttcccttccgcaggtggaggggccgcttcccgcaggcatctgagctctgtgccggggccgtggccatgggaagatgttccacgctgcctcctcctcgagttttcctcggaaacactcttgaatgtctgagtgagggtcctgcttagctctttggcctgtgagatgctttgaaaatttttatttttttaagatgaagcaagatgtctgtagcggtaattgcctcacattaaactgtcgccgactgcaaaaaaaaaaaaaaaaaaaaaaaaaaaaaaaaaaaaaaaaaaaaaaaa

SEQ ID NO: 1084 - DNA, 3755 bp, human
ggcgcttccggcagcggcggcggtggtgaaggccgatgctgtgggggtgggcgtggagagaattcttctgtgggtcctctggtgttgagtggtcggcttggtgtggtgtgcggaggagctccaggcccgtcggcgcggagtggtctcacgtgtgaaacatggctacagattggctgggaagtattgtgtccatcaattgtggagatagcttgggtgtctatcagggaagagtgtcagctgtggatcaggtcagccagaccatttctctcacccggcctttccataatggagtgaagtgtcttgttccagaagtcaccttcagggcaggtgacattacggagttaaaaattctggagataccaggacctggagacaaccaacattttggagaccttcatcaaacagaattaggcccctctggtgctggctgccaagtgggcatcaatcagaatggcacaggcaagtttgtcaagaagccagcctcttccagcagtgcccctcagaatatccctaagaggacagatgtgaagagccaggatgttgccgtttccccgcagcagcaacagtgctcaaagagctatgtcgacaggcacatggaatccttgagtcagtccaaaagtttccgtcgtcggcacaactcctggtcatctagtagcaggcacccaaatcaggcaactcccaagaaaagtggtttaaagaatggccagatgaagaataaagatgacgagtgcttcggggatgatattgaggagatcccagacacagattttgattttgaagggaacctggctctttttgacaaggcagctgtgtttgaggagattgatacctatgaaaggagaagtggtacccgttcccggggcatcccaaatgaaaggcccactcggtaccgccatgatgagaacatcttggagtccgagcccattgtctatcgacggatcatagtgccccacaacgtgagcaaggagttctgcacggactctggcctggttgtcccaagtatttcctatgagctgcataaaaagctgttgtccgtggctgagaagcatgggctgacccttgagcggagactggagatgacaggtgtgtgtgccagtcagatggcactgaccctcctcggaggacctaacaggttgaatcccaaaaatgttcaccagaggcctacagtggctctactgtgtggacctcatgtgaagggggctcagggtatcagctgtggaaggcacctagccaaccatgatgtccaggtcatccttttcctgcccaattttgtcaagatgttggaatctatcaccaatgagctgtcgctcttcagcaagacccaaggccaacaagtgtctagcctcaaagatctgcccactagccctgtggacctggtcatcaactgcctggattgccctgagaacgtcttcctgcgcgatcaaccctggtacaaggcagctgtggcctgggccaaccagaaccgggcaccagtactcagcatagaccctcctgtgcatgaagtcgaacagggcattgatgccaaatggtcactggcactgggcctgcctctgccactgggggagcacgcaggccgtatctatttgtgcgacattggcattccccagcaggtcttccaggaggtgggcatcaactaccactcgccctttggctgcaagtttgttatcccactgcactctgcttagagggttcctgcgcaggcaggactctgctgtcccctgctgctcctgataacaaacgccttaaggatatgaagcttcatggaccttgttaaagttttttctcttttgggtttgtttcttctgtgagagaacagaacttacttaaaactgacctgtcacttgctcttagccagggaagtctttcccactgggttccgggctgggtggcaggctgagcgtgcagcaactccaggcatctctaccctcagccccctgcacggccaggtgggcctttgtttacagccgtaggcagctctcaagactgtgtttcaggtttacagccactgggcctgggcacacacattgaagagtgggccaggtcctgtctgggggcctgtacctgctctatttcagagcttgtggctttgtgtctcccctgctttccccacgcagacagcccttcctctgtagaaccagctgcacggcagctgtccaccagagggcagacctgcactctccattcatgtccagggctgtgacagaccaggccttcccctagccccacaagttgatttggggggttttgacccttactcctgagctgatccaagttttatgctgatttttccaaggatctctccctccttttccctccatcactcagaggtagggaagggggcggcattaggatggtgttactgtattgggattttatgttgttctgtcgtcttcagcacaggtagtataaggttatattactgtagaaccacagtgcccatcttgccagcagtgcccgcccccaccctcaaagctgagcaggttgagcctttgcctagtctggggccagacccctcagatggggatatccctgggggagcctggtgctgaaccagaagaggcttcctggtgcttctgtcctaggccaccactcctccagccctttgcccgcacatacatgccccacctactctttcatcccctctgcccttcccctgaaacggtcctttgcagctgtcatcccagagcaggcagatgggctcccgtgcttgagctccaccccagctcttacatcatctgggctttgaaccttttacatttgtccagtctagatgagtaggcttggggccagcaccctgtctcaaagatggcaaaatgaggctagttctggatgagctagctggtgtgggttccaaccataggaacacactgatgctcaaatcctaaggtgccaagctctaggccctggaggctggtagaacaggatctatgcctggaatcctggcagggattcctgtcaaggacttgtgtttaagcctgcttcagggcttcaggctgcttctgctctgtgtctgcccaggctggctgagcgggtggatgggtggacagaagggctcaccaaggattgtggacatagggtaggccctggtaccacgggtttcaggctgttatcacttcccttgtaggaacatagccagaagcagatgagccagggtagagggctggcccctcctctcatcttcccttcagtcttaaattgtctccagcgatgggaagaggccagggactgtaacccttgtgctgtgtattctctgagcctctgctcactctcagggccaagcagctcccaagccggggccctctcttggccaaaatctgaggagcagtctaggttacaggctttttggtaggtaggttctggctgcctgttaatgcagttaggccccctgattaggtacagtgagaaacaagctagaacaaccctggcccagaagactgtccactccagcaagatccagggatgatagccttgcagggccactgggagtttgtgcccaagcttctccctcttctctccccagggggcactgggactggtccctgccctcatccttagcctgggccttccccagaggtattaaagagaagtatgattcctctgtcttcagttcttttcaggggcatcctgcccatagtacccagttcccaaggggcccccagtcacgtggtgaagcctagcactcatgcagctcttagggaaccaaaaaccagcactgaaataaagctgaatgactgactgaaaaaaaaaaaaaaaaa

(The sequence listing continues in the following parts.)
